(19) United States
(12) Patent Application Publication
(10) Pub. No.: US 2026/0103690 A1
(43) Pub. Date: Apr. 16, 2026

(54) PROGRAMMABLE DNA TRANSPOSASES FOR NUCLEIC ACID MANIPULATION

(71) Applicants: Arc Research Institute, Palo Alto, CA (US); The Regents of the University of California, Oakland, CA (US)

(72) Inventors: Nicholas PERRY, Palo Alto, CA (US); Matthew DURRANT, Palo Alto, CA (US); Patrick HSU, Palo Alto, CA (US)

(21) Appl. No.: 19/134,588

(22) PCT Filed: Dec. 1, 2023
(86) PCT No.: PCT/US2023/082192

§ 371 Date: May 30, 2025

Related U.S. Application Data
(60) Provisional application No. 63/385,736, filed on Dec. 1, 2022.
(60) Provisional application No. 63/581,208, filed on Sep. 7, 2023.

(51) Int. Cl. C12N 9/12; C12N 15/11; C12N 15/90

(52) U.S. Cl. CPC C12N 9/1241; C12N 15/11; C12N 15/907

(57) ABSTRACT

The invention relates to a novel system for nucleic acid engineering utilizing components of IS110 family transposons. IS110 transposases encoded by IS110 elements were identified to utilize an RNA sequence, termed the bridgeRNA, which targets donor and target sequence sites for polynucleotide recombination reactions. In certain aspects, the application relates to the utilization and reprogramming of the bridgeRNA to direct IS110 transposases to integrate sequences at predetermined sites. Programmable insertion, excisive recombination, and/or inversion enables the integration or transposition of any polynucleotide sequence encoding a donor site or target site recognized by the IS110 transposase into any other polynucleotide sequence containing a target site sequence or donor site sequence, respectively, using an IS110 transposase and bridgeRNA. The invention has applications in cellular engineering, genome engineering, genetic medicine, synthetic biology, molecular diagnostics, transgenic organisms, and biological research.

[0001] This International Patent Application claims the benefit of and priority to U.S. Application No. 63/385,736, filed Dec. 1, 2022, entitled “INSERTION OF CARGO WITH PROGRAMMABLE TRANSPOSASES,” and U.S. Application No. 63/581,208, filed Sep. 7, 2023, entitled “PROGRAMMABLE DNA TRANSPOSASES FOR NUCLEIC ACID MANIPULATION,” the content of which are hereby incorporated by reference in their entirety.

[0002] All patents, patent applications and publications cited herein are hereby incorporated by reference in their entirety. The disclosures of these publications in their entireties are hereby incorporated by reference into this application.

[0003] This patent disclosure contains material that is subject to copyright protection. The copyright owner has no objection to the facsimile reproduction by anyone of the patent document or the patent disclosure as it appears in the U.S. Patent and Trademark Office patent file or records, but otherwise reserves any and all copyright rights.

### SEQUENCE LISTING

[0004] The instant application contains a “lengthy” Sequence Listing which has been submitted via DVD-R in lieu of a printed paper copy, and is hereby incorporated by reference in its entirety. Said DVD-R, recorded on Dec. 1, 2023, are labeled “CRF”, “Copy 1” and “Copy 2”, respectively, and each contains only one identical 819,898,112 bytes (781 MB) file (2220476-00121WO1_SL.xml).

### BACKGROUND OF THE INVENTION

[0005] DNA sequence manipulation, namely insertion, inversion, and excision of DNA, is a foundational capability underpinning synthetic biology, genome engineering, cell engineering, and genetic medicine. Such reactions have been utilized for decades, such as the Cre-loxP system, which relies on the Cre protein's specificity for pre-engineered loxP DNA sequences. The orientation and location of these DNA sequences relative to one another are used to achieve insertion, inversion, or excision of long DNA sequences. More modern methods, especially for DNA insertion, often utilize random, semi-random, or non-programmable site-specific enzymes such as recombinases and transposases for manipulation of DNA sequences, relying on enzyme-encoded specificity for target sequences. RNA-guided programmable nucleases such as Cas9, have been utilized to excise DNA by cutting at more than one site, albeit relying on DNA repair of the resulting double stranded break. For insertion and inversion, the amino acid-encoded DNA specificities of these systems are difficult to reprogram without significant protein engineering efforts, in particular through the tethering of a separate programmable targeting domain, such as an RNA-guided CRISPR effector. Other methods utilize synthetic or naturally occurring reprogrammable transposition systems that require the assembly of multiple protein and nucleic acid subunits to achieve DNA integration, yet delivery of these systems to cells can be complex and they require extensive engineering to achieve efficient inversion or excision of DNA sequences. There is, therefore, significant need and potential for a simple DNA sequence recombination system that is reprogrammable without protein engineering and easily delivered to cells.

### SUMMARY OF THE INVENTION

[0006] It is understood that any of the embodiments described below can be combined in any desired way, and that any embodiment or combination of embodiments can be applied to each of the aspects described below, unless the context indicates otherwise.

[0007] In certain aspects, the invention provides a recombinant nucleic acid editing system comprising: a) an IS110 family transposase, or a nucleic acid comprising a sequence encoding the IS110 family transposase; and b) a nucleic acid comprising a sequence encoding a bridgeRNA.

[0008] In some embodiments, the nucleic acid comprising a sequence encoding a bridgeRNA comprises a left end (LE) sequence of a transposon that encodes the IS110 family transposase. In some embodiments, the nucleic acid comprising a sequence encoding a bridgeRNA comprises a right end (RE) sequence of a transposon that encodes the IS110 family transposase.

[0009] In some embodiments, the recombinant nucleic acid editing system further comprises a nucleic acid comprising a RE sequence and a LE sequence or a RE sequence, a core sequence, and a LE sequence of the IS110 element that encodes the IS110 family transposase. In some embodiments, the recombinant nucleic acid editing system further comprises a nucleic acid comprising a right flank (RF) sequence and a left flank (LF) sequence or a RF sequence, a core sequence, and a LF sequence of the target site sequence for the IS110 family transposase. In some embodiments, the nucleic acid comprising the RE sequence and the LE sequence or the RE sequence, the core sequence, and the LE sequence further comprises a nucleic acid sequence for insertion into a target site sequence. In some embodiments, the target site sequence comprises a RF sequence and a LF sequence or a RF sequence, a core sequence, and a LF sequence for the IS110 family transposase. In some embodiments, the nucleic acid comprising the RF sequence and the LF sequence or the RF sequence, the core sequence, and the LF sequence further comprises a nucleic acid sequence for insertion into a donor site sequence. In some embodiments, the donor site sequence comprises a RE sequence and a LE sequence or a RE sequence, a core sequence, and a LE sequence of the IS110 element that encodes the IS110 family transposase.

[0010] In some embodiments, the bridgeRNA comprises a nucleotide sequence at least 50% identical to a bridgeRNA sequence of SEQ ID NOS: 1-348 or SEQ ID NOS: 349-10175. In some embodiments, said RE sequence comprises a RE sequence of SEQ ID NOS: 1-348, 30354-30529, 349-10175 or 30530-40356, said LE sequence comprises a LE sequence of SEQ ID NOS: 1-348, 30354-30529, 349-10175 or 30530-40356, and/or said core sequence comprises a core sequence of SEQ ID NOS: 1-348, 30354-30529, 349-10175 or 30530-40356.

[0011] In certain aspects, the invention provides a recombinant nucleic acid editing system comprising: a) an IS110 family transposase, or a nucleic acid comprising a sequence encoding the IS110 family transposase; and b) a bridgeRNA, or a nucleic acid comprising a sequence encoding the bridgeRNA, the bridgeRNA comprising at least one stem-loop structure and further comprising at least one internal loop comprising a first nucleotide sequence that is complementary to a first target site sequence of a target DNA, a second nucleotide sequence that is complementary to a second target site sequence which is on the opposite strand of the target DNA to the first target site sequence and wherein the bridgeRNA is capable of forming a complex with the IS110 family transposase.

[0012] In some embodiments, the bridgeRNA further comprises a third nucleotide sequence that is complementary to a first donor site sequence of a donor DNA, and a fourth nucleotide sequence that is complementary to a second donor site sequence which is on the opposite strand of the donor DNA to the first donor site sequence. In some embodiments, the third nucleotide sequence and the fourth nucleotide sequence are on a second internal loop.

[0013] In some embodiments, the IS110 family transposase comprises a RuvC-like DEDD catalytic domain and a transposase domain. In some embodiments, the IS110 family transposase further comprises a linker domain between the RuvC-like DEDD catalytic domain and transposase domain. In some embodiments, the linker domain comprises a coiled-coil linker domain. In some embodiments, the RuvC-like DEDD catalytic domain comprises an amino acid sequence at least 50% identical to a RuvC-like DEDD catalytic domain sequence of SEQ ID NOs: 10176-10523, 10524-20350, or 40357-516430. In some embodiments, the IS110 family transposase comprises a RuvC-like DEDD catalytic domain that forms a similar tertiary structure to the RuvC-like DEDD catalytic domain of IS621. In some embodiments, the IS110 family transposase RuvC-like DEDD catalytic domain comprises a tertiary structure similar to a tertiary structure of the RuvC-like DEDD catalytic domain of IS621 if the template modeling score (TM-score) for the RuvC-like DEDD catalytic domain of the IS110 family transposase is 0.5 or higher. In some embodiments, the RuvC-like DEDD catalytic domain comprises an amino acid sequence at least 15% identical to a RuvC-like DEDD catalytic domain sequence of SEQ ID NOs: 10176-10523, 10524-20350, or 40357-516430.

[0014] In some embodiments, the transposase domain comprises an amino acid sequence at least 50% identical to a transposase domain sequence of SEQ ID NOs: 10176-10523, 10524-20350, or 40357-516430. In some embodiments, the IS110 family transposase comprises a transposase domain that forms a similar tertiary structure to the transposase domain of IS621. In some embodiments, the IS110 family transposase domain comprises a tertiary structure similar to a tertiary structure of the transposase domain of IS621 if the template modeling score (TM-score) for the transposase domain of the IS110 family transposase is 0.5 or higher. In some embodiments, the transposase domain comprises an amino acid sequence at least 15% identical to a transposase domain sequence of SEQ ID NOs: 10176-10523, 10524-20350, or 40357-516430.

[0015] In some embodiments, the IS110 family transposase comprises an amino acid sequence at least 50% identical to SEQ ID NOs: 10176-10523, 10524-20350, or 40357-516430. In some embodiments, the IS110 family transposase further comprises a tertiary structure similar to a tertiary structure of IS621. In some embodiments, the IS110 family transposase comprises a tertiary structure similar to a tertiary structure of IS621 if the template modeling score (TM-score) for the transposase is 0.5 or higher. In some embodiments, the transposase domain comprises an amino acid sequence at least 15% identical to a transposase domain sequence of SEQ ID NOs: 10176-10523, 10524-20350, or 40357-516430.

[0016] In some embodiments, the IS110 family transposase is an IS110 group transposase. In some embodiments, the IS110 family transposase is an IS1111 group transposase. In some embodiments, the IS1111 group transposase is IS1111A or IS1111_229727. In some embodiments, wherein the IS110 group transposase is IS621, ISPa11, IsPa29, ISMmg1, ISPfl1, ISMae40, ISStma6, ISAzs32, ISMex9, ISCARN28, ISAar16, ISCps7, ISPpu9, ISRe19, ISEsa2, ISMma5, IS900, or ISHne5. In some embodiments, the IS110 group transposase comprises an amino acid sequence at least 50% identical to IS621 (SEQ ID NO: 10176).

[0017] In some embodiments, the bridgeRNA comprises at least two stem-loop structures comprising a first stem-loop and a second stem-loop where the first stem-loop is 5′ to the second stem-loop and wherein the first stem-loop comprises a target binding loop and the second stem-loop comprises a donor binding loop. In some embodiments, the bridgeRNA further comprises a third stem-loop structure 5′ of the first stem-loop. In some embodiments, the stem of the first stem-loop is 5 to 35 nucleotides long and the loop is 3-10 nucleotides long, the target binding loop is 5 to 20 nucleotides long, the stem of the second stem-loop is 5 to 35 nucleotides long and the loop is 3-10 nucleotides long, and the donor binding loop is 5 to 20 nucleotides long. In some embodiments, the stem of the second stem-loop structure comprises 1 to 4 loops or bubbles that are each 1 to 10 nucleotides long.

[0018] In some embodiments, the bridgeRNA comprises a nucleotide sequence comprising any of the 5′ to 3′ sequences provided in FIG. 19, wherein “n” represents any nucleotide, “R” represents an A or G nucleotide, and “Y” represents a C or U nucleotide. In some embodiments, the bridgeRNA comprises a 5′ to 3′ secondary structure provided in the first row, second row, third row, or fourth row of secondary structure for said sequence provided in FIG. 19, wherein matching parentheses “(“and”)” indicate base-paired nucleotides, and “.” indicates unpaired bases.

[0019] In some embodiments, the bridgeRNA comprises a stem-loop structure as depicted in FIG. 2D, FIG. 11B, or FIG. 13.

[0020] In some embodiments, the target binding loop of the bridgeRNA comprises: a left-target guide (LTG) comprising, in the 5′ to 3′ direction, a nucleotide sequence complementary to first strand of a target site sequence wherein the 3′ end of the LTG is complementary to at least one of the nucleotides of a core sequence on the first strand of the target site sequence; and a right-target guide (RTG) comprising, in the 5′ to 3′ direction, a nucleotide sequence that is a reverse complement to an opposite strand of the first strand of the target site sequence wherein the 3′ end of the RTG is reverse complementary to at least one of the nucleotides of the core sequence on the opposite strand of the first strand of the target site sequence; wherein the target site sequence is a polynucleotide sequence; and/or wherein the donor binding loop of the bridgeRNA comprises: a left-donor guide (LDG) comprising, in the 5′ to 3′ direction, a nucleotide sequence complementary to a first strand of a donor site sequence wherein the 3′ end of the LDG complementary to at least one of the nucleotides of a core sequence on the first strand of the donor site sequence; and a right-donor guide (RDG) comprising, in the 5′ to 3′ direction, a nucleotide sequence that is a reverse complement to an opposite strand of the first strand of the donor site sequence wherein the 3′ end of the RDG is reverse complementary to at least one of the nucleotides of the core sequence on the opposite strand to the first strand of the donor site sequence; wherein the donor site sequence is a polynucleotide sequence, and the core sequence of the donor site sequence is the same as the core sequence of the target site sequence.

[0021] In some embodiments, the target binding loop of the bridgeRNA comprises: a left-target guide (LTG) comprising, in the 5′ to 3′ direction, a nucleotide sequence is reverse complementary to an opposite strand to a first strand of a target site sequence wherein the 3′ end of the LTG is complementary to at least one of the nucleotides of a core sequence on the opposite strand to the first strand of the target site sequence; and a right-target guide (RTG) comprising, in the 5′ to 3′ direction, a nucleotide sequence that is a complementary to the first strand of the target site sequence wherein the 3′ end of the RTG is complementary to at least one of the nucleotides of the core sequence on the first strand of the target site sequence; wherein the target site sequence is a polynucleotide sequence; and/or wherein the donor binding loop of the bridgeRNA comprises: a left-donor guide (LDG) comprising, in the 5′ to 3′ direction, a nucleotide sequence complementary to a first strand of a donor site sequence wherein the 3′ end of the LDG complementary to at least one of the nucleotides of a core sequence on the first strand of the donor site sequence; and a right-donor guide (RDG) comprising, in the 5′ to 3′ direction, a nucleotide sequence that is a reverse complement to an opposite strand of the first strand of the donor site sequence wherein the 3′ end of the RDG is reverse complementary to at least one of the nucleotides of the core sequence on the opposite strand to the first strand of the donor site sequence; wherein the donor site sequence is a polynucleotide sequence, and the core sequence of the donor site sequence is the same as the core sequence of the target site sequence.

[0022] In some embodiments, the target site sequence comprises sequence X₁X₂X₃X₄X₅X₆X₇X₈X₉X₁₀X₁₁X₁₂X₁₃X₁₄ where X is any nucleotide, and X₈X₉ are the core and one or more of X₁₂, X₁₃, and X₁₄ are optionally part of the target site sequence. In some embodiments, the bridgeRNA encodes an LTG in the 5′ to 3′ direction X₁X₂X₃X₄X₅X₆X₇X₈ and an RTG in the 5′ to 3′ direction Y₁₄Y₁₃Y₁₂Y₁₁Y₁₀Y₉Y₈ where Y is the complementary nucleotide to X and one or more of Y₁₄, Y₁₃, and Y₁₂ are optionally part of RTG or wherein the bridgeRNA encodes an LTG in the 5′ to 3′ direction X₁X₂X₃X₄X₅X₆X₇X₈X₉ and an RTG in the 5′ to 3′ direction Y₁₄Y₁₃Y₁₂Y₁₁Y₁₀Y₉ where Y is the complementary nucleotide to X and one or more of Y₁₄, Y₁₃, and Y₁₂ are optionally part of RTG. In some embodiments, the donor site sequence comprises sequence STIR-Xₙ₁—X₁X₂X₃X₄X₅X₆X₇X₈X₉X₁₀X₁₁X₁₂X₁₃X₁₄—Xₙ₂-STIR where X is any nucleotide, one or more of X₁₂, X₁₃, and X₁₄ are optionally part of the donor site sequence, STIR is optional, but if present is a sub-terminal inverted repeat comprising 2 to 20 nucleotides, and X₈X₉ are the core, and n1 and n2 can independently be zero to 10. In some embodiments, the bridgeRNA encodes an LDG in the 5′ to 3′ direction X₁X₂X₃X₄X₅X₆X₇X₈ and an RDG in the 5′ to 3′ direction Y₁₄Y₁₃Y₁₂Y₁₁Y₁₀Y₉Y₈ where Y is the complementary nucleotide to X and one or more of Y₁₄, Y₁₃, and Y₁₂ are optionally part of RDG or wherein the bridgeRNA encodes an LDG in the 5′ to 3′ direction X₁X₂X₃X₄X₅X₆X₇X₈X₉ and an RDG in the 5′ to 3′ direction Y₁₄Y₁₃Y₁₂Y₁₁Y₁₀Y₉ where Y is the complementary nucleotide to X and one or more of Y₁₄, Y₁₃, and Y₁₂ are optionally part of RDG. In some embodiments, the STIR, if present, comprises a G/T rich nucleotide sequence. In some embodiments, the 5′ STIR, if present, comprises a G/T rich nucleotide sequence.

[0023] In some embodiments, the target site sequence is located on genomic DNA, a linear dsDNA, a dsDNA plasmid, ssDNA or RNA. In some embodiments, the donor site sequence is located on genomic DNA, a linear dsDNA, a dsDNA plasmid, ssDNA or RNA. In some embodiments, the dsDNA plasmid further comprises a polynucleotide sequence for insertion into the donor site sequence. In some embodiments, the dsDNA plasmid further comprises a polynucleotide sequence for insertion into the target site sequence. In some embodiments, the target site sequence and donor site sequence on the genomic DNA are located on the same DNA strand. In some embodiments, the target site sequence and donor site sequence on the genomic DNA are located on different chromosomes.

[0024] In some embodiments, the bridgeRNA is a split bridgeRNA. In some embodiments, the bridgeRNA comprises a first RNA molecule that comprises a first portion of the bridgeRNA and a second RNA molecule that comprises a second portion of the bridgeRNA. In some embodiments, the first portion of the bridgeRNA comprises the internal loop comprising the first nucleotide sequence that is complementary to the first target site sequence of the target DNA and the second portion of the bridgeRNA comprises the second internal loop comprising the third nucleotide sequence that is complementary to the first donor site sequence of a donor DNA, and the fourth nucleotide sequence that is complementary to the second donor site sequence. In some embodiments, the first portion of the bridgeRNA is encoded on a nucleic acid and is operably linked to a first promoter and the second portion of the bridgeRNA is encoded on the same or a different nucleic acid and is operably linked to a second promoter. In some embodiments, the first portion of the bridgeRNA and second portion are encoded on a nucleic acid and further comprise one or more ribozyme cites which results in cleavage of the expressed bridgeRNA into the first and second RNA molecules.

[0025] In some embodiments, any of the LTG, RTG, LDG, and/or RDG of the bridgeRNA are complementary to more nucleotides their respective target site sequence or donor site sequence than the number of complementary nucleotides in its corresponding naturally occurring bridgeRNA. In some embodiments, the total number of nucleotides comprising the target binding loop and/or donor binding loop of the bridgeRNA is the same as its corresponding naturally occurring bridgeRNA. In some embodiments, the total number of nucleotides comprising the target binding loop and/or donor binding loop of the bridgeRNA is the increased as compared to its corresponding naturally occurring bridgeRNA. In some embodiments, any of the LTG, RTG, LDG, and/or RDG of the bridgeRNA are not complementary to a nucleotide of the core sequence in their respective target site sequence or donor site sequence but are complementary to the same number of nucleotides in the respective target site sequence or donor site sequence as its corresponding naturally occurring bridgeRNA. In some embodiments, the target site sequence comprises sequence X₋₁X₁X₂X₃X₄X₅X₆X₇X₈X₉X₁₀X₁₁X₁₂X₁₃X₁₄ where X is any nucleotide, and X₈X₉ are the core and one or more of X₁₂, X₁₃, and X₁₄ are optionally part of the target site sequence and wherein the bridgeRNA encodes an LTG in the 5′ to 3′ direction X₋₁X₁X₂X₃X₄X₅X₆X₇ and an RTG in the 5′ to 3′ direction Y₁₄Y₁₃Y₁₂Y₁₁Y₁₀Y₉Y₈ where Y is the complementary nucleotide to X and one or more of Y₁₄, Y₁₃, and Y₁₂ are optionally part of RTG. In some embodiments, the donor site sequence comprises sequence STIR-Xₙ₁—X₁X₂X₃X₄X₅X₆X₇X₈X₉X₁₀X₁₁X₁₂X₁₃X₁₄—Xₙ₂-STIR where X is any nucleotide, one or more of X₁₂, X₁₃, and X₁₄ are optionally part of the donor site sequence, STIR is optional, but if present is a sub-terminal inverted repeat comprising 2 to 20 nucleotides, and X₈X₉ are the core, and n1 and n2 can independently be 1 to 10, and wherein the bridgeRNA encodes an LDG in the 5′ to 3′ direction X₁X₁X₂X₃X₄X₅X₆X₇ and an RDG in the 5′ to 3′ direction Y₁₄Y₁₃Y₁₂Y₁₁Y₁₀Y₉Y₈ where Y is the complementary nucleotide to X and one or more of Y₁₄, Y₁₃, and Y₁₂ are optionally part of RDG. In some embodiments, one or more of the nucleotides of the LTG, RTG, LDG, and/or RDG of the bridgeRNA base pair to a nucleotide of their respective target site sequence or donor site sequence vis non-canonical base pairing.

[0026] In certain aspects, the invention provides a vector comprising any of the nucleic acids of the nucleic acid editing system of the invention. In certain aspects, the invention provides a host cell comprising any of the vector(s) of the invention. In some embodiments, any of the nucleic acids of the nucleic acid editing system further comprise an inducible promoter.

[0027] In certain aspects, the invention provides a method of integrating a DNA molecule of interest into a sequence specific site of a DNA of interest of a cell, the method comprising introducing into the cell: a nucleic acid editing system of the invention.

[0028] In some embodiments, the cell is a mammalian cell. In some embodiments, the cell is a human cell.

[0029] In some embodiments, the DNA of interest of the cell comprises a donor site sequence and the DNA molecule of interest is part of a nucleic acid of the nucleic acid editing system comprising a target site sequence. In some embodiments, the DNA of interest of the cell comprises a target site sequence and the DNA molecule of interest is part of a nucleic acid of the nucleic acid editing system comprising a donor site sequence. In some embodiments, the DNA of interest of the cell further comprises a second donor site sequence and the DNA molecule of interest further comprises a second target site sequence and the nucleic acid editing system comprises a second bridgeRNA that targets the second donor site sequence and second target site sequence. In some embodiments, the DNA of interest of the cell comprises a second target site sequence and the DNA molecule of interest further comprises a second donor site sequence and the nucleic acid editing system comprises a second bridgeRNA that targets the second donor site sequence and second target site sequence. In some embodiments, the sequence of the bridgeRNA was engineered before introduction of the nucleic acid editing system to bind to the donor site sequence and target site sequence. In some embodiments, the DNA of interest of the cell is the genome of the cell. In some embodiments, the DNA of interest of the cell is a plasmid.

[0030] In certain aspects, the invention provides a method of inverting a DNA sequence of a DNA of interest of a cell, the method comprising introducing into the cell: a nucleic acid editing system of the invention, wherein a target site sequence and donor site sequence are present on the same DNA molecule of interest and the LD of the donor site sequence and RT of the target site sequence are on the same DNA strand.

[0031] In some embodiments, the DNA of interest of the cell is the genome of the cell. In some embodiments, the sequence of the bridgeRNA was engineered, before introduction of the nucleic acid editing system, to bind to the donor site sequence and target site sequence.

[0032] In certain aspects, the invention provides a method of excising a DNA sequence of a DNA of interest of a cell, the method comprising introducing into the cell: a nucleic acid editing system of the invention, wherein a target site sequence and donor site sequence are present on the same DNA molecule of interest and the LD of the donor site sequence and LT of the target site sequence are on the same DNA strand.

[0033] In some embodiments, the DNA of interest of the cell is the genome of the cell. In some embodiments, the sequence of the bridgeRNA was engineered, before introduction of the nucleic acid editing system, to bind to the donor site sequence and target site sequence.

[0034] In certain aspects, the invention provides a method of translocating DNA sequences between two linear DNA molecules of interest, the method comprising introducing into a cell: a nucleic acid editing system of the invention, wherein a donor site sequence is present on a first linear DNA molecule and a target site sequence is present on a second linear DNA molecule.

[0035] In some embodiments, the linear DNA molecules of interest of the cell are chromosomes of the cell. In some embodiments, the sequence of the bridgeRNA was engineered, before introduction of the nucleic acid editing system, to bind to the donor site sequence and target site sequence.

[0036] Other embodiments of the invention are further described in the following sections of the application, including the Drawings, Detailed Description, Examples, and Claims. Still other objects and advantages of the invention will become apparent by those of skill in the art from the disclosure herein, which are simply illustrative and not restrictive. Thus, other embodiments will be recognized by the ordinarily skilled artisan without departing from the spirit and scope of the invention.

### BRIEF DESCRIPTION OF THE DRAWINGS

[0037] The patent or application file contains at least one drawing originally executed in color. To conform to the requirements for PCT patent applications, many of the figures presented herein are black and white representations of images originally created in color.

[0038] FIGS. 1A-E show general features of IS110 insertion sequence elements. (A) Sequence features of the two groups of IS110s. The IS110 group is characterized by longer left non-coding ends (LE) and shorter right non-coding ends (RE). The IS1111 group is characterized by shorter LE and longer RE. In both groups, a core sequence motif (1-5 nt) is found at both ends of the element. IS110s were previously thought to lack sub-terminal inverted repeats (STIRs), while IS111 is were known to have 6-12 nt sub-terminal inverted repeats. However, as described herein, most IS110s also have short STIRs (see FIGS. 10A-B). IS110 elements are typically 1000-2000 nt in length. Figure discloses SEQ ID NOS 795157-795160. (B) Depiction of domains of IS110 transposases. IS110 transposases are typically 300-500aa long. The RuvC-like domain (DEDD_Tnp_IS110 by Pfam) includes a canonical DEDD catalytic motif. The IS110 Tnp domain (Transposase_20 by Pfam) has a catalytic serine. (C) Depiction of IS110 element life-cycle. Genomically integrated IS110 elements cut themselves from the genome and results in scarless repair of the genomic DNA target site and the formation of a circular IS110 element. In the circular form, the RE becomes adjacent to the LE. Insertion can occur into the same dsDNA target site or into new target sites. An inserted linear IS110 element consists of a left non-coding end (LE), coding sequence for a transposase (Tpase), and a right non-coding end (RE). The inserted IS110 element is flanked on the left end with a left flank (LF) (leftmost box) comprising a left target (LT) sequence and on the right end with a right flank (RF) (rightmost box) comprising a right target (RT) sequence. For many IS110 elements, between the LF and LE and between RE and RF are identical “core” sequences (rhombus), although not all IS110 elements may utilize a “core” sequence. IS110 elements excise themselves, resulting in a pre-insertion (“target”) site bearing LF-core (if present)-RF, and a circular element with RE-core (if present)-LE-Tpase. Concatenation of the RE-LE junction forms a “donor” site sequence as a subsequence of the RE-LE junction, which, if present, includes the other core sequence found on the integrated element. The donor site sequence may also include sub-terminal inverted repeats (STIR) indicated with triangles, although STIRs are not required for IS110 recombinase activity. Concatenation of the RE-LE also forms a promoter which may promote expression of a bridgeRNA from the RE or LE. It may also promote expression of the transposase. The circular form of the element can reinsert into the target site from which it was excised or into any other polynucleotide with a target site sequence; the bridgeRNA encoded within the LE or RE recognizes the donor site sequence and/or the target site sequence to mediate transposition. Figure discloses SEQ ID NOS 795161-795164. (D) IS110 transposase phylogenetic tree. IS110s have several clades but are largely distinguished by the IS110 and IS1111 groups. Showing host kingdom and phylum to demonstrate diverse origins. The location of notable IS110 transposases is highlighted on the tree. (E) Comparison of IS110 group end lengths. IS110s typically have LEs longer than their REs, while IS111 s typically have REs longer than their LEs.

[0039] FIGS. 2A-D show identification of the bridgeRNA from the model IS110 IS621. (A) RNAseq of IS110 non-coding ends (SEQ ID NO: 795165). A plasmid encoded RE-LE sequence was delivered to E. coli and RNA was extracted and sequenced. Boundaries of an RNA encoded within the LE are defined across 6 orthologs of IS621. (B) Demonstration of bridgeRNA binding to IS621 transposase. The RNA in part A for IS621 was purified and exposed to IS621 transposase at varying concentrations. Microscale thermophoresis is used to measure the binding kinetics of the bridgeRNA to the transposase. A scrambled RNA with no bases matching and a reverse complement of the bridgeRNA serve as negative controls. (C) Determination of IS621 bridgeRNA structure. Hundreds of related LEs of IS621 were aligned and RNA structure was predicted for each. The predominant structure at each position in the alignment was calculated and plotted; structures were characterized as 5′ stem, 3′ stem, hairpin, other or gap. A structure between the LE start and CDS start emerged that features a consensus bridgeRNA structure and accessory structure on the 5′ end. (D) Depiction of IS621 bridgeRNA structure: nnnnnnnnYYnRRnnnnYYYnnnYnnnnRRnnnnYYGGAYGCCGYnYYnRnCCUnnRRYnnn ARYYYGYnnYGUAGAUnnnYGCRnCRRnYRYYnnnnnnnnYnnGYnnnRRRYCGRACnG nAUCnYnGGCYGGYnnnYCGRnARYCYGCAUYACAAGUnGRUnRCRYRAnnnn (SEQ ID NO: 795166). The information in C is represented here using the software R2R. The target binding loop and donor binding loop are labeled. An accessory structure for this particular bridgeRNA is also labeled. The secondary structure of IS621 bridgeRNA structure in FIG. 2D is represented in “dot-bracket” notation as: ...((((((((((....)))))))))).((((((((((.(((............(((((....)))))..............))))))).......(.((((....(((............. ((((((....)))))...).............)))).)... where matching parentheses “(“and”)” indicate base pairs, and unpaired bases are shown as dots (“.”).

[0040] FIGS. 3A-D show prediction and verification of the mechanism of bridgeRNA recognition of DNA. (A) Depiction of covariation analysis approach. Boundaries of IS110 elements are identified using comparative genomics. The non-coding ends are concatenated as they would be in the circular form of an IS110 to identify the donor sites and the pre-integration target sites are extracted. bridgeRNA sequences are predicted from non-coding ends. Alignments of target sites (or donor sites) are compared to structurally informed alignments of bridgeRNA sequences to identify covarying positions (SEQ ID NOS 795167-795168, respectively, in order of appearance). (B) Covariation between the bridgeRNA of IS621 and its target and donor. A covariation score as calculated by the software CCMpred was normalized and plotted for each position of the target and donor along the left end. Subsequences of the bridgeRNA, covary with the target and donor. Covarying sequences are observed to be complementary or reverse-complementary to the donor and target. These covarying regions in the bridgeRNA were then inspected for evidence of base-pairing with the target and donor sequences to identify the programmable guide sequences. Figure discloses SEQ ID NOS 795172, 795164, and 795169-795171, respectively, in order of appearance. (C) Model of IS621 bridgeRNA with target and donor sequences. A representation of the R2R structure in FIG. 2D is shown with the LTG, RTG, LDG, and RDG positions within the target binding loop and donor binding loop. The LT, RT, LD, and RD are shown with their relative positions to the core sequence found in both the target and donor. Sub-terminal inverted repeats are also shown on the donor. The target binding loop of the bridgeRNA comprises a left-target guide (LTG) and right-target guide (RTG) which are specific for sequences of the target site, i.e., the left target (LT) and right target (RT) sequences, respectively. For IS110 family transposases that use a core sequence, both the LTG and RTG may include base-pairing specificity for at least one base of the core dinucleotide sequence (dashed lines). The donor binding loop of the bridgeRNA comprises a left-donor guide (LDG) and right-donor guide (RDG) which are specific for sequences of the donor site, i.e., the left donor (LD) and right donor (RD) sequences, respectively. For IS110 family transposases that use a core sequence, both the LDG and RDG may include base-pairing specificity for at least one base of the core sequence. The donor site may also encode sub-terminal inverted repeats (STIR) which interact directly with the transposase protein, and therefore may be required for the transposition reaction or other parts of the IS110 life-cycle such as cutting and pasting. In some embodiments, additional bridgeRNA nucleotides outside of these described guide sequences can play a role in programming specificity for different target and donor sequences. Figure discloses SEQ ID NOS 795172 and 795164, respectively, in order of appearance. (D) Demonstration of sequence specific binding of target and donor. IS621 transposase and bridgeRNA ribonucleoproteins were exposed to the WT target and donor sequences as well as scrambled DNA sequences that match at 0 positions. The binding affinity for the WT bridgeRNA for the WT donor and target is shown.

[0041] FIG. 4 shows a diagram of how to reprogram a bridgeRNA to recognize new targets and donors. Depiction of bridgeRNAs programmed to recognize new targets and donors. The WT bridgeRNA is first depicted with the WT target and donor sequence. The target and/or donor loops are modified in each of the following examples. The bridgeRNA sequences are depicted with the LTG, RTG, LDG, and RDG sequences indicated which are capable of base-pairing with the target and donor site sequences depicted. These subsequences may be reprogrammed to bind with any desired target or donor sequence. In all five examples, the core nucleotides of the target and donor match each other. In the final example, the STIRs are modified to any sequence, since they are not strictly required for transposition function. Figure discloses SEQ ID NOS 795169, 795173-795174, 795170-795171, 795175-795178, 795171, 795179, 795176, 795180, 795178, 795180-795184, 795183, 795185-795186, 795187-795188, and 795187, respectively, in order of appearance.

[0042] FIGS. 5A-D shows in cellulo demonstration of transposition and target reprogramming. (A) GFP reporter assay for transposition. A pDonor plasmid encodes an inactive GFP gene adjacent to the RE-LE of IS621, which expresses the bridgeRNA. pDonor is co-transformed into E. coli along with pTarget, which encodes the WT target and the IS621 transposase, both of which are adjacent to promoters. Integration of donor into target activates GFP expression. (B) Demonstration of GFP reporter assay function. E. coli cells are measured for GFP expression on the FITC channel using flow cytometry. GFP expression is observed using the assay in (A) only when the transposase is WT; inactivation of conserved residues in either the RuvC-like domain or Tnp domain abolishes transposition. (C) Diagram of reprogramming bridgeRNAs to recognize new targets. The target loop of the bridgeRNA is modified to recognize a new target. The target is also modified to match the target loop when used in the reporter assay in A. Graph shows demonstration of specific re-targeting of transposition to new targets. Plasmids expressing seven bridgeRNAs with unique target loops were paired with matching targets or the WT target. Transposition is observed only when the matching target is provided, as measured by flow cytometry for GFP expression. Figure discloses SEQ ID NOS 795189, 795190, 795176, 795191-795194, and 795173, respectively, in order of appearance. (D) Separation of the bridgeRNA from the RE-LE. The bridgeRNA can be separated and expressed from a separate promoter to achieve higher rates of transposition. The donor sequence can be reduced from 298 bp to at least 22 bp without affecting transposition efficiency. Truncation to 11 bp (removing the STIRs) reduces transposition efficiency to near background. Some integrations are observed when the bridgeRNA is present with the 11 bp donor. Systems lacking a bridgeRNA never result in integration. Figure discloses SEQ ID NOS 795195-795196, respectively, in order of appearance.

[0043] FIGS. 6A-E shows IS621 bridgeRNA target/target loop mismatch tolerance and reprogramming screen. (A) Schematic depicting antibiotic resistance reporter design. A minimal donor (22 bp) is encoded on a plasmid adjacent to a kanamycin resistance gene. A second plasmid encodes the target, bridgeRNA, and transposase. The target is linked to the bridgeRNA using a barcode. Recombination between the donor and target plasmid results in E. coli survival, and functional bridgeRNA target loop and target pairs are recorded using next generation sequencing. (B) Schematic depicting target specificity screen design. The target (SEQ ID NOS 795197-795205, respectively, in order of appearance) and target loop are varied, except for the core of the target and the subsequences of the LTG and RTG that bind the core. The donor loop (and donor) are held constant. Target and target loop pairs are designed to assay single mismatches, double mismatches, and total mismatches. Targets in the screen are selected to reduce the number of off-targets in the E. coli genome. (C) Abundance of target and target loop pairs. Abundance is measured by barcode counts per million reads. Target/target loop pairs with zero mismatches are generally more abundant, while increasing the number of mismatches decreases abundance. (D) Sequence logo of top quintile of targets. The relative enrichment of nucleotides at each position of the target are shown for target/target loop pairs with zero mismatches in the top quintile of 6364 target/target loop pairs. (E) Single mismatch tolerance by position. The relative enrichment of nucleotides for the top quintile of target sets are shown when the target loop does or does not mismatch for each position of the target (SEQ ID NO: 795173). The best performing zero-mismatch pair in each target set is used to represent the set, and the top quintile of target sets is shown.

[0044] FIGS. 7A-H show IS621 bridgeRNA donor/donor loop mismatch tolerance and reprogramming screen. (A) Schematic depicting antibiotic resistance reporter design. A full length donor is encoded on a plasmid adjacent to a kanamycin resistance gene. The constitutive promoter of the WT system expresses the bridgeRNA. A unique molecular identifier (UMI) identifies a donor/donor loop pair. A second plasmid encodes the target and transposase. Recombination between the donor and target plasmid results in E. coli survival, and functional bridgeRNA donor loop and donor pairs are recorded using next generation sequencing. (B) Schematic depicting donor specificity and reprogramming design. The donor (SEQ ID NOS 795206-795212, respectively, in order of appearance) and donor loop are varied, except the core and the subsequences of the LDG and RDG that bind the core. The target loop (and target) are held constant, but the target is a non-WT sequence not found in the E. coli genome. Target and target loop pairs are designed to assay single mismatches and double mismatches for the WT donor sequence. 5000 random perfectly-matched donor and donor loops are also assayed. (C) UMI abundance of donor/donor loop pairs with 1 nt difference from WT. Counts are plotted for pairs with 0 or 1 mismatches between donor and donor loop. UMI abundance of WT donor paired with WT donor loop is depicted as a red dashed line. (D) UMI abundance of donor/donor loop pairs with 2 nt difference from WT. Counts are plotted for pairs with 0 or 2 mismatches between donor and loop. UMI abundance of WT donor paired with WT donor loop is depicted as a red dashed line. (E) UMI abundance of donor/donor loop pairs with 0 mismatches. CPM values of donor/donor loop pairs are binned by the number of nucleotide differences between the reprogrammed donor and WT donor. CPM of WT donor paired with the WT donor loop is depicted as a red dashed line. (F) Single mismatch tolerance by position in the donor (SEQ ID NO: 795196). The relative enrichment of nucleotides for the top quintile of donor sets is shown, with all 4×4=16 mismatch combinations tested at each position in the donor. (G) Sequence logo of top quintile of donors. The relative enrichment of nucleotides at each position of the target are shown for donor-donor loop pairs with zero mismatches in the top quintile of 5000 donor/donor loop pairs. (H) Demonstration of specific re-targeting of transposition to new donors. Plasmids expressing five bridgeRNAs with unique donor loops (SEQ ID NOS 795196 and 795213-795221, respectively, in order of appearance) were matched with cognate donors or the WT donor. Transposition is observed only when the matching donor is provided, as measured by flow cytometry for GFP expression via FITC. Results were generated using a 22 bp donor using the approach in FIG. 5D.

[0045] FIGS. 8A-C show a diagram and demonstration of DNA rearrangements with IS621 transposase. (A) Depiction of GFP-reporter assay for DNA insertion. A plasmid encoding a donor and a GFP coding sequence and a plasmid encoding a target plasmid adjacent to a promoter are delivered into E. coli. Co-expression of a bridgeRNA encoding target and donor loops matching the provided target and donor results in efficient insertion in E. coli. Figure discloses SEQ ID NOS 795164 and 795222-795224, respectively, in order of appearance. (B) Depiction of GFP-reporter assay for excisive recombination of DNA. A plasmid encoding a promoter adjacent to a donor and a target preceded by a terminator and followed by a GFP coding sequence is delivered to E. coli. Co-expression of a bridgeRNA encoding target and donor loops matching the provided target and donor results in efficient excisive recombination in E. coli; removal of the intervening sequence encoding the terminator enables GFP expression. The reaction results in one DNA molecule becoming two DNA molecules. Figure discloses SEQ ID NOS 795164, 795225, 795223, and 795226, respectively, in order of appearance. (C) Depiction of GFP-reporter assay for inversion of DNA. A plasmid encoding a promoter adjacent to a donor and a target preceded by a terminator and GFP coding sequence is delivered to E. coli, Co-expression of a bridgeRNA encoding target and donor loops matching the provided target and donor results in efficient inversion in E. coli; inversion of the sequence between the donor and target enables GFP expression. Figure discloses SEQ ID NOS 795164, 795227, 795226, and 795228, respectively, in order of appearance. (A-C) Insertion efficiency is measured by the percent of cells expressing GFP as measured by flow cytometry. Excisive recombination efficiency is measured by the percent of cells expressing GFP as measured by flow cytometry. Inversion efficiency is measured by the percent of cells expressing GFP as measured by flow cytometry.

[0046] FIGS. 9A-B shows a diagram and demonstration of DNA insertion into the E. coli genome with IS621 transposase. (A) Depiction of genome integration assay. An E. coli cell line containing a donor plasmid is made that can grow under kanamycin selection below 37° C. due to kanamycin resistance encoded on the donor plasmid. At 37° C., the donor plasmid cannot replicate. A pHelper plasmid encoding IS621 transposase and a bridgeRNA that recognizes the donor on the plasmid and a target in the genome is delivered to E. coli. Growth at 37° C. results in selection for E. coli that have integrated the plasmid into the genome, which is required for survival. (B) Integration profile using bridgeRNAs targeting four sites in the genome for integration. Targets are rank ordered by relative abundance of integration locations from nanopore sequencing data. Integration sites are colored by the number of differences between the observed target site and the expected target site. Figure discloses SEQ ID NOS 795229-795235, respectively, in order of appearance.

[0047] FIGS. 10A-B shows identification of sub-terminal inverted repeats in IS110 group IS110 elements. (A) Diagram of approach for identifying sub-terminal inverted repeats. Boundaries of IS110 elements are identified using comparative genomics and BLAST. The non-coding ends are concatenated as they would be in the circular form and are aligned. Covarying sequences are compared across the donor up to 25 bp in each direction from the core. (B) Covariation of sequences within the donor identifies short sub-terminal inverted repeats. A covariation score is plotted for each position of the donor for covariation with itself.

[0048] FIGS. 11A-C shows prediction and verification of a bridgeRNA expressed from the RE of an IS1111. (A) Determination of IS1111_229727 bridgeRNA structure. Hundreds of related REs of IS1111_229727 were aligned and RNA structure was predicted for each. The predominant structure at each position in the alignment was calculated and graphed; structures were characterized as 5′, 3′ stem, hairpin, other or gap. A structure between the estimated RE start and element boundary emerges that features a target binding loop and donor binding loop. (B) Depiction of IS1111_229727 bridgeRNA structure nnnnnGnYYnYYGRnRGnGRCGYRGCCCGGYnnnnGnGYAAYCCnCGnnnnYRYnnnGnR RCnRnnnYnRAYYYnCGnnnYYAGAnnGnGGCAGGCnCnYnnGRCGGAnnYnnGYRnnG YGGUAnCCARYCCRCGRAURUCAGCnnGAUYnRCCGUCGnnnnnnRCYnGCYnCGYC nCnnYYRRnnRnYnnnnn (SEQ ID NO: 795236). The information in A is represented here using the software R2R. The secondary structure of IS1111_229727 bridgeRNA structure in FIG. 11B is represented in “dot-bracket” notation as: ...(((((((((((.(((((((((((..(((....((((...((((..........(((((((((.))))..)))))..........))))...))))....(((((..........(((((..... ...))))).................))))).......))).))))))))))).)))))))))))... where matching parentheses “(“and”)” indicate base pairs, and unpaired bases are shown as dots (“.”). (C) RNAseq verification of IS1111_229727 bridgeRNA. RNAseq coverage is represented over the RE of IS1111_229727.

[0049] FIGS. 12A-B show alignment of RuvC and Tnp domains of diverse IS110 transposases. (A) Alignment of IS110 RuvC-like domains (SEQ ID NOS 795237-795261, respectively, in order of appearance). Alignment is depicted with conserved residues and regions. Residues are colored by amino acid chemical properties. (B) Alignment of IS110 Tnp domains (SEQ ID NOS 795262-795286, respectively, in order of appearance). Alignment is depicted with conserved residues and regions. Residues are colored by amino acid chemical properties.

[0050] FIG. 13 shows diverse predicted bridgeRNA structures associated with diverse IS110 transposases. Showing diverse bridgeRNA consensus structures predicted from across diverse IS110 transposases. The procedure to generate each structure was the same as the procedure used to generate the IS621 bridgeRNA consensus structure. RNA covariance models were clustered using a graph-clustering approach, and consensus structures from 12 different clusters are shown. At least one loop resembling the target and/or donor loop is present in each structure. Significantly co-varying base-pairs are shown with a gray box highlight. The bridgeRNA structures in FIG. 13 are representations of SEQ ID NOs: 795287-795303, respectively, with gap positions excluded and trimming of extra unstructured bases.

[0051] FIGS. 14A-H shows tertiary structure alignment and analysis of IS110 transposase proteins. (A) Formula for the Template modeling score (TM-score), where L_{target} is the length of the amino acid sequence of the target protein, and L_{common} is the number of residues that appear in both the template and target structures. dᵢ is the distance between the ith pair of residues in the template and target structures, and dₒ(L_{target})=1.24∛(L_target−15)−1.8 is a distance scale that normalizes distances (Zhang and Skolnick 2004). Alternatively, the score can be normalized according to the length of the query protein, or the score can be normalized by the averaged length of the two proteins. A TM-score has a value in (0,1], and a cutoff of >0.5 is commonly used for identifying proteins with homologous tertiary structures (Zhang and Skolnick 2005). (B) TM-score distribution when aligning predicted IS110 structures to the IS621 AlphaFold structure. Each row shows the distribution of TM-scores when normalized according to the length described on the right—the average of the two lengths, the length of IS621, or the length of the query protein. The dotted line indicates a TM-score of 0.5, a commonly used minimum score threshold for identifying homologous proteins. (C) Structural alignment of two distantly related IS110 proteins. IS621 is shown in green, a separate predicted IS110 transposase structure is shown in cyan. Four different angles of the same structural alignment are shown. These two proteins are 18.1% at the amino acid level, but have a TM-score of 0.805. (D) TM-score distribution of IS110 structures when clustered and aligned to the IS621 structure. Protein structures were clustered at 100%, 90%, and 50% identity and a representative of each cluster was taken. The TM-score normalized by the average length of the two sequences is shown. Each panel is a different level of percent amino acid identity clustering. (E) TM-scores of RuvC and Tnp domains when aligned to IS621 domains, compared with the full protein TM-scores. Domains were extracted using the boundaries identified by the corresponding Pfam domains (DEDD_Tnp_IS110 and Transposase_20). These domain sub-structures were then aligned to the IS621 sub-structures using TM-align. TM-scores are shown for the full protein, the RuvC domain, and the Tnp domain. (F) IS630 transposase TM-scores vs. IS110 transposase TM-scores. All IS110 family and IS630 family transposase structures were aligned to the IS621 AlphaFold structure. The TM-score normalized by the average length of the two sequences is shown. The IS630 family was selected for comparison because it had a similar protein length distribution to that of IS110. (G) Schematic demonstrating the location of conserved residues within their respective protein structural domains and the estimated distances between them. On the top panel, showing the 5 conserved residues in the RuvC domain in a representative IS110 structure and a representative IS1111 structure. Residues are colored and labeled with the color red. The 5 positions are labeled P1-P5. Also showing the distances between these residues that are subsequently calculated, including D1-D3, which are colored and labeled as blue, purple, and green, respectively. On the bottom panel, showing the same but for the 5 conserved positions in the Tnp domain and the 3 calculated distances. Distances are with respect to the alpha carbon of each residue. (H) Distances between conserved residues in the RuvC and Tnp domains of IS110 AlphaFold structures. Distances were calculated as described in the previous paragraph. Showing here the distribution of distances in angstroms (Å) for each distance within each domain. See FIG. 14G as a reference for the distances.

[0052] FIG. 15 provides sequence listings for IS110 elements (SEQ ID NOs: 1-348). Elements are represented as 5′-3′ nucleotide sequences in typical FASTA format with additional formatting to indicate subsequences of interest. When available, the annotations include: Dark gray highlighting at the beginning of the sequence indicates the core. The core is only shown once and it is always on the 5′ end when annotated. Light gray highlighting indicates the LE and the RE, which always flank the CDS sequence. This is simply defined as the sequence that comes between the CDS and the core or the end of the element. The CDS sequence is shown as non-highlighted sequence with a single underline. The bridgeRNA boundary predictions are shown with lower-case nucleotides. When present, guide sequences are shown with bold typeface. When present, the 4 bold sub-sequences represent the LTG, the RTG, the LDG, and the RDG, in that order. Additional IS110 elements are provided as SEQ ID NOs: 349-10175 of the accompanying sequence listing, which is hereby incorporated by reference in its entirety. The sequence listing includes start and stop positions for Core, LE, RE, CDS, and bridgeRNA sequences as features of the sequence listing.

[0053] FIG. 16 provides sequence listings for transposase proteins described herein (SEQ ID NOs: 10176-10523). Proteins are also represented as amino acid sequences in typical FASTA format, with an extra line to represent the secondary structure predictions of each residue. Additional formatting is used to indicate subsequences of interest. When available, the annotations include: Dark gray highlighting to identify the boundaries of the RuvC-like domain as predicted using the DEDD_Tnp_IS110 Pfam domain. Light gray highlighting to identify the boundaries of the Tnp domain as predicted using the Transposase_20 Pfam domain. Bold typeface indicates amino acids that are highly conserved, with up to 5 such amino acids in each domain. The secondary structure prediction was generated using the standard mkdssp tool on all available IS110 transposase AlphaFold structures. These secondary structures were then projected onto sequences in our collection by primary sequence alignment. The different characters indicate: H, Alphahelix; B, Betabridge; E, Strand; G, Helix_3; I, Helix_5; P, Helix_PPII; T, Turn; S, Bend; “-”, Loop. These secondary structures can be used to orient a person of skill in the art, and be used to identify the coiled-coil linking domain. Additional transposase protein sequences are provided as SEQ ID NOs: 10524-20350 and 40357-516430 of the accompanying sequence listing, which is hereby incorporated by reference in its entirety. The sequence listing includes start and stop positions for RuvC-like domain and Tnp domain, as well as the P1-P5 positions for each domain used in the AlphaFold analysis, as features of the sequence listing.

[0054] FIG. 17 provides sequence listings for donors (SEQ ID NOs:30354-30529). Donors are represented as 50 nt 5′-3′ nucleotide sequences in typical FASTA format with additional formatting to indicate subsequences of interest. When available, the annotations include: Light gray highlighting indicates the right end (RE) and left end (LE), where the RE is 5′ to the core sequence, and the LE is 3′ to the core sequence. The core sequence is represented as non-highlighted text with a single underline. When present, the programmable portions of the donor that correspond with the bridgeRNA LDG and RDG are shown with bold typeface. The programmable portion of the donor RE that corresponds with the bridgeRNA LDG is referred to as the left donor (LD) and the programmable portion of the donor LE that corresponds with the bridgeRNA RDG is referred to as the right donor (RD). Additional donor sequences are provided as SEQ ID NOs: 30530-40356 of the accompanying sequence listing, which is hereby incorporated by reference in its entirety. The sequence listing includes start and stop positions for Core, LE, and RE sequences as features of the sequence listing.

[0055] FIG. 18 provides sequence listings for targets (SEQ ID NOs: 20351-20526). Targets are represented as 50 nt 5′-3′ nucleotide sequences in typical FASTA format with additional formatting to indicate subsequences of interest. When available, the annotations include: Light gray highlighting indicates the left flank (LF) and right flank (RF), where the LF is 5′ to the core sequence, and the RF is 3′ to the core sequence. The core sequence is represented as non-highlighted text with a single underline. The programmable portions of the target that correspond with the bridgeRNA LTG and RTG are shown with bold typeface. The programmable portion of the target LF that corresponds with the bridgeRNA LTG is referred to as the left target (LT) and the programmable portion of the donor RF that corresponds with the bridgeRNA RTG is referred to as the right target (RT). Additional target sequences are provided as SEQ ID NOs: 20527-30353 of the accompanying sequence listing, which is hereby incorporated by reference in its entirety. The sequence listing includes start and stop positions for Core, LF, and RF sequences as features of the sequence listing.

[0056] FIG. 19 provides consensus sequences and structures for bridgeRNA sequences (SEQ ID NOs: 795156, 795304, 795287, 795305-795328, 795297, 795329, 795330-795344, 795289, 795345-795351, 795294, 795352-795400, 795291, 795401-795412, 795300, 795288, 795302, 795413-795427, 795301, 795428-795440, 795296, 795441-795446, 795295, 795447, 795290, 795448-795454, 795298, 795455-795459, 795292, 795460-795468, 795293, 795469, 795470-795471, 795370, 795472-795508, 795299, 795509, 795510-795514, 795303, 795515-795542, 795536, and 795543-795564, respectively, in order of appearance). The name of each model is specified by lines that begin with “>”, just as in a typical FASTA file. The next line is a consensus sequence for the model, where “n” represents any nucleotide, “R” represents an A or G nucleotide, “Y” represents a C or U nucleotide, and then A, C, G, and T represent individual nucleotides. The next four lines indicate 4 possible RNA secondary structures using different confidence thresholds when running the ConsAliFold RNA structure prediction algorithm. These four lines correspond to the gamma parameters 4, 8, 16, and 32, respectively, with increasing gamma values representing more permissive models (allowing for more structure). The notation used for the secondary structure is referred to as “dot-bracket” notation, where matching parentheses “(“and”)” indicate base pairs, and unpaired bases are shown as dots (“.”).

[0057] FIG. 20 shows the IS621 transposase AlphaFold model used in the structural analysis. All available IS110 transposase AlphaFold structures were aligned back to this model using the TM-align algorithm to generate TM-scores. This analysis established that a TM-score cutoff of 0.5 is both sensitive and precise for identifying IS110 transposases.

[0058] FIG. 21 shows RuvC-like DEDD catalytic domain motifs for IS110 transposases belonging to the IS110 group.

[0059] FIG. 22 shows motifs for the “D” region of the canonical DEDD catalytic motif for IS110 transposases belonging to the IS110 group. SEQ ID NOs are shown in parentheses.

[0060] FIG. 23 shows motifs for the “E” region of the canonical DEDD catalytic motif for IS110 transposases belonging to the IS110 group. SEQ ID NOs are shown in parentheses.

[0061] FIG. 24 shows motifs for the “DD” region of the canonical DEDD catalytic motif for IS110 transposases belonging to the IS110 group. SEQ ID NOs are shown in parentheses.

[0062] FIG. 25 shows RuvC-like DEDD catalytic domain motifs for IS110 transposases belonging to the IS1111 group.

[0063] FIG. 26 shows motifs for the “D” region of the canonical DEDD catalytic motif for IS110 transposases belonging to the IS1111 group. SEQ ID NOs are shown in parentheses.

[0064] FIG. 27 shows motifs for the “E” region of the canonical DEDD catalytic motif for IS110 transposases belonging to the IS1111 group. SEQ ID NOs are shown in parentheses.

[0065] FIG. 28 shows motifs for the “DD” region of the canonical DEDD catalytic motif for IS110 transposases belonging to the IS1111 group. SEQ ID NOs are shown in parentheses.

[0066] FIG. 29 shows transposase domain motifs for IS110 transposases belonging to the IS110 group.

[0067] FIG. 30 shows motifs for the first conserved region of the transposase domain for IS110 transposases belonging to the IS110 group. SEQ ID NOs are shown in parentheses.

[0068] FIG. 31 shows motifs for the second conserved region of the transposase domain for IS110 transposases belonging to the IS110 group. SEQ ID NOs are shown in parentheses.

[0069] FIG. 32 shows transposase domain motifs for IS110 transposases belonging to the IS1111 group.

[0070] FIG. 33 shows motifs for the first conserved region of the transposase domain for IS110 transposases belonging to the IS1111 group. SEQ ID NOs are shown in parentheses.

[0071] FIG. 34 shows motifs for the second conserved region of the transposase domain for IS110 transposases belonging to the IS1111 group. SEQ ID NOs are shown in parentheses.

[0072] In FIGS. 21-34 the motifs are in common Prosite format, where x is any amino acid and x(n) represents n number of any amino acid and x(n,m) represents n to m number of any amino acids. The order is by prevalence of the domain in the transposase sequence database. In FIGS. 22-24, 26-28, 30-31, and 33-34, the motifs are shown as a list with each motif separated by a semi-colon.

[0073] FIGS. 35A-B show additional examples of predicted bridgeRNA secondary structures with predicted LTG, RTG, LDG, and RDG guide sequences. (A) Showing a schematics of 6 bridgeRNA consensus structures derived from 3 IS110 group elements and 3 IS1111 group elements. IS110 group elements typically encode their bridgeRNA in the 5′ non-coding end (LE) of the element, while IS1111 group elements typically encode their bridgeRNA in the 3′ non-coding end (RE). Guide sequences are colored according to the sequence they bind, whether it be the target (blue), the donor (orange), or the core (green). For some members of the IS1111 group, the donor-binding guide sequences are often found within a large multi-loop structure rather than an internal loop. (B) A more detailed representation of the same structures and sequences found in (A). Consensus secondary structures are shown with the IUPAC nucleotide codes circles, colored according to conservation. Highlighted guide sequences are displayed above their corresponding targets (SEQ ID NOs: 798527, 798529, 798531, 798533, 798535, 798537, respectively, in order of appearance) and donors (SEQ ID NOs: 798528, 798530, 798532, 798534, 798536, 798538 respectively, in order of appearance) for comparison. LTG, RTG, LDG, and RDG are directly labeled. The bridgeRNA structures are representations of SEQ ID NOs: 795344, 795370, 795303, 795295, 795293, 795287 with gap positions excluded and trimming of extra unstructured bases.

[0074] FIGS. 36A-E show the utility of extending the natural length of the right target guide (RTG) to increase efficiency and specificity of programmable recombination. (A) Schematic depicting how a longer RTG can be reprogrammed, in addition to how cores can be reprogrammed in conjunction with reprogramming a longer RTG. (B) Relative recombination rate between donors and targets with reprogrammed cores and 4 bp or 7 bp homology RTGs. The assay detailed in FIG. 5D was used. Results depict that having longer RTG homology enhances efficiency of recombination with the WT core sequences and reprogrammed core sequences. (C) Schematic depicting approach for genome integration, identical in approach to FIG. 9A. (D) On- and off-target integration frequency using 4 base or 7 base RTGs for targeting. The same bridgeRNAs as FIG. 9B were utilized to integrate a donor cargo into the E. coli genome with either a 4 base or 7 base RTG. Integration sites were binned by the number of differences from the 11 bp target site sequence intended by the programmed bridgeRNA with a 4 base RTG. (E) Rank order of integration sites averaged over two replicates. The same data as (D) are depicted by the relative number of integrations. High frequency integrations are highlighted by depicting their sequence and to show how the relative targeting specificity is modified when comparing a 4 base and 7 base RTG.

[0075] FIGS. 37A-E show assessment of donor boundaries of an IS110 bridge recombinase system. (A) Schematic for assaying sequence preference upstream of the donor sequence. The 6 nucleotides upstream of the LD are varied. Recombination is selected for using Kanamycin resistance and successful recombinants are measured via next-generation sequencing (NGS). Target is SEQ ID NO: 798549 and donor is SEQ ID NO:798547. (B) Schematic for assaying sequence preference downstream of the donor sequence. The 8 nucleotides downstream of the 4th position of the RD are varied, including part of the RD. Assay parameters are otherwise identical to those shown in A. Target is SEQ ID NO: 798549 and donor is SEQ ID NO:798548. (C) Nucleotide requirement upstream and downstream of the donor sequence. The 5′ and 3′ STIR sequences are highlighted in pink. Figures shows SEQ ID NO: 795196. (D-E) Sequence preference upstream (D) and downstream (E) of the donor sequence. The 5′ and 3′ STIR sequences are highlighted in pink.

[0076] FIGS. 38A-C show plasmid-plasmid recombination in human cells. (A) Schematic of plasmid-plasmid recombination assay in human cells. pEffector expressed the bridgeRNA and the recombinase from U6 and Ef1a promoters, respectively. pDonor and pTarget are recombined upon co-transfection with pEffector. PCR of the LT-RD junction with primers F and R detect recombination. (B) Verification of plasmid-plasmid recombination. PCR of the LT-RD junction is performed with only pDonor and pTarget, with pEffector lacking a bridgeRNA, and pDonor, pTarget, and pEffector. The recombinase on pEffector was evaluated with three different NLS formats. The recombinase shown is the IS621 recombinase with a bridgeRNA specific for its wild-type donor sequence and a reprogrammed target sequence Target 01. The target binding loop RTG encodes 7 bp of homology to the target. (C) Sanger sequencing confirmation of recombination. Sanger sequencing traces are aligned to the entire PCR of the LT-RD junction (top), with a zoomed-in version showing the nucleotides proximal to the LT-RD (bottom). Figure shows SEQ ID NOS: 798550, 798550, and 798551 in order of appearance.

[0077] FIGS. 39A-D shows plasmid inversion in human cells with diverse orthologs. (A) Schematic of plasmid inversion recombination assay in human cells. pEffector expresses the bridgeRNA and the recombinase from U6 and Ef1a promoters, respectively. The recombinase is fused to a P2A self cleaving peptide and EGFP to measure recombinase expression. PCR of the LT-RD junction with primers F and R detect recombination. (B) Verification of plasmid inversion recombination. PCR of the LT-RD junction is performed in the presence and absence of bridgeRNA for three different NLS configurations for IS621_23122 recombinase. (C) Percentage of cells expressing EGFP 72 hours post-transfection. Four IS110 orthologs are shown each with different NLS configurations. (D) Percentage of mCherry+ cells within the EGFP+ cell population. Four IS110 orthologs are shown each with different NLS configurations. The WT target and donor sequence are recombined for each ortholog. For IS621_127209 and IS621_23122, the sequence flanking the WT 4 nt RT was modified to allow 7 bp between the RT and the WT RTG.

[0078] FIGS. 40A-D shows bridgeRNA engineering for improved efficiency and specificity. (A) Schematic of the IS110 element IS621_23122 indicating approximate bridgeRNA boundary locations. A bridgeRNA of 179 nt (bRNA179) spans the start of the bridgeRNA to the end of the LE of the element. A bridgeRNA of 260 nt (bRNA260) starts at the same location and extends into the CDS of the recombinase. (B) Bridge editing efficiency of an inversion reporter using different length bridgeRNAs. Extending the bridgeRNA to 260 nt of natural sequence context increases efficiency relative to the 179 nt bridgeRNA. (C) Schematic comparing a WT target binding loop to an LTG-shifted target binding loop. LTG shifting allows targeting of a 16 nt target sequence by binding the 9 bp before the core rather than 9 bases including the core, increasing specificity. Target is SEQ ID NO: 798552 and donor is SEQ ID NO:798553. (D) Bridge editing efficiency of an inversion reporter with a WT bridgeRNA and an LTG-shifted bridgeRNA. Both bridgeRNAs utilize the additional 81 nt added to the 3′ end of the bridgeRNA in panel b.

[0079] FIGS. 41A-C show engineering of the human genome by delivery of a large DNA cargo and a bridge editor. (A) Schematic depicting bridge editing of the human genome via delivery of a donor plasmid. A recombinase and bridgeRNA specific for the plasmid donor (pDonor, 4.8 kb) and the target sequence in the genome results in integration of the donor into the genome. PCR of the LT-RD junction with primers F and R detect recombination. (B) PCR detection of LT-RD junction from genomic DNA. (C) Sanger sequencing confirmation of the integrated donor in the human genome. Sanger sequencing traces are aligned to the entire PCR of the LT-RD junction (top), with a zoomed-in version showing the nucleotides proximal to the LT-RD (bottom). Figure shows SEQ ID NOS: 798554, 798555, and 798556 in order of appearance.

[0080] FIGS. 42A-D shows engineering of the human genome by delivery of only a bridge editor. (A) Schematic depicting bridge editing of the human genome for inversions via delivery of only recombinase and bridgeRNA. A recombinase and bridgeRNA specific for a genomic donor and genomic target sequence results in inversion when the donor and target are on opposite strands. PCR of the RD-LT junction with primers L and L′ and the LD-RT junction with primers R and R′ detect recombination. Various orientations of target and donor result in inversion—one is shown here. (B-C) PCR detection of RD-LT and LD-RT for four different bridgeRNAs via agarose gel. The chromosomal locus targeted by the bridgeRNA is shown (above) as well as the relative orientation of the donor and target before and after recombination (bottom). (D) Example of Sanger sequencing confirmation of an inverted locus from panel b. Sanger sequencing traces are aligned to the entire PCR of the RD-LT junction (top left), with a zoomed in version showing the nucleotides proximal to the RD-LT (bottom left). Sanger sequencing traces are aligned to the entire PCR of the LD-RT junction (top right), with a zoomed in version showing the nucleotides proximal to the LD-RT (bottom right). Figure shows SEQ ID NOS: 798557, 798557, 798558, 798559, and 798558 in order of appearance. (E) Schematic depicting bridge editing of the human genome for excisions via delivery of only recombinase and bridgeRNA. A recombinase and bridgeRNA specific for a genomic donor and genomic target sequence results in excision when the donor and target are on the same strands. PCR of the LD-RT junction with primers G and G′ detect excision from the locus while PCR of the LT-RD junction with E and E′ detect the excised DNA. Various orientations of target and donor result in inversion—one is shown here.

[0081] FIGS. 43A-F show engineering of a split bridgeRNA system for recombination. (A) Schematic depicting recombination assay using an LE encoded bridgeRNA specific for a donor and target. Donor is SEQ ID NO: 795177. (B) Schematic depicting recombination assay using an LE encoded bridgeRNA and a separately expressed target binding loop (TBL). The target binding loop of the LE encoded bridgeRNA has been inactivated by reprogramming the LTG and RTG to have no complementarity to any sequence in the plasmids or organism, while the donor binding loop (DBL) is specific for the donor site sequence. (C) Comparison of recombination efficiency using the structure of the WT bridgeRNA (A) and the split bridgeRNA as depicted in (B). (D) Schematic depicting various split bridgeRNA systems. The bridgeRNA is depicted as a sequence where one or the other binding loop has been reprogrammed to have no specificity for a sequence found in the system. Some versions completely split the bridgeRNA into two, with a separate TBL and DBL. Some versions exclude additional accessory or unstructured nucleotides. The right hand panel indicates what the approximate specificity and structures may be for various iterations of a split bridgeRNA system. (E) Insertion of cargo into the lacZ gene of the E. coli genome. Insertion is performed using a bridgeRNA with the TBL targeted to the lacZ gene. Blue/white screening of lacZ activity using beta-galactosidase is used to pick colonies bearing the genomic insertion. PCR and agarose gel (right) confirms integration of the cargo into the genome. (F) Insertion of cargo into the lacZ gene of the E. coli genome. Insertion is performed using a bridgeRNA with the TBL reprogrammed to have no specificity for a sequence in the plasmid system or E. coli, while a separate TBL specific for the lacZ gene is expressed from a synthetic promoter such as the system depicted in (B). Blue/white screening of lacZ activity using beta-galactosidase is used to pick colonies bearing the genomic insertion. PCR and agarose gel (right) confirms integration of the cargo into the genome.

[0082] FIGS. 44A-B show a summary of mismatch tolerance between an IS110 bridgeRNA target binding loop and its target. (A) Schematic depicting antibiotic resistance reporter design. A minimal donor (22 bp) is encoded on a plasmid adjacent to a kanamycin resistance gene. A second plasmid encodes the target, bridgeRNA, and transposase. The target is linked to the bridgeRNA using a barcode. Recombination between the donor and target plasmid results in E. coli survival, and functional bridgeRNA target loop and target pairs are recorded using next generation sequencing (left). Schematic depicting target specificity screen design. The target and target loop are varied, except for the core of the target and the subsequences of the LTG and RTG that bind the core. The donor loop (and donor) are held constant. Target and target loop pairs are designed to assay single mismatches, double mismatches, and total mismatches. Targets in the screen are selected to reduce the number of off-targets in the E. coli genome. (B) Sequence Abundance of target and target loop pairs. Abundance is measured by barcode counts per million reads. Target/target loop pairs with zero mismatches are generally more abundant, while increasing the number of mismatches decreases abundance. (D) Sequence logo of top quintile of targets. The relative enrichment of nucleotides at each position of the target are shown for target/target loop pairs with zero mismatches in the top quintile of 6364 target/target loop pairs. (B) Mismatch tolerance at each position of the 11 bp target sequence. The x-axis shows the target position, with the CT core held constant. The top panel shows the target nucleotide recovery frequency when the target binding loop contains an A at each guide position as a percentage of recovered recombinants at each position. The second, third, and fourth panel shows the same but when the target-binding loop contains a C, G, or U at each position. Target positions are depicted as the top strand of the DNA.

### DETAILED DESCRIPTION

[0083] The present invention relates to the IS110 transposon family. The IS110 transposons encode both a “bridgeRNA” molecule and a transposase protein. The bridgeRNA molecule in concert with the transposase mediates site-specific recombination between one or more DNA molecules containing a target site sequence and a donor site sequence. The target site sequence and the donor site sequences can be on the same DNA molecule or different DNA molecules. Generally, as used herein, the target site and donor site sequences are simply nucleic acid sequences that associate with, or are recognized by, an IS110 bridgeRNA and transposase complex, and depending on the orientation of these sequences and whether these sequences are on the same or different molecules, a transposition reaction will occur resulting in recombination between the target site and donor site sequences such that the result is either an insertion (or translocation), excisive recombination, or inversion. Thus, for insertion or translocation reactions, the target sequence and the donor sequence are on different molecules. For excisive recombination and inversion, the target and donor site sequences are on the same molecule, and depending on the orientation of the target and donor site sequences, intervening sequences are excised or inverted. Such recombination reactions may be employed to recombine any DNA sequence with any other DNA sequence in a programmable manner, without any requirements to use DNA sequences originating from the IS110 element. More specifically, the present invention provides recombinant IS110 transposons where the encoded bridgeRNA molecule is programmable by modifying sequences in the target and/or donor binding loops of the bridgeRNA thereby engineering the bridgeRNA to specifically bind sequences of interest. In one category of programmable transposition, the bridgeRNA is designed such that a donor DNA molecule of interest can be recombined with a target DNA molecule of interest to effectuate insertion of a sequence located on a different DNA molecule or translocation of sequences on different DNA molecules. In another category of programmable transposition, the bridgeRNA is designed such that a donor DNA sequence of interest can be recombined with a target DNA of interest to effectuate excision or inversion of intervening sequences located on the same DNA molecule. Further, the invention also encompasses non-programmed uses of the IS110 family of transposons. For example, a non-programmed IS110 bridgeRNA (target and donor binding loops are not modified to change the binding specificity of the bridgeRNA) and transposase complex can be used to target naturally occurring target and donor site sequences in prokaryotic genomes, naturally occurring target and donor site sequences in eukaryotic genomes, introduced target and donor site sequences in prokaryotic genomes, and introduced target and donor site sequences in eukaryotic genomes.

### A. Definitions

[0084] The terms “polynucleotide”, “nucleotide sequence”, “nucleic acid”, “nucleic acid molecule”, “nucleic acid segment”, and “oligonucleotide” are used interchangeably. They refer to a polymeric form of nucleotides of any length, either deoxyribonucleotides or ribonucleotides, or analogs thereof. Polynucleotides may have any three-dimensional structure, and may perform any function, known or unknown. The following are non-limiting examples of polynucleotides: coding or non-coding regions of a gene or gene fragment, loci (locus) defined from linkage analysis, exons, introns, messenger RNA (mRNA), transfer RNA, ribosomal RNA, short interfering RNA (siRNA), short-hairpin RNA (shRNA), micro-RNA (miRNA), ribozymes, cDNA, recombinant polynucleotides, branched polynucleotides, plasmids, vectors, isolated DNA of any sequence, isolated RNA of any sequence, nucleic acid probes, and primers. A polynucleotide may comprise one or more modified nucleotides, such as methylated nucleotides and nucleotide analogs. If present, modifications to the nucleotide structure may be imparted before or after assembly of the polymer. The sequence of nucleotides may be interrupted by non-nucleotide components. A polynucleotide may be further modified after polymerization, such as by conjugation with a labeling component.

[0085] The term “DNA” refers to, without limitation, deoxyribonucleic acid, which includes, but is not limited to genomic or non-genomic DNA that exists within a cell or the isolated form of such DNA. Genomic or non-genomic DNA includes without limitation, chromosomal or non-chromosomal DNA such as episomal, viral, plasmid, mitochondrial, cellular, or chloroplast DNA.

[0086] The terms “polypeptide”, “peptide” and “protein” are used interchangeably herein to refer to polymers of amino acids of any length. The polymer may be linear or branched, it may comprise modified amino acids, and it may be interrupted by non-amino acids. The terms also encompass an amino acid polymer that has been modified; for example, disulfide bond formation, glycosylation, lipidation, acetylation, phosphorylation, or any other manipulation, such as conjugation with a labeling component. As used herein the term “amino acid” includes natural and/or unnatural or synthetic amino acids, including glycine and both the D or L optical isomers, and amino acid analogs and peptidomimetics.

[0087] As used herein, the term “nuclease” refers to an agent capable of breaking a phosphodiester bond linking a nucleotide residue in a nucleic acid molecule, such as a protein or small molecule. In some embodiments, the nuclease is an enzyme capable of binding a nucleic acid molecule, and breaking a phosphodiester bond that links a nucleotide residue within the nucleic acid molecule. The nuclease may be an endonuclease that cleaves the phosphodiester bond within the polynucleotide chain or an exonuclease that cleaves the phosphodiester bond at the end of the polynucleotide chain. In some embodiments, the nuclease is a site-specific nuclease that binds to and/or cleaves a particular phosphodiester bond within a particular nucleotide sequence. The term “nickase” refers to an endonuclease which cleaves only a single strand of a DNA duplex.

[0088] As used herein, the term “excisionase” refers to a host-derived, bacteriophage, or mobile genetic element sequence-specific DNA binding protein. It is involved in removing DNA from nucleotide sequences, repairing the DNA with or without a sequence scar. The removed DNA may be in the form of linear or circular ssDNA or dsDNA.

[0089] “Sequence-specific” refers to, but is not limited to, recombination or a recombination event which occurs at a predictable locus or identifiable nucleotide sequence or modification of a nucleotide at a predetermined sequence location.

[0090] The term “transposon”, as used herein, refers to a polynucleotide (or nucleic acid segment), which can be copied or moved to a new nucleic acid sequence context through the action of a transposase. An insertion sequence (IS) element refers to a transposon that encodes the minimal components necessary for recombination of a nucleotide sequence (e.g. a transposase and a bridgeRNA). An IS element may be referred to herein as an IS element, IS110 element, or transposon.

[0091] The term “transposase” as used herein refers to an enzyme, which is a component of a functional nucleic acid-protein complex (e.g., a transpososome) capable of transposition and which mediates transposition. The transposase may comprise a single protein or comprise multiple proteins. A transposase may be an enzyme capable of forming a functional complex with a transposon end, transposon end sequences, or transposon-derived sequences. The term “transposase” may also refer in certain embodiments to integrases, recombinases, invertases, or excisionases. Described herein are transposases derived from the IS110 family of transposons. The IS110 “transposases” described herein are also referred to as IS110 “recombinases.”

[0092] The expression “transposition reaction” used herein refers to a reaction wherein a transposase recombines a DNA polynucleotide comprising a donor site sequence with a DNA polynucleotide comprising a target site sequence, e.g., an integration reaction, a recombination reaction, an inversion reaction, or an excision reaction. A transposition reaction may occur when the donor site sequence and target site sequence are on one or more DNA molecules. Both the target and donor site sequences may contain a sequence or secondary structure. The target site and the donor site sequences may contain a sequence or secondary structure recognized by the transposase and/or an insertion motif sequence where the transposase cuts or creates staggered breaks in the target polynucleotide sequence.

[0093] The term “transposon end sequence” as used herein refers to the nucleotide sequences at the distal ends of a transposon. The transposon end sequences, or subsequences thereof, may be the DNA sequences recognized by the transposase to form a transpososome complex and to perform a transposition reaction. In certain embodiments described herein, the transposon end sequences are derived from the non-coding end sequences of the IS110 family of transposons.

[0094] The practice of aspects of the present invention can employ, unless otherwise indicated, conventional techniques of cell biology, cell culture, molecular biology, transgenic biology, microbiology, recombinant DNA, and biochemistry, which are within the skill of the art. Such techniques are explained fully in the literature. See, e.g., Molecular Cloning A Laboratory Manual, 3rd Ed., ed. by Sambrook (2001), Fritsch and Maniatis (Cold Spring Harbor Laboratory Press: 1989); DNA Cloning, Volumes I and II (D. N. Glover ed., 1985); Oligonucleotide Synthesis (M. J. Gait ed., 1984); Mullis et al. U.S. Pat. No. 4,683,195; Nucleic Acid Hybridization (B. D. Hames & S. J. Higgins eds. 1984); Transcription and Translation (B. D. Hames & S. J. Higgins eds. 1984); Culture Of Animal Cells (R. I. Freshney, Alan R. Liss, Inc., 1987); Immobilized Cells and Enzymes (TRL Press, 1986); B. Perbal, A Practical Guide To Molecular Cloning (1984); the series, Methods In Enzymology (Academic Press, Inc., N.Y.), specifically, Methods In Enzymology, Vols. 154 and 155 (Wu et al. eds.); Gene Transfer Vectors For Mammalian Cells (J. H. Miller and M. P. Calos eds., 1987, Cold Spring Harbor Laboratory); Immunochemical Methods In Cell And Molecular Biology (Caner and Walker, eds., Academic Press, London, 1987); Handbook Of Experimental Immunology, Volumes I-IV (D. M. Weir and C. C. Blackwell, eds., 1986); Manipulating the Mouse Embryo, (Cold Spring Harbor Laboratory Press, Cold Spring Harbor, N.Y., 1986) and subsequent versions thereof.

[0095] One skilled in the art can obtain a protein in several ways, which include, but are not limited to, isolating the protein via biochemical means or expressing a nucleotide sequence encoding the protein of interest by genetic engineering methods.

[0096] A protein is encoded by a nucleic acid (including, for example, genomic DNA, messenger RNA (mRNA), complementary DNA (cDNA), synthetic DNA, as well as any form of corresponding RNA). Nucleic acids encoding a protein can be produced via recombinant DNA technology and such recombinant nucleic acids can be prepared by conventional techniques, including chemical synthesis, genetic engineering, enzymatic techniques, or a combination thereof.

### B. IS110 Elements

[0097] The IS110 family of transposons refer to a family of transposons that are widespread in prokaryotic genomes. They are categorized into two groups, the IS110 group and the IS1111 group, and they encode transposases that cumulatively demonstrate a range of insertion site specificities. The IS110 transposases can exhibit invertase and excisionase activity, in addition to their transposase activity.

[0098] The life-cycle of an IS110 element is depicted in FIG. 1C. A linear IS110 element integrated into a target site comprises a left non-coding end (LE), a coding sequence for a transposase (Tpase) and a right non-coding end (RE), and, in some embodiments, the IS110 element is flanked by a repeated core sequence as shown in FIG. 1C. IS110 elements excise themselves, resulting in pre-insertion (“target”) site bearing LF-core (if present)-RF, and a circular element with RE-core (if present)-LE-Tpase. Concatenation of the RE-LE junction forms a “donor” site sequence as a subsequence of the RE-LE junction, which, if present, includes the other core sequence found on the integrated element. The donor site sequence may also include sub-terminal inverted repeats (STIR). Concatenation of the RE-LE may also form a promoter which, in the appropriate cellular context, may promote expression from the LE or RE of a RNA molecule referred to herein as bridgeRNA. The promoter may also promote expression of the transposase in the appropriate cellular context. The bridgeRNA encoded within the LE or RE forms an RNA-protein complex with the transposase and recognizes the donor site and/or the target site sequences to mediate transposition. The circular form of the element can reinsert into the target site or insert into any other target site sequence recognized by the bridgeRNA-transposase complex.

[0099] The left non-coding end (LE) of an IS110 element refers to the nucleotide sequence 5′ of the start codon of the IS110 element encoded IS110 transposase that extends (upstream) to the core or the 5′ terminal end of the element. Thus, LE is simply defined as the sequence that comes between the CDS and the core or the 5′ end of the element. The 5′ terminal end of the element may be defined using comparative (meta)genomics, or by analysis of bridgeRNA specificity for the donor sequences found at the terminus of the LE or by BLAST similarity searches to IS110s with terminal ends defined with the previous two methods. See Examples 1 and 2. In some embodiments, LE comprises an LE sequence provided in FIG. 15 (SEQ ID NOS: 1-348) or FIG. 17 (SEQ ID NOS: 30354-30529). In some embodiments, LE comprises an LE sequence provided in SEQ ID NOS: 349-10175 or 30530-40356.

[0100] The right non-coding end (RE) of an IS110 element refers to the nucleotide sequence 3′ of the stop codon of the IS110 element encoded IS110 transposase that extends (downstream) to the core or the 3′ terminal end of the element. Thus, RE is simply defined as the sequence that comes between the CDS and the core or the 3′ end of the element. The 3′ terminal end of the element may be defined using comparative (meta)genomics or by analysis of bridgeRNA specificity for the donor sequences found at the terminus of the RE or by BLAST similarity searches to IS110s with terminal ends defined with the previous two methods. See Examples 1 and 2. In some embodiments, RE comprises an RE sequence provided in FIG. 15 (SEQ ID NOS: 1-348) or FIG. 17 (SEQ ID NOS: 30354-30529). In some embodiments, RE comprises an RE sequence provided in SEQ ID NOS: 349-10175 or 30530-40356.

[0101] For IS110 transposons that comprise a core sequence, the core refers to an identical nucleotide sequence found immediately 5′ and 3′ of the left non-coding end (LE) and right non-coding end (RE), respectively. The core was previously referred to as “target intervening core” or “TIC” and any references to target intervening core or TIC refer to the core sequence. In some embodiments, the core sequence is 1-10 nucleotides long. In some embodiments, the core sequence is 1-5 nucleotides long. In some embodiments, the core sequence is 1 nucleotide long, 2 nucleotides long, 3 nucleotides long, 4 nucleotides long, 5 nucleotides long, 6 nucleotides long, 7 nucleotides long, 8 nucleotides long, 9 nucleotides long, or 10 nucleotides long. In certain embodiments, the core sequence is 2 nucleotides long. In some embodiments, a core comprises a core sequence provided in FIG. 15 (SEQ ID NOS: 1-348) or FIG. 17 (SEQ ID NOS: 30354-30529). In some embodiments, a core comprises a core sequence provided in SEQ ID NOS: 349-10175 or 30530-40356.

[0102] Exemplary IS110 family IS element sequences are provided in FIG. 15 (SEQ ID NOS: 1-348). The nucleotide sequences of LE, core (where present), the transposase, and RE are indicated as described above for FIG. 15. Additional exemplary IS110 family IS element sequences are provided in SEQ ID NOS: 349-10175. The nucleotide sequences of LE, core (where present), the transposase CDS, RE, and bridgeRNA are indicated as features of the sequence listing.

[0103] For IS110 elements that comprise a core sequence, RE-core-LE refers to a concatenation of the nucleotide sequences of the RE, core, and LE which a portion thereof (e.g., the donor site sequence comprised of LD-core-RD) may be bound by an IS110 family transposase described herein (e.g., see Section C). In some embodiments, RE-core-LE comprises an LE, core, and RE provided in FIG. 15 (SEQ ID NOS: 1-348) or FIG. 17 (SEQ ID NOS: 30354-30529). In some embodiments, RE-core-LE comprises an LE, core, and RE provided in SEQ ID NOS: 349-10175 or 30530-40356. The nucleotide sequences of LE, core (where present), and RE are indicated as features of the sequence listing. In some embodiments, LD-core-RD comprises an LD, core, and RD provided in FIG. 17 (SEQ ID NOS: 30354-30529). The nucleotide sequences of LD and RD are indicated in bold and the nucleotide sequence of core sequence is represented as non-highlighted text with a single underline. In some embodiments, LD-core-RD comprises an LD, core, and RD derived from the LDG and RDG provided in FIG. 15 (SEQ ID NOS: 1-348).

[0104] For IS110 elements that comprise a core sequence, LF-core-RF refers to a concatenation of the nucleotide sequences of the LF, core, and RF which a portion thereof (e.g., the target site sequence comprised of LT-core-RT) may be bound by an IS110 family transposase described herein (e.g., see Section C). In some embodiments, LF-core-RF comprises a LF, core, and RF provided in FIG. 18 (SEQ ID NOs: 20351-20526). In some embodiments, RF-core-LF comprises an LF, core, and RF provided in SEQ ID NOs: 20527-30353. The nucleotide sequences of LF, core (where present), and RF are indicated as features of the sequence listing. In some embodiments, LT-core-RT comprises an LT, core, and RT provided in FIG. 18 (SEQ ID NOS: 20351-20368). The nucleotide sequences of LT and RT are indicated in bold and the nucleotide sequence of core sequence is represented as non-highlighted text with a single underline. In some embodiments, LT-core-RT comprises an LT, core, and RT derived from the LTG and RTG provided in FIG. 15 (SEQ ID NOS: 1-348).

[0105] For IS110 elements that do not comprise a core sequence, RE-LE refers to a concatenation of the nucleotide sequences of the RE and LE which a portion thereof (e.g., the donor site sequence comprises of LD-RD) may be bound by an IS110 family transposase described herein (e.g., see Section C). In some embodiments, RE-LE comprises an LE and RE provided in FIG. 15 (SEQ ID NOS: 1-348) or FIG. 17 (SEQ ID NOS: 30354-30529). In some embodiments, RE-LE comprises an LE and RE provided in SEQ ID NOS: 349-10175 or 30530-40356. In some embodiments, LD-RD comprises an LD and RD derived from the LDG and RDG provided in FIG. 15 (SEQ ID NOS: 1-348).

[0106] For IS110 elements that do not comprise a core sequence, LF-RF refers to a concatenation of the nucleotide sequences of the LF and RF which a portion thereof (e.g., the target site sequence comprised of LT-RT) may be bound by an IS110 family transposase described herein (e.g., see Section C). In some embodiments, LF-RF comprises an LF and RF provided in FIG. 18 (SEQ ID NOs: 20351-20526). In some embodiments, LF-RF comprises a LF and RF provided in SEQ ID NOs: 20527-30353. In some embodiments, LT-RT comprises an LT and RT derived from the LTG and RTG provided in FIG. 15 (SEQ ID NOS: 1-348).

### C. IS110 Family Transposases

[0107] The IS110 family of transposases encoded within the IS110 transposons were identified by homology searching for a DEDD catalytic domain, which is a RuvC-like domain. See Example 1. IS110 family transposases described herein comprise an N-terminal RuvC-like DEDD catalytic domain and a C-terminal transposase domain with two canonical Pfam domains as depicted in FIG. 1B. In some embodiments, the polypeptide sequence between the N-terminal RuvC-like DEDD catalytic domain and the C-terminal transposase domain comprises a linker domain comprising a coiled-coil.

[0108] Within the IS110 family, transposons can be classed into the IS110 group which are any insertion sequence (IS) element encoding an IS110 transposase and comprising a longer 5′ non-coding end (LE) than 3′ non-coding end (RE). See FIGS. 1A, D, E.

[0109] Within the IS110 family, transposons can be classed into the IS1111 group which are any insertion sequence (IS) element encoding an IS110 transposase and typically comprising a longer 3′ non-coding end (RE) than 5′ non-coding end (LE). See FIGS. 1A, D, E.

[0110] Exemplary primary amino acid sequences and secondary structure prediction of IS110 family transposases are provided in FIG. 16 (SEQ ID NOS: 10176-10523). Additional exemplary primary amino acid sequences of IS110 family transposases are provided in SEQ ID NOS: 10524-20350 and 40357-516430. The RuvC-like DEDD catalytic domain and transposase domain with two canonical Pfam domains are indicated as features of the sequence listing. The polypeptide sequence between the N-terminal RuvC-like DEDD catalytic domain and the C-terminal transposase domain comprises a linker domain comprising a coiled-coil.

[0111] In some embodiments, the IS110 family transposase comprises an amino acid sequence that is 50% identical or more, 51% identical or more, 52% identical or more, 53% identical or more, 54% identical or more, 55% identical or more, 56% identical or more, 57% identical or more, 58% identical or more, 59% identical or more, 60% identical or more, 61% identical or more, 62% identical or more, 63% identical or more, 64% identical or more, 65% identical or more, 66% identical or more, 67% identical or more, 68% identical or more, 69% identical or more, 70% identical or more, 71% identical or more, 72% identical or more, 73% identical or more, 74% identical or more, 75% identical or more, 76% identical or more, 77% identical or more, 78% identical or more, 79% identical or more, 80% identical or more, 81% identical or more, 82% identical or more, 83% identical or more, 84% identical or more, 85% identical or more, 86% identical or more, 87% identical or more, 88% identical or more, 89% identical or more, 90% identical or more, 91% identical or more, 92% identical or more, 93% identical or more, 94% identical or more, 95% identical or more, 96% identical or more, 97% identical or more, 98% identical or more, 99% identical or more, or 100% identical to a sequence provided in FIG. 16 (SEQ ID NOS: 10176-10523) or SEQ ID NOS: 10524-20350 or 40357-516430. In some embodiments the sequence is “protein_IS621” of FIG. 16 (SEQ ID NO:10176).

[0112] Domain motifs and/or regions of the IS110 family transposase can be identified not necessarily by similarity of amino acid sequences but by structural similarity. In some embodiments, structural similarity is determined by the template modeling score (TM-score). See Example 15 and FIGS. 14A-H. In some embodiments, predicted secondary structure is used to identify domain motifs and/or regions of the IS110 family transposase. In some embodiments, secondary structure of a primary amino acid sequence is predicted using a standard mkdssp tool on tertiary structure files or equivalent protein structure prediction software. In some embodiments, the linker domain of the IS110 family transposase comprises a polypeptide sequence between the RuvC-like DEDD catalytic domain and transposase domain that comprises an amino acid sequence that is predicted to form a coiled-coil.

[0113] In some embodiments, the IS110 family transposase comprises a polypeptide that forms a similar tertiary structure to the tertiary structure of IS621 as shown in FIG. 14C. In some embodiments, the tertiary structure is determined using AlphaFold or similar protein structure prediction software. In some embodiments, a particular amino acid sequence is considered to form a similar tertiary structure to that of IS621 if the template modeling score (TM-score) is 0.5 or higher. In some embodiments, a particular amino acid sequence is considered to form a similar tertiary structure to that of IS621 if the template modeling score (TM-score) is 0.5 or higher, 0.6 or higher, 0.7 or higher, 0.8 or higher, or 0.9 or higher.

[0114] The TM-score is defined as provided in FIG. 14A, where L_{target} is the length of the amino acid sequence of the target protein, and L_{common} is the number of residues that appear in both the template and target structures. dᵢ is the distance between the ith pair of residues in the template and target structures, and dₒ(L_{target})=1.24−(L_target−15)−1.8 is a distance scale that normalizes distances (Zhang, Yang, and Jeffrey Skolnick. 2004. “Scoring Function for Automated Assessment of Protein Structure Template Quality.” Proteins 57 (4): 702-10). Alternatively, the score can be normalized according to the length of the query protein, or the score can be normalized by the averaged length of the two proteins. A TM-score has a value in (0,1], and a cutoff of >0.5 is commonly used for identifying proteins with homologous tertiary structures (Zhang, Yang, and Jeffrey Skolnick. 2005. “TM-Align: A Protein Structure Alignment Algorithm Based on the TM-Score.” Nucleic Acids Research 33 (7): 2302-9).

[0115] In some embodiments, the IS110 family transposase comprises an amino acid sequence that is 15% identical or more, 16% identical or more, 17% identical or more, 18% identical or more, 19% identical or more, 20% identical or more, 21% identical or more, 22% identical or more, 23% identical or more, 24% identical or more, 25% identical or more, 26% identical or more, 27% identical or more, 28% identical or more, 29% identical or more, 30% identical or more, 31% identical or more, 32% identical or more, 33% identical or more, 34% identical or more, 35% identical or more, 36% identical or more, 37% identical or more, 38% identical or more, 39% identical or more, 40% identical or more, 41% identical or more, 42% identical or more, 43% identical or more, 44% identical or more, 45% identical or more, 46% identical or more, 47% identical or more, 48% identical or more, 49% identical or more, 50% identical or more, 51% identical or more, 52% identical or more, 53% identical or more, 54% identical or more, 55% identical or more, 56% identical or more, 57% identical or more, 58% identical or more, 59% identical or more, 60% identical or more, 61% identical or more, 62% identical or more, 63% identical or more, 64% identical or more, 65% identical or more, 66% identical or more, 67% identical or more, 68% identical or more, 69% identical or more, 70% identical or more, 71% identical or more, 72% identical or more, 73% identical or more, 74% identical or more, 75% identical or more, 76% identical or more, 77% identical or more, 78% identical or more, 79% identical or more, 80% identical or more, 81% identical or more, 82% identical or more, 83% identical or more, 84% identical or more, 85% identical or more, 86% identical or more, 87% identical or more, 88% identical or more, 89% identical or more, 90% identical or more, 91% identical or more, 92% identical or more, 93% identical or more, 94% identical or more, 95% identical or more, 96% identical or more, 97% identical or more, 98% identical or more, 99% identical or more, or 100% identical to a sequence provided in FIG. 16 (SEQ ID NOS: 10176-10523) or SEQ ID NOS: 10524-20350 or 40357-516430 and forms a similar tertiary structure as shown in FIG. 14C. In some embodiments the sequence is “protein_IS621” of FIG. 16 (SEQ ID NO:10176). In some embodiments, the tertiary structure is determined using AlphaFold or similar protein structure prediction software. In some embodiments, a particular amino acid sequence is considered to form a similar tertiary structure to that of IS621 if the template modeling score (TM-score) is 0.5 or higher. In some embodiments, a particular amino acid sequence is considered to form a similar tertiary structure to that of IS621 if the template modeling score (TM-score) is 0.5 or higher, 0.6 or higher, 0.7 or higher, 0.8 or higher, or 0.9 or higher.

[0116] In certain aspects, described herein is an IS110 family transposase comprising means for performing a transposase reaction. In some embodiments, the means for performing a transposase reaction comprises a sequence provided in FIG. 16 (SEQ ID NOS: 10176-10523) or SEQ ID NOS: 10524-20350 or 40357-516430.

[0117] In certain aspects, described herein are nucleic acids encoding any of the IS110 family transposase amino acid sequences provided herein.

### C.1. RuvC-like DEDD Catalytic Domain

[0118] The RuvC-like DEDD catalytic domain refers to the domain of the IS110 transposase that resembles the RuvC Holliday junction resolvase, an abundant protein domain found within proteins of diverse function. The RuvC domain is often found within RNA-guided CRISPR nucleases. RNA-guided RuvC domain bearing CRISPR nucleases are sometimes associated with transposons, such as CRISPR associated transposons (CAST). CRISPR nucleases associated with transposons do not mediate transposition but impart target specificity for the transposome. The IS110 family transposases described herein comprise a RuvC-like DEDD catalytic domain.

[0119] In some embodiments, the IS110 family transposase comprises a RuvC-like DEDD catalytic domain comprising an amino acid sequence that is 50% identical or more, 51% identical or more, 52% identical or more, 53% identical or more, 54% identical or more, 55% identical or more, 56% identical or more, 57% identical or more, 58% identical or more, 59% identical or more, 60% identical or more, 61% identical or more, 62% identical or more, 63% identical or more, 64% identical or more, 65% identical or more, 66% identical or more, 67% identical or more, 68% identical or more, 69% identical or more, 70% identical or more, 71% identical or more, 72% identical or more, 73% identical or more, 74% identical or more, 75% identical or more, 76% identical or more, 77% identical or more, 78% identical or more, 79% identical or more, 80% identical or more, 81% identical or more, 82% identical or more, 83% identical or more, 84% identical or more, 85% identical or more, 86% identical or more, 87% identical or more, 88% identical or more, 89% identical or more, 90% identical or more, 91% identical or more, 92% identical or more, 93% identical or more, 94% identical or more, 95% identical or more, 96% identical or more, 97% identical or more, 98% identical or more, 99% identical or more, or 100% identical to the RuvC-like DEDD catalytic domain sequences provided in FIG. 16 (SEQ ID NOS: 10176-10523) or SEQ ID NOS: 10524-20350 or 40357-516430. In some embodiments, the RuvC-like DEDD catalytic domain sequence is the RuvC-like DEDD catalytic domain of “protein_IS621” of FIG. 16.

[0120] In some embodiments, the IS110 family transposase comprises a RuvC-like DEDD catalytic domain that forms a similar tertiary structure to the RuvC-like DEDD catalytic domain of IS621. In some embodiments, the tertiary structure is determined using AlphaFold or similar protein structure prediction software. In some embodiments, a particular amino acid sequence is considered to form a similar tertiary structure to the RuvC-like DEDD catalytic domain of IS621 if the template modeling score (TM-score) for the RuvC-like DEDD catalytic domain is 0.5 or higher. In some embodiments, a particular amino acid sequence is considered to form a similar tertiary structure to the RuvC-like DEDD catalytic domain of IS621 if the template modeling score (TM-score) is 0.5 or higher, 0.6 or higher, 0.7 or higher, 0.8 or higher, or 0.9 or higher.

[0121] In some embodiments, a particular amino acid sequence is considered to form a similar tertiary structure to the RuvC-like DEDD catalytic domain of IS621 based on distances between the alpha carbon of conserved residues in the RuvC-like DEDD catalytic domain. FIG. 16 (SEQ ID NOS: 10176-10523) provides in bold typeface up to 5 amino acids that are highly conserved in the RuvC-like DEDD catalytic domain. SEQ ID NOS: 10524-20350 or 40357-516430 provide as features P1-P5 of the sequence listing up to 5 amino acids that are highly conserved in the RuvC-like DEDD catalytic domain. Conserved amino acids in a particular amino acid sequence are identified by primary amino acid sequence alignment. In some embodiments, a particular amino acid sequence is considered to form a similar tertiary structure to the RuvC-like DEDD catalytic domain of IS621 if a distance (“D1”) between the alpha carbon of a first conserved residue and the alpha carbon of a second conserved residue of the amino acid sequence is less than 10 angstroms (Å), wherein the conserved residues of the amino acid sequence is per alignment of the primary amino acid sequence with one or more RuvC-like DEDD catalytic domains, such as IS621. In IS621 the first conserved residue is D11 and the second conserved residue is E60. In some embodiments, D1 is between 4 and 10 angstroms (Å). In some embodiments, D1 is between 5 and 7.5 angstroms (Å). In some embodiments, a particular amino acid sequence is considered to form a similar tertiary structure to the RuvC-like DEDD catalytic domain of IS621 if an average distance (“D2”) between the alpha carbon of a first conserved residue and the alpha carbon of a third conserved residue, between the alpha carbon of a first conserved residue and the alpha carbon of a fourth conserved residue, and between the alpha carbon of a first conserved residue and the alpha carbon of a fifth conserved residue, is less than 10 angstroms (Å), wherein the conserved residues of the amino acid sequence is per alignment of the primary amino acid sequence with one or more RuvC-like DEDD catalytic domains, such as IS621. In IS621 the first conserved residue is D11, the third conserved residue is K100, the fourth conserved residue is D102, and the fifth conserved residue is D105. In some embodiments, D2 is between 5 and 10 angstroms (Å). In some embodiments, D2 is between 7.5 and 10 angstroms (Å). In some embodiments, a particular amino acid sequence is considered to form a similar tertiary structure to the RuvC-like DEDD catalytic domain of IS621 if an average distance (“D3”) between the alpha carbon of a second conserved residue and the alpha carbon of a third conserved residue, between the alpha carbon of a second conserved residue and the alpha carbon of a fourth conserved residue, and between the alpha carbon of a second conserved residue and the alpha carbon of a fifth conserved residue, is less than 15 angstroms (Å), wherein the conserved residues of the amino acid sequence is per alignment of the primary amino acid sequence with one or more RuvC-like DEDD catalytic domains, such as IS621. In IS621 the second conserved residue is E60, the third conserved residue is K100, the fourth conserved residue is D102, and the fifth conserved residue is D105. In some embodiments, D3 is between 10 and 15 angstroms (Å). In some embodiments, D3 is between 13 and 15 angstroms (Å). In some embodiments, a particular amino acid sequence is considered to form a similar tertiary structure to the RuvC-like DEDD catalytic domain of IS621 if D1 is less than 10 angstroms (Å), D2 is less than 10 angstroms (Å), and D3 is less than 15 angstroms (Å). In some embodiments, a particular amino acid sequence is considered to form a similar tertiary structure to the RuvC-like DEDD catalytic domain of IS621 if D1 is between 4 and 10 angstroms (Å), D2 is between 5 and 10 angstroms (Å), and D3 is between 10 and 15 angstroms (Å). In some embodiments, a particular amino acid sequence is considered to form a similar tertiary structure to the RuvC-like DEDD catalytic domain of IS621 if D1 is between 5 and 7.5 angstroms (Å), D2 is between 7.5 and 10 angstroms (Å), and D3 is between 13 and 15 angstroms (Å).

[0122] In some embodiments, the IS110 family transposase comprises a RuvC-like DEDD catalytic domain comprising an amino acid sequence that is 15% identical or more, 16% identical or more, 17% identical or more, 18% identical or more, 19% identical or more, 20% identical or more, 21% identical or more, 22% identical or more, 23% identical or more, 24% identical or more, 25% identical or more, 26% identical or more, 27% identical or more, 28% identical or more, 29% identical or more, 30% identical or more, 31% identical or more, 32% identical or more, 33% identical or more, 34% identical or more, 35% identical or more, 36% identical or more, 37% identical or more, 38% identical or more, 39% identical or more, 40% identical or more, 41% identical or more, 42% identical or more, 43% identical or more, 44% identical or more, 45% identical or more, 46% identical or more, 47% identical or more, 48% identical or more, 49% identical or more, 50% identical or more, 51% identical or more, 52% identical or more, 53% identical or more, 54% identical or more, 55% identical or more, 56% identical or more, 57% identical or more, 58% identical or more, 59% identical or more, 60% identical or more, 61% identical or more, 62% identical or more, 63% identical or more, 64% identical or more, 65% identical or more, 66% identical or more, 67% identical or more, 68% identical or more, 69% identical or more, 70% identical or more, 71% identical or more, 72% identical or more, 73% identical or more, 74% identical or more, 75% identical or more, 76% identical or more, 77% identical or more, 78% identical or more, 79% identical or more, 80% identical or more, 81% identical or more, 82% identical or more, 83% identical or more, 84% identical or more, 85% identical or more, 86% identical or more, 87% identical or more, 88% identical or more, 89% identical or more, 90% identical or more, 91% identical or more, 92% identical or more, 93% identical or more, 94% identical or more, 95% identical or more, 96% identical or more, 97% identical or more, 98% identical or more, 99% identical or more, or 100% identical to the RuvC-like DEDD catalytic domain sequences provided in FIG. 16 (SEQ ID NOS: 10176-10523) or SEQ ID NOS: 10524-20350 or 40357-516430 and forms a similar tertiary structure to the RuvC-like DEDD catalytic domain of IS621. In some embodiments, the tertiary structure is determined using AlphaFold or similar protein structure prediction software. In some embodiments, a particular amino acid sequence is considered to form a similar tertiary structure to the RuvC-like DEDD catalytic domain of IS621 if the template modeling score (TM-score) for the RuvC-like DEDD catalytic domain is 0.5 or higher. In some embodiments, a particular amino acid sequence is considered to form a similar tertiary structure to the RuvC-like DEDD catalytic domain of IS621 if the template modeling score (TM-score) is 0.5 or higher, 0.6 or higher, 0.7 or higher, 0.8 or higher, or 0.9 or higher. In some embodiments the RuvC-like DEDD catalytic domain sequence provided is the RuvC-like DEDD catalytic domain of “protein_IS621” of FIG. 16 (SEQ ID NO:10176).

[0123] In some embodiments, the RuvC-like DEDD catalytic domain can be identified using statistical models that annotate protein domains, such as Pfam profile hidden markov models (pHMMs). In IS110 family transposases, the RuvC-like DEDD catalytic domain is often recognized by the Pfam profile hidden markov model (pHMM) PF01548, short name DEDD_Tnp_IS110.

[0124] In some embodiments, the IS110 family transposase comprises a RuvC-like DEDD catalytic domain comprising a motif D-x(43)-E-x(39)-K-x(1)-D-x(2)-D (SEQ ID NO: 795142), D-x(42)-E-x(34)-K-x(1)-D-x(2)-D (SEQ ID NO: 795143), [DE]-x(38,63)-[EACDGQVIPS]-x(30,53)-[KSQIVRHLTMA]-x(1)-[DNE]-x(2)-[DEASCM], [DE]-x(41,59)-[EYALGHCVFITMS]-x(30,45)-[KRMQNH]-x(1)-[DN]-x(2)-[DAS], GIDVS (SEQ ID NO: 795144), GLDVH (SEQ ID NO: 795145), [GAS][ILVDFMACWTHGN][DE][VTIWPLAFCSMR][SAHGCD], [GAS][LIMVCFA]D[VLIFAYQTHMDCWRGS][HASGD], MEATG (SEQ ID NO: 795146), MEACG (SEQ ID NO: 795147), [MLVIFCYAGTWSHPR]-x(0,2)-[EGACQDVIMP][ASGPHIDRYLNQCTVFMEK][TSECPAYGIVDNFKLMHR]-x(0,1)-[GASTRDQVNLWEKYHICMP], [MYVCLIASFTGQEHW]-x(0,2)-[EYQGVACFLHITMSDKW]-x(0,2)-[AEVYSFMGTICNPLDQ]-x(0,2)-[CGATESMVLINPFDQW]-x(0,2)-[GPASTLCYINRMVFEWHQDK], DRIDA (SEQ ID NO: 795148), DRRDA (SEQ ID NO: 795149), [DNE][RPAKVTSQEFGIDLHMNYWC][ILKVAGTNRSFQPHDEMCWY][DAESCM][A CSPLTGV], or [DN][RAKEYDQGFVPTMSLHWNIC][RALNIVKHTQDSEMGWFYCP][DSA][ASTGCV LI],with motifs in common Prosite format, where x is any amino acid and x(n) represents n number of any amino acid and x(n,m) represents n to m number of any amino acids. In some embodiments, the RuvC-like DEDD catalytic domain comprises a motif D-x(43)-E-x(39)-K-x(1)-D-x(2)-D (SEQ ID NO: 795142), D-x(42)-E-x(34)-K-x(1)-D-x(2)-D (SEQ ID NO: 795143), GIDVS (SEQ ID NO: 795144), GLDVH (SEQ ID NO: 795145), MEATG (SEQ ID NO: 795146), MEACG (SEQ ID NO: 795147), DRIDA (SEQ ID NO: 795148), or DRRDA (SEQ ID NO: 795149). In some embodiments, the RuvC-like DEDD catalytic domain comprising a motif above forms a similar tertiary structure to the RuvC-like DEDD catalytic domain of IS621. In some embodiments, the tertiary structure is determined using AlphaFold or similar protein structure prediction software. In some embodiments, a particular amino acid sequence is considered to form a similar tertiary structure to the RuvC-like DEDD catalytic domain of IS621 if the template modeling score (TM-score) for the RuvC-like DEDD catalytic domain is 0.5 or higher. In some embodiments, a particular amino acid sequence is considered to form a similar tertiary structure to the RuvC-like DEDD catalytic domain of IS621 if the template modeling score (TM-score) is 0.5 or higher, 0.6 or higher, 0.7 or higher, 0.8 or higher, or 0.9 or higher.

[0125] In some embodiments, the IS110 family transposase comprises a RuvC-like DEDD catalytic domain comprising an amino acid sequence that is 50% identical or more, 51% identical or more, 52% identical or more, 53% identical or more, 54% identical or more, 55% identical or more, 56% identical or more, 57% identical or more, 58% identical or more, 59% identical or more, 60% identical or more, 61% identical or more, 62% identical or more, 63% identical or more, 64% identical or more, 65% identical or more, 66% identical or more, 67% identical or more, 68% identical or more, 69% identical or more, 70% identical or more, 71% identical or more, 72% identical or more, 73% identical or more, 74% identical or more, 75% identical or more, 76% identical or more, 77% identical or more, 78% identical or more, 79% identical or more, 80% identical or more, 81% identical or more, 82% identical or more, 83% identical or more, 84% identical or more, 85% identical or more, 86% identical or more, 87% identical or more, 88% identical or more, 89% identical or more, 90% identical or more, 91% identical or more, 92% identical or more, 93% identical or more, 94% identical or more, 95% identical or more, 96% identical or more, 97% identical or more, 98% identical or more, 99% identical or more, or 100% identical to a RuvC-like DEDD catalytic domain sequence of FIG. 16 (SEQ ID NOS: 10176-10523) or SEQ ID NOS: 10524-20350 or 40357-516430 and comprising any of the motifs in the preceding paragraph or in FIGS. 21-28. In some embodiments, the amino acid sequence forms a similar tertiary structure to the RuvC-like DEDD catalytic domain of IS621. In some embodiments, the tertiary structure is determined using AlphaFold or similar protein structure prediction software. In some embodiments, a particular amino acid sequence is considered to form a similar tertiary structure to the RuvC-like DEDD catalytic domain of IS621 if the template modeling score (TM-score) for the RuvC-like DEDD catalytic domain is 0.5 or higher. In some embodiments, a particular amino acid sequence is considered to form a similar tertiary structure to the RuvC-like DEDD catalytic domain of IS621 if the template modeling score (TM-score) is 0.5 or higher, 0.6 or higher, 0.7 or higher, 0.8 or higher, or 0.9 or higher.

[0126] In some embodiments, the IS110 transposases belonging to the IS110 group comprise a RuvC-like DEDD catalytic domain comprising a domain motif provided in FIG. 21 with motifs in common Prosite format, where x is any amino acid and x(n) represents n number of any amino acid and x(n,m) represents n to m number of any amino acids. In some embodiments, the IS110 transposases belonging to the IS110 group comprise a RuvC-like DEDD catalytic domain comprising one or more of the RuvC-like DEDD catalytic domain motifs provided in FIGS. 22-24 with motifs in common Prosite format, where x is any amino acid and x(n) represents n number of any amino acid and x(n,m) represents n to m number of any amino acids. In some embodiments, the IS110 transposases belonging to the IS110 group comprises a RuvC-like DEDD catalytic domain wherein the “D” region of the canonical DEDD catalytic motif comprises a domain motif provided in FIG. 22 with motifs in common Prosite format, where x is any amino acid and x(n) represents n number of any amino acid and x(n,m) represents n to m number of any amino acids. In some embodiments, the IS110 transposases belonging to the IS110 group comprises a RuvC-like DEDD catalytic domain wherein the “E” region of the canonical DEDD catalytic motif comprises a domain motif provided in FIG. 23 with motifs in common Prosite format, where x is any amino acid and x(n) represents n number of any amino acid and x(n,m) represents n to m number of any amino acids. In some embodiments, the IS110 transposases belonging to the IS110 group comprises a RuvC-like DEDD catalytic domain wherein the “DD” region of the canonical DEDD catalytic motif comprises a domain motif provided in FIG. 24 with motifs in common Prosite format, where x is any amino acid and x(n) represents n number of any amino acid and x(n,m) represents n to m number of any amino acids. In some embodiments, the I110 transposases belonging to the I110 group comprises a RuvC-like DEDD catalytic domain wherein the “D” region of the canonical DEDD catalytic motif comprises a domain motif provided in FIG. 22, the “E” region of the canonical DEDD catalytic motif comprises a domain motif provided in FIG. 23, and the “DD” region of the canonical DEDD catalytic motif comprises a domain motif provided in FIG. 24 with motifs in common Prosite format, where x is any amino acid and x(n) represents n number of any amino acid and x(n,m) represents n to m number of any amino acids.

[0127] In some embodiments, the IS110 transposases belonging to the IS1111 group comprise a RuvC-like DEDD catalytic domain comprising a domain motif provided in FIG. 25 with motifs in common Prosite format, where x is any amino acid and x(n) represents n number of any amino acid and x(n,m) represents n to m number of any amino acids. In some embodiments, the IS110 transposases belonging to the IS1111 group comprise a RuvC-like DEDD catalytic domain comprising one or more of the RuvC-like DEDD catalytic domain motifs provided in FIGS. 26-28 with motifs in common Prosite format, where x is any amino acid and x(n) represents n number of any amino acid and x(n,m) represents n to m number of any amino acids. In some embodiments, the IS110 transposases belonging to the IS1111 group comprises a RuvC-like DEDD catalytic domain wherein the “D” region of the canonical DEDD catalytic motif comprises a domain motif provided in FIG. 26 with motifs in common Prosite format, where x is any amino acid and x(n) represents n number of any amino acid and x(n,m) represents n to m number of any amino acids. In some embodiments, the IS110 transposases belonging to the IS1111 group comprises a RuvC-like DEDD catalytic domain wherein the “E” region of the canonical DEDD catalytic motif comprises a domain motif provided in FIG. 27 with motifs in common Prosite format, where x is any amino acid and x(n) represents n number of any amino acid and x(n,m) represents n to m number of any amino acids. In some embodiments, the IS110 transposases belonging to the IS1111 group comprises a RuvC-like DEDD catalytic domain wherein the “DD” region of the canonical DEDD catalytic motif comprises a domain motif provided in FIG. 28 with motifs in common Prosite format, where x is any amino acid and x(n) represents n number of any amino acid and x(n,m) represents n to m number of any amino acids. In some embodiments, the IS110 transposases belonging to the IS1111 group comprises a RuvC-like DEDD catalytic domain wherein the “D” region of the canonical DEDD catalytic motif comprises a domain motif provided in FIG. 26, the “E” region of the canonical DEDD catalytic motif comprises a domain motif provided in FIG. 27, and the “DD” region of the canonical DEDD catalytic motif comprises a domain motif provided in FIG. 28 with motifs in common Prosite format, where x is any amino acid and x(n) represents n number of any amino acid and x(n,m) represents n to m number of any amino acids.

[0128] The present invention contemplates domain swapping in order to generate IS110 transposase chimeras that have advantageous functions. In some embodiments, exchanging of a RuvC-like DEDD catalytic domain (e.g., any RuvC-like DEDD catalytic domain provided in FIG. 16 (SEQ ID NOS: 10176-10523) or SEQ ID NOS: 10524-20350 or 40357-516430) with a different RuvC-like DEDD catalytic domain (e.g., any other RuvC-like DEDD catalytic domain provided in FIG. 16 (SEQ ID NOS: 10176-10523) or SEQ ID NOS: 10524-20350 or 40357-516430) resulting in advantageous properties is also envisioned as described in Farruggio et al., 2014. For example, exchanging one RuvC-like DEDD catalytic domain with another RuvC-like DEDD catalytic domain may allow for higher affinity for a bridgeRNA or increased transposition efficiency.

### C.2. Transposase Domain

[0129] The IS110 family transposases described herein comprise a transposase domain.

[0130] In some embodiments, the transposase domain can be identified using statistical models that annotate protein domains, such as Pfam profile hidden markov models (pHMMs). In IS110 family transposases, the transposase domain is often recognized by the Pfam profile hidden markov model (pHEMM) PF02371, short name Transposase_20.

[0131] In some embodiments, the IS110 family transposase comprises a transposase domain comprising an amino acid sequence that is 50% identical or more, 51% identical or more, 52% identical or more, 53% identical or more, 54% identical or more, 55% identical or more, 56% identical or more, 57% identical or more, 58% identical or more, 59% identical or more, 60% identical or more, 61% identical or more, 62% identical or more, 63% identical or more, 64% identical or more, 65% identical or more, 66% identical or more, 67% identical or more, 68% identical or more, 69% identical or more, 70% identical or more, 71% identical or more, 72% identical or more, 73% identical or more, 74% identical or more, 75% identical or more, 76% identical or more, 77% identical or more, 78% identical or more, 79% identical or more, 80% identical or more, 81% identical or more, 82% identical or more, 83% identical or more, 84% identical or more, 85% identical or more, 86% identical or more, 87% identical or more, 88% identical or more, 89% identical or more, 90% identical or more, 91% identical or more, 92% identical or more, 93% identical or more, 94% identical or more, 95% identical or more, 96% identical or more, 97% identical or more, 98% identical or more, 99% identical or more, or 100% identical to the transposase domain sequences provided in FIG. 16 (SEQ ID NOS: 10176-10523) or SEQ ID NOS: 10524-20350 or 40357-516430. In some embodiments the transposase domain sequence provided is the transposase domain of “protein_IS621” of FIG. 16 (SEQ ID NO:10176).

[0132] In some embodiments, the IS110 family transposase comprises a transposase domain that forms a similar tertiary structure to the transposase domain of IS621. In some embodiments, the tertiary structure is determined using AlphaFold or similar protein structure prediction software. In some embodiments, a particular amino acid sequence is considered to form a similar tertiary structure to the transposase domain of IS621 if the template modeling score (TM-score) for the transposase domain is 0.5 or higher. In some embodiments, a particular amino acid sequence is considered to form a similar tertiary structure to the transposase domain of IS621 if the template modeling score (TM-score) is 0.5 or higher, 0.6 or higher, 0.7 or higher, 0.8 or higher, or 0.9 or higher.

[0133] In some embodiments, a particular amino acid sequence is considered to form a similar tertiary structure to the transposase domain of IS621 based on distances between the alpha carbon of conserved residues in the transposase domain. FIG. 16 (SEQ ID NOS: 10176-10523) provides in bold typeface amino acids up to 5 amino acids that are highly conserved in the transposase domain. SEQ ID NOS: 10524-20350 or 40357-516430 provide as features P1-P5 of the sequence listing up to 5 amino acids that are highly conserved in the transposase domain. Conserved amino acids in a particular amino acid sequence are identified by primary amino acid sequence alignment. In some embodiments, a particular amino acid sequence is considered to form a similar tertiary structure to the transposase domain of IS621 if an average distance (“D1”) between the alpha carbon of a first conserved residues and the alpha carbon of a second conserved residue and between the alpha carbon of a first conserved residue and the alpha carbon of a fifth conserved residue of the amino acid sequence is less than 25 angstroms (Å), wherein the conserved residues of the amino acid sequence is per alignment of the primary amino acid sequence with one or more transposase domains, such as IS621. In IS621 the first conserved residue is G203, the second conserved residue is G233, and the fifth conserved residue is G255. In some embodiments, D1 is between 15 and 25 angstroms (Å). In some embodiments, D1 is between 17 and 23 angstroms (Å). In some embodiments, a particular amino acid sequence is considered to form a similar tertiary structure to the transposase domain of IS621 if an average distance (“D2”) between the alpha carbon of a second conserved residue and the alpha carbon of a third conserved residue, between the alpha carbon of a second conserved residue and the alpha carbon of a fourth conserved residue, between the alpha carbon of a fifth conserved residue and the alpha carbon of a third conserved residue, and between the alpha carbon of a fifth conserved residue and the alpha carbon of a fourth conserved residue, is less than 25 angstroms (Å), wherein the conserved residues of the amino acid sequence is per alignment of the primary amino acid sequence with one or more transposase domains, such as IS621. In IS621 the second conserved residue is G233, the third conserved residue is S241, the fourth conserved residue is G242, and the fifth conserved residue is G255. In some embodiments, D2 is between 20 and 25 angstroms (Å). In some embodiments, D2 is between 22 and 24 angstroms (Å). In some embodiments, a particular amino acid sequence is considered to form a similar tertiary structure to the transposase of IS621 if a distance (“D3”) between the alpha carbon of a second conserved residue and the alpha carbon of a fifth conserved residue is less than 15 angstroms (Å), wherein the conserved residues of the amino acid sequence is per alignment of the primary amino acid sequence with one or more transposase domains, such as IS621. In IS621 the second conserved residue is G233 and the fifth conserved residue is G255. In some embodiments, D3 is between 5 and 15 angstroms (Å). In some embodiments, D3 is between 7 and 12 angstroms (Å). In some embodiments, a particular amino acid sequence is considered to form a similar tertiary structure to the transposase domain of IS621 if D1 is less than 25 angstroms (Å), D2 is less than 25 angstroms (Å), and D3 is less than 15 angstroms (Å). In some embodiments, a particular amino acid sequence is considered to form a similar tertiary structure to the transposase domain of IS621 if D1 is between 15 and 25 angstroms (Å), D2 is between 20 and 25 angstroms (Å), and D3 is between 5 and 15 angstroms (Å). In some embodiments, a particular amino acid sequence is considered to form a similar tertiary structure to the transposase domain of IS621 if D1 is between 17 and 23 angstroms (Å), D2 is between 22 and 24 angstroms (Å), and D3 is between 7 and 12 angstroms (Å).

[0134] In some embodiments, the IS110 family transposase comprises a transposase domain comprising an amino acid sequence that is 15% identical or more, 16% identical or more, 17% identical or more, 18% identical or more, 19% identical or more, 20% identical or more, 21% identical or more, 22% identical or more, 23% identical or more, 24% identical or more, 25% identical or more, 26% identical or more, 27% identical or more, 28% identical or more, 29% identical or more, 30% identical or more, 31% identical or more, 32% identical or more, 33% identical or more, 34% identical or more, 35% identical or more, 36% identical or more, 37% identical or more, 38% identical or more, 39% identical or more, 40% identical or more, 41% identical or more, 42% identical or more, 43% identical or more, 44% identical or more, 45% identical or more, 46% identical or more, 47% identical or more, 48% identical or more, 49% identical or more, 50% identical or more, 51% identical or more, 52% identical or more, 53% identical or more, 54% identical or more, 55% identical or more, 56% identical or more, 57% identical or more, 58% identical or more, 59% identical or more, 60% identical or more, 61% identical or more, 62% identical or more, 63% identical or more, 64% identical or more, 65% identical or more, 66% identical or more, 67% identical or more, 68% identical or more, 69% identical or more, 70% identical or more, 71% identical or more, 72% identical or more, 73% identical or more, 74% identical or more, 75% identical or more, 76% identical or more, 77% identical or more, 78% identical or more, 79% identical or more, 80% identical or more, 81% identical or more, 82% identical or more, 83% identical or more, 84% identical or more, 85% identical or more, 86% identical or more, 87% identical or more, 88% identical or more, 89% identical or more, 90% identical or more, 91% identical or more, 92% identical or more, 93% identical or more, 94% identical or more, 95% identical or more, 96% identical or more, 97% identical or more, 98% identical or more, 99% identical or more, or 100% identical to the transposase domain sequences provided in FIG. 16 (SEQ ID NOS: 10176-10523) or SEQ ID NOS: 10524-20350 or 40357-516430 and the amino acid sequence forms a similar tertiary structure to the transposase domain of IS621. In some embodiments, the tertiary structure is determined using AlphaFold or similar protein structure prediction software. In some embodiments, a particular amino acid sequence is considered to form a similar tertiary structure to the transposase domain of IS621 if the template modeling score (TM-score) for the transposase domain is 0.5 or higher. In some embodiments, a particular amino acid sequence is considered to form a similar tertiary structure to the transposase domain of IS621 if the template modeling score (TM-score) is 0.5 or higher, 0.6 or higher, 0.7 or higher, 0.8 or higher, or 0.9 or higher. In some embodiments the transposase domain sequence provided is the transposase domain of “protein_IS621” of FIG. 16 (SEQ ID NO:10176).

[0135] In some embodiments, the IS110 family transposase comprises a RuvC-like DEDD catalytic domain described in the preceding paragraphs (see Section C.1.) and further comprises a transposase domain comprising an amino acid sequence that is 50% identical or more, 51% identical or more, 52% identical or more, 53% identical or more, 54% identical or more, 55% identical or more, 56% identical or more, 57% identical or more, 58% identical or more, 59% identical or more, 60% identical or more, 61% identical or more, 62% identical or more, 63% identical or more, 64% identical or more, 65% identical or more, 66% identical or more, 67% identical or more, 68% identical or more, 69% identical or more, 70% identical or more, 71% identical or more, 72% identical or more, 73% identical or more, 74% identical or more, 75% identical or more, 76% identical or more, 77% identical or more, 78% identical or more, 79% identical or more, 80% identical or more, 81% identical or more, 82% identical or more, 83% identical or more, 84% identical or more, 85% identical or more, 86% identical or more, 87% identical or more, 88% identical or more, 89% identical or more, 90% identical or more, 91% identical or more, 92% identical or more, 93% identical or more, 94% identical or more, 95% identical or more, 96% identical or more, 97% identical or more, 98% identical or more, 99% identical or more, or 100% identical to the transposase domain sequences provided in FIG. 16 (SEQ ID NOS: 10176-10523) or SEQ ID NOS: 10524-20350 or 40357-516430. In some embodiments, the amino acid sequence forms a similar tertiary structure to the transposase domain of IS621. In some embodiments, the tertiary structure is determined using AlphaFold or similar protein structure prediction software. In some embodiments, a particular amino acid sequence is considered to form a similar tertiary structure to the transposase domain of IS621 if the template modeling score (TM-score) for the transposase domain is 0.5 or higher. In some embodiments, a particular amino acid sequence is considered to form a similar tertiary structure to the transposase domain of IS621 if the template modeling score (TM-score) is 0.5 or higher, 0.6 or higher, 0.7 or higher, 0.8 or higher, or 0.9 or higher. In some embodiments the transposase domain sequence provided is the transposase domain of “protein_IS621” of FIG. 16 (SEQ ID NO:10176).

[0136] In some embodiments, the IS110 family transposase comprises a RuvC-like DEDD catalytic domain described in the preceding paragraphs (see Section C.1.) and further comprises a transposase domain that the amino acid sequence forms a similar tertiary structure to the transposase domain of IS621. In some embodiments, the tertiary structure is determined using AlphaFold or similar protein structure prediction software. In some embodiments, a particular amino acid sequence is considered to form a similar tertiary structure to the transposase domain of IS621 if the template modeling score (TM-score) for the transposase domain is 0.5 or higher. In some embodiments, a particular amino acid sequence is considered to form a similar tertiary structure to the transposase domain of IS621 if the template modeling score (TM-score) is 0.5 or higher, 0.6 or higher, 0.7 or higher, 0.8 or higher, or 0.9 or higher. In some embodiments the transposase domain sequence provided is the transposase domain of “protein_IS621” of FIG. 16 (SEQ ID NO:10176). In some embodiments, the amino acid sequence forms a similar tertiary structure to the RuvC-like DEDD catalytic domain of IS621. In some embodiments, the tertiary structure is determined using AlphaFold or similar protein structure prediction software. In some embodiments, a particular amino acid sequence is considered to form a similar tertiary structure to the RuvC-like DEDD catalytic domain of IS621 if the template modeling score (TM-score) for the RuvC-like DEDD catalytic domain is 0.5 or higher. In some embodiments, a particular amino acid sequence is considered to form a similar tertiary structure to the RuvC-like DEDD catalytic domain of IS621 if the template modeling score (TM-score) is 0.5 or higher, 0.6 or higher, 0.7 or higher, 0.8 or higher, or 0.9 or higher. In some embodiments the RuvC-like DEDD catalytic domain sequence provided is the RuvC-like DEDD catalytic domain of “protein_IS621” of FIG. 16 (SEQ ID NO:10176). In some embodiments, the transposase domain comprises an amino acid sequence that is 15% identical or more, 16% identical or more, 17% identical or more, 18% identical or more, 19% identical or more, 20% identical or more, 21% identical or more, 22% identical or more, 23% identical or more, 24% identical or more, 25% identical or more, 26% identical or more, 27% identical or more, 28% identical or more, 29% identical or more, 30% identical or more, 31% identical or more, 32% identical or more, 33% identical or more, 34% identical or more, 35% identical or more, 36% identical or more, 37% identical or more, 38% identical or more, 39% identical or more, 40% identical or more, 41% identical or more, 42% identical or more, 43% identical or more, 44% identical or more, 45% identical or more, 46% identical or more, 47% identical or more, 48% identical or more, 49% identical or more, 50% identical or more, 51% identical or more, 52% identical or more, 53% identical or more, 54% identical or more, 55% identical or more, 56% identical or more, 57% identical or more, 58% identical or more, 59% identical or more, 60% identical or more, 61% identical or more, 62% identical or more, 63% identical or more, 64% identical or more, 65% identical or more, 66% identical or more, 67% identical or more, 68% identical or more, 69% identical or more, 70% identical or more, 71% identical or more, 72% identical or more, 73% identical or more, 74% identical or more, 75% identical or more, 76% identical or more, 77% identical or more, 78% identical or more, 79% identical or more, 80% identical or more, 81% identical or more, 82% identical or more, 83% identical or more, 84% identical or more, 85% identical or more, 86% identical or more, 87% identical or more, 88% identical or more, 89% identical or more, 90% identical or more, 91% identical or more, 92% identical or more, 93% identical or more, 94% identical or more, 95% identical or more, 96% identical or more, 97% identical or more, 98% identical or more, 99% identical or more, or 100% identical to the transposase domain sequences provided in FIG. 16 (SEQ ID NOS: 10176-10523) or SEQ ID NOS: 10524-20350 or 40357-516430.

[0137] In some embodiments, the IS110 family transposase comprises a RuvC-like DEDD catalytic domain comprising an amino acid sequence that is 50% identical or more, 51% identical or more, 52% identical or more, 53% identical or more, 54% identical or more, 55% identical or more, 56% identical or more, 57% identical or more, 58% identical or more, 59% identical or more, 60% identical or more, 61% identical or more, 62% identical or more, 63% identical or more, 64% identical or more, 65% identical or more, 66% identical or more, 67% identical or more, 68% identical or more, 69% identical or more, 70% identical or more, 71% identical or more, 72% identical or more, 73% identical or more, 74% identical or more, 75% identical or more, 76% identical or more, 77% identical or more, 78% identical or more, 79% identical or more, 80% identical or more, 81% identical or more, 82% identical or more, 83% identical or more, 84% identical or more, 85% identical or more, 86% identical or more, 87% identical or more, 88% identical or more, 89% identical or more, 90% identical or more, 91% identical or more, 92% identical or more, 93% identical or more, 94% identical or more, 95% identical or more, 96% identical or more, 97% identical or more, 98% identical or more, 99% identical or more, or 100% identical to the RuvC-like DEDD catalytic domain sequences provided in FIG. 16 (SEQ ID NOS: 10176-10523) or SEQ ID NOS: 10524-20350 or 40357-516430 and further comprises a transposase domain comprising an amino acid sequence that is 50% identical or more, 51% identical or more, 52% identical or more, 53% identical or more, 54% identical or more, 55% identical or more, 56% identical or more, 57% identical or more, 58% identical or more, 59% identical or more, 60% identical or more, 61% identical or more, 62% identical or more, 63% identical or more, 64% identical or more, 65% identical or more, 66% identical or more, 67% identical or more, 68% identical or more, 69% identical or more, 70% identical or more, 71% identical or more, 72% identical or more, 73% identical or more, 74% identical or more, 75% identical or more, 76% identical or more, 77% identical or more, 78% identical or more, 79% identical or more, 80% identical or more, 81% identical or more, 82% identical or more, 83% identical or more, 84% identical or more, 85% identical or more, 86% identical or more, 87% identical or more, 88% identical or more, 89% identical or more, 90% identical or more, 91% identical or more, 92% identical or more, 93% identical or more, 94% identical or more, 95% identical or more, 96% identical or more, 97% identical or more, 98% identical or more, 99% identical or more, or 100% identical to the transposase domain sequences provided in FIG. 16 (SEQ ID NOS: 10176-10523) or SEQ ID NOS: 10524-20350 or 40357-516430. In some embodiments, the amino acid sequence forms a similar tertiary structure to the RuvC-like DEDD catalytic domain of IS621. In some embodiments, the tertiary structure is determined using AlphaFold or similar protein structure prediction software. In some embodiments, a particular amino acid sequence is considered to form a similar tertiary structure to the RuvC-like DEDD catalytic domain of IS621 if the template modeling score (TM-score) for the RuvC-like DEDD catalytic domain is 0.5 or higher. In some embodiments, a particular amino acid sequence is considered to form a similar tertiary structure to the RuvC-like DEDD catalytic domain of IS621 if the template modeling score (TM-score) is 0.5 or higher, 0.6 or higher, 0.7 or higher, 0.8 or higher, or 0.9 or higher. In some embodiments the RuvC-like DEDD catalytic domain sequence provided is the RuvC-like DEDD catalytic domain of “protein_IS621” of FIG. 16 (SEQ ID NO:10176). In some embodiments, the amino acid sequence forms a similar tertiary structure to the transposase domain of IS621. In some embodiments, the tertiary structure is determined using AlphaFold or similar protein structure prediction software. In some embodiments, a particular amino acid sequence is considered to form a similar tertiary structure to the transposase domain of IS621 if the template modeling score (TM-score) for the transposase domain is 0.5 or higher. In some embodiments, a particular amino acid sequence is considered to form a similar tertiary structure to the transposase domain of IS621 if the template modeling score (TM-score) is 0.5 or higher, 0.6 or higher, 0.7 or higher, 0.8 or higher, or 0.9 or higher. In some embodiments the transposase domain sequence provided is the transposase domain of “protein_IS621” of FIG. 16 (SEQ ID NO:10176).

[0138] In some embodiments, the IS110 family transposase comprises a transposase domain comprising a motif G-x(28)-G-x(7)-SG-x(10)-G (SEQ ID NO: 795150), G-x(29)-G-x(7)-SG-x(11)-G (SEQ ID NO: 795151), IPGIG (SEQ ID NO: 795152), IPGVG (SEQ ID NO: 795153), AGLAP (SEQ ID NO: 795154), LGLVP (SEQ ID NO: 795155), [GSRAVECPYQNHFDKIT]-x(26,39)-[GKARCTNSEQHMD]-x(7,8)-[STRP][GASDNQCVER]-x(8,18)-[GACVYTSKRFNHIQDE], [GASFCRTNQKYDEV]-x(25,31)-[GRALKMSQCED]-x(7)-[STRAP][GNADSVCHER]-x(10,17)-[GSVRCAYKHQTFINED], [IVLAMFQTERCHSKYPWNG][PKDTFYERVSHQANGILCMW][GRASTCEPKVYQNH FDI]-x(0,1)-[IVAFLMCSWTYGKHNPRE]-x(0,2)-[GSDANKQERTMHCP], [IVLHAMFQTCYEPRSGW][PRKESADYTHVNGQICWLMF][GSFAQCYTRKNWLDEV H][VIFLCMYATPSGW]-x(0,2)-[GADSQNKRTEPWHC], [AVLNCSTIGMFYWDHEPQR][GRTKNACSEHQMD][LVTIMAYSFCQRWKNPGH][A CDTSVNERHFWIYQGKLMP][PVLAWISTCGNMR], or [LAVIFTCSWMGYPRQNKE][GRLAMCKEQDS][LIVTCMKSAFRPQG][VTAICRNDGS QMHLEPYKF][PGKASVIDRLTENQCW] with motifs in common Prosite format, where x is any amino acid and x(n) represents n number of any amino acid and x(n,m) represents n to m number of any amino acids. In some embodiments, the transposase domain comprises a motif G-x(28)-G-x(7)-SG-x(10)-G (SEQ ID NO: 795150), G-x(29)-G-x(7)-SG-x(11)-G (SEQ ID NO: 795151), IPGIG (SEQ ID NO: 795152), IPGVG (SEQ ID NO: 795153), AGLAP (SEQ ID NO: 795154), or LGLVP (SEQ ID NO: 795155). In some embodiments, the amino acid sequence forms a similar tertiary structure to the transposase domain of IS621. In some embodiments, the tertiary structure is determined using AlphaFold or similar protein structure prediction software. In some embodiments, a particular amino acid sequence is considered to form a similar tertiary structure to the transposase domain of IS621 if the template modeling score (TM-score) for the transposase domain is 0.5 or higher. In some embodiments, a particular amino acid sequence is considered to form a similar tertiary structure to the transposase domain of IS621 if the template modeling score (TM-score) is 0.5 or higher, 0.6 or higher, 0.7 or higher, 0.8 or higher, or 0.9 or higher.

[0139] In some embodiments, the IS110 family transposase comprises a transposase domain comprising an amino acid sequence that is 50% identical or more, 51% identical or more, 52% identical or more, 53% identical or more, 54% identical or more, 55% identical or more, 56% identical or more, 57% identical or more, 58% identical or more, 59% identical or more, 60% identical or more, 61% identical or more, 62% identical or more, 63% identical or more, 64% identical or more, 65% identical or more, 66% identical or more, 67% identical or more, 68% identical or more, 69% identical or more, 70% identical or more, 71% identical or more, 72% identical or more, 73% identical or more, 74% identical or more, 75% identical or more, 76% identical or more, 77% identical or more, 78% identical or more, 79% identical or more, 80% identical or more, 81% identical or more, 82% identical or more, 83% identical or more, 84% identical or more, 85% identical or more, 86% identical or more, 87% identical or more, 88% identical or more, 89% identical or more, 90% identical or more, 91% identical or more, 92% identical or more, 93% identical or more, 94% identical or more, 95% identical or more, 96% identical or more, 97% identical or more, 98% identical or more, 99% identical or more, or 100% identical to a transposase domain sequence of FIG. 16 (SEQ ID NOS: 10176-10523) or SEQ ID NOS: 10524-20350 or 40357-516430 and comprising any of the motifs in the preceding paragraph or in FIGS. 29-34. In some embodiments, the amino acid sequence forms a similar tertiary structure to the transposase domain of IS621. In some embodiments, the tertiary structure is determined using AlphaFold or similar protein structure prediction software. In some embodiments, a particular amino acid sequence is considered to form a similar tertiary structure to the transposase domain of IS621 if the template modeling score (TM-score) for the transposase domain is 0.5 or higher. In some embodiments, a particular amino acid sequence is considered to form a similar tertiary structure to the transposase domain of IS621 if the template modeling score (TM-score) is 0.5 or higher, 0.6 or higher, 0.7 or higher, 0.8 or higher, or 0.9 or higher.

[0140] In some embodiments, the IS110 transposases belonging to the IS110 group comprise a transposase domain comprising a domain motifs provided in FIG. 29 with motifs in common Prosite format, where x is any amino acid and x(n) represents n number of any amino acid and x(n,m) represents n to m number of any amino acids. In some embodiments, the IS110 transposases belonging to the IS110 group comprise a transposase domain comprising one or more of the transposase domain motifs provided in FIGS. 30-31 with motifs in common Prosite format, where x is any amino acid and x(n) represents n number of any amino acid and x(n,m) represents n to m number of any amino acids.

[0141] In some embodiments, the IS110 transposases belonging to the IS1111 group comprise a transposase domain comprising a domain motifs provided in FIG. 32 with motifs in common Prosite format, where x is any amino acid and x(n) represents n number of any amino acid and x(n,m) represents n to m number of any amino acids. In some embodiments, the IS110 transposases belonging to the IS1111 group comprise a transposase domain comprising one or more of the transposase domain motifs provided in FIGS. 33-34 with motifs in common Prosite format, where x is any amino acid and x(n) represents n number of any amino acid and x(n,m) represents n to m number of any amino acids.

### C.3. Linker Domain

[0142] The IS110 family transposases described herein comprise a linker domain between the RuvC-like DEDD catalytic domain and the transposase domain. In some embodiments, the linker domain comprised a coiled-coil.

[0143] In some embodiments, the IS110 family transposase comprises a linker domain comprising an amino acid sequence that is 50% identical or more, 51% identical or more, 52% identical or more, 53% identical or more, 54% identical or more, 55% identical or more, 56% identical or more, 57% identical or more, 58% identical or more, 59% identical or more, 60% identical or more, 61% identical or more, 62% identical or more, 63% identical or more, 64% identical or more, 65% identical or more, 66% identical or more, 67% identical or more, 68% identical or more, 69% identical or more, 70% identical or more, 71% identical or more, 72% identical or more, 73% identical or more, 74% identical or more, 75% identical or more, 76% identical or more, 77% identical or more, 78% identical or more, 79% identical or more, 80% identical or more, 81% identical or more, 82% identical or more, 83% identical or more, 84% identical or more, 85% identical or more, 86% identical or more, 87% identical or more, 88% identical or more, 89% identical or more, 90% identical or more, 91% identical or more, 92% identical or more, 93% identical or more, 94% identical or more, 95% identical or more, 96% identical or more, 97% identical or more, 98% identical or more, 99% identical or more, or 100% identical to the linker domain sequences provided in FIG. 16 (SEQ ID NOS: 10176-10523) or SEQ ID NOS: 10524-20350 or 40357-516430.

### C.4. IS110 Transposases

[0144] In certain aspects, the invention provides an IS110 family transposase comprising an N-terminal RuvC-like DEDD catalytic domain comprising a RuvC-like DEDD catalytic domain sequence provided in FIG. 16 (SEQ ID NOS: 10176-10523) or SEQ ID NOS: 10524-20350 or 40357-516430, a linker domain comprising a coiled-coil, and a C-terminal transposase domain comprising a transposase domain sequences provided in FIG. 16 (SEQ ID NOS: 10176-10523) or SEQ ID NOS: 10524-20350 or 40357-516430. In some embodiments, the linker domain comprises a linker domain sequence provided in FIG. 16 (SEQ ID NOS: 10176-10523) or SEQ ID NOS: 10524-20350 or 40357-516430. In some embodiments, the IS110 family transposase comprises “protein_IS621” of FIG. 16 (SEQ ID NO:10176).

[0145] In certain aspects, the invention provides an IS110 family transposase consisting of an N-terminal RuvC-like DEDD catalytic domain consisting of a RuvC-like DEDD catalytic domain sequences provided in FIG. 16 (SEQ ID NOS: 10176-10523) or SEQ ID NOS: 10524-20350 or 40357-516430, a linker domain comprising a coiled-coil, and a C-terminal transposase domain consisting of a transposase domain sequences provided in FIG. 16 (SEQ ID NOS: 10176-10523) or SEQ ID NOS: 10524-20350 or 40357-516430. In some embodiments, the linker domain consists of a linker domain sequence provided in FIG. 16 (SEQ ID NOS: 10176-10523) or SEQ ID NOS: 10524-20350 or 40357-516430. In some embodiments, the IS110 family transposase consists of “protein_IS621” of FIG. 16 (SEQ ID NO:10176).

[0146] In certain aspects, the invention provides an IS110 family transposase comprising, in the N-terminal to C-terminal direction, a RuvC-like DEDD catalytic domain comprising any of the motifs or sequences in FIGS. 21-28 and 50% identical or more, 51% identical or more, 52% identical or more, 53% identical or more, 54% identical or more, 55% identical or more, 56% identical or more, 57% identical or more, 58% identical or more, 59% identical or more, 60% identical or more, 61% identical or more, 62% identical or more, 63% identical or more, 64% identical or more, 65% identical or more, 66% identical or more, 67% identical or more, 68% identical or more, 69% identical or more, 70% identical or more, 71% identical or more, 72% identical or more, 73% identical or more, 74% identical or more, 75% identical or more, 76% identical or more, 77% identical or more, 78% identical or more, 79% identical or more, 80% identical or more, 81% identical or more, 82% identical or more, 83% identical or more, 84% identical or more, 85% identical or more, 86% identical or more, 87% identical or more, 88% identical or more, 89% identical or more, 90% identical or more, 91% identical or more, 92% identical or more, 93% identical or more, 94% identical or more, 95% identical or more, 96% identical or more, 97% identical or more, 98% identical or more, 99% identical or more, or 100% identical to the RuvC-like DEDD catalytic domain sequences provided in FIG. 16 (SEQ ID NOS: 10176-10523) or SEQ ID NOS: 10524-20350 or 40357-516430, a linker domain comprising a coiled-coil, and a transposase domain comprising any of the motifs or sequences in FIGS. 30-34 and 50% identical or more, 51% identical or more, 52% identical or more, 53% identical or more, 54% identical or more, 55% identical or more, 56% identical or more, 57% identical or more, 58% identical or more, 59% identical or more, 60% identical or more, 61% identical or more, 62% identical or more, 63% identical or more, 64% identical or more, 65% identical or more, 66% identical or more, 67% identical or more, 68% identical or more, 69% identical or more, 70% identical or more, 71% identical or more, 72% identical or more, 73% identical or more, 74% identical or more, 75% identical or more, 76% identical or more, 77% identical or more, 78% identical or more, 79% identical or more, 80% identical or more, 81% identical or more, 82% identical or more, 83% identical or more, 84% identical or more, 85% identical or more, 86% identical or more, 87% identical or more, 88% identical or more, 89% identical or more, 90% identical or more, 91% identical or more, 92% identical or more, 93% identical or more, 94% identical or more, 95% identical or more, 96% identical or more, 97% identical or more, 98% identical or more, 99% identical or more, or 100% identical to the transposase domain sequences provided in FIG. 16 (SEQ ID NOS: 10176-10523) or SEQ ID NOS: 10524-20350 or 40357-516430. In some embodiments, the linker domain comprises an amino acid sequence 50% identical or more, 51% identical or more, 52% identical or more, 53% identical or more, 54% identical or more, 55% identical or more, 56% identical or more, 57% identical or more, 58% identical or more, 59% identical or more, 60% identical or more, 61% identical or more, 62% identical or more, 63% identical or more, 64% identical or more, 65% identical or more, 66% identical or more, 67% identical or more, 68% identical or more, 69% identical or more, 70% identical or more, 71% identical or more, 72% identical or more, 73% identical or more, 74% identical or more, 75% identical or more, 76% identical or more, 77% identical or more, 78% identical or more, 79% identical or more, 80% identical or more, 81% identical or more, 82% identical or more, 83% identical or more, 84% identical or more, 85% identical or more, 86% identical or more, 87% identical or more, 88% identical or more, 89% identical or more, 90% identical or more, 91% identical or more, 92% identical or more, 93% identical or more, 94% identical or more, 95% identical or more, 96% identical or more, 97% identical or more, 98% identical or more, 99% identical or more, or 100% identical to the linker domain sequences provided in FIG. 16 (SEQ ID NOS: 10176-10523) or SEQ ID NOS: 10524-20350 or 40357-516430.

[0147] In certain aspects, described herein is an IS110 family transposase amino acid sequence further comprising a nuclear localization signal (NLS). In some embodiments the NLS is encoded at the N-terminus of the IS110 family transposase amino acid sequence. In some embodiments the NLS is encoded at the C-terminus of the IS110 family transposase amino acid sequence. In some embodiments, the IS110 family transposase amino acid sequence further comprises more than one NLS. In some embodiments, the IS110 family transposase amino acid sequence further comprises two NLSs. In some embodiments, the IS110 family transposase amino acid sequence further comprises three NLSs. In some embodiments, the IS110 family transposase amino acid sequence further comprises more than three NLSs. In some embodiments, the IS110 family transposase amino acid sequence further comprises three NLSs at the N-terminus of the IS110 family transposase amino acid sequence. In some embodiments, the IS110 family transposase amino acid sequence further comprises three NLSs at the C-terminus of the IS110 family transposase amino acid sequence. Any NLS known in that art can be used. In some embodiments, the NLS is an SV40 NLS.

[0148] Without being bound by theory, the observed IS110 transposition reaction resembles that of conservative site-specific recombinases (CSSRs). Two DNA sequences are specifically recognized by the transposition machinery. The bridgeRNA recognizes both the donor site sequence and target site sequence; the transposase binds the bridgeRNA and, in some embodiments, STIR subsequences of the donor site. Excision of an IS110 transposon element is scarless, the original target sequence is reconstituted to its original sequence pre-insertion.

[0149] In some embodiments, the present invention could be supplemented with additional IS110 orthologs with improved efficiency and/or specificity using an extended bioinformatic search. IS110 systems with improved efficiency, such as in mammalian cells, could be identified by prioritizing candidates that occur in organisms that naturally grow at physiological temperatures. For example, candidates that naturally reside within human gut microbes could be prioritized for experimental characterization in human cells. Alternatively, IS110 systems that are found in the genomes of extremophile organisms could be prioritized for experimental characterization due to their potential utility as in vitro, temperature-responsive molecular tools. In another embodiment, IS110 systems with high specificity could be prioritized based on predicted properties of their bridgeRNA sequences, which are further described below (see Section D).

[0150] The present invention also contemplates the use of the IS110 system with cofactors and/or additional domains that may impart new functions for the IS110 system, increase the specificity of the IS110 system, and/or increase the efficiency of the IS110 system. These may exist within IS110 elements and/or in the vicinity of IS elements.

[0151] In some embodiments, the present invention contemplates an approach to engineering IS110 systems. Scientists have demonstrated that it is possible to infer the identity of an ancestral protein using phylogenetic analysis (Alonso-Lerma, B., Jabalera, Y., Samperio, S. et al., Evolution of CRISPR-associated endonucleases as inferred from resurrected proteins., Nat Microbiol 8, 77-90 (2023)). These inferred ancestral proteins may not exist in nature in the present day, but they represent a common ancestor of an existing clade of proteins. These ancestral proteins could then be experimentally synthesized and tested to determine if they have favorable properties. In one embodiment, a clade of IS110s with particular long or specific bridgeRNA target and/or donor binding loops could be analyzed using this method to identify an ancestral protein that is capable of binding to a bridgeRNA molecule with even more favorable properties.

[0152] In one embodiment, the present invention could be supplemented with additional IS110 orthologs using an extended bioinformatic search. Some IS110 transposases may have fused with other domains, imparting new biochemical properties to the IS110 system. In some embodiments, IS110 transposases with unusually long amino acid sequences could be investigated as potential candidates for these domain fusions. In some embodiments, protein domain collections, such as Pfam and InterPro, could be used to search across all proteins that are known to contain an IS110 RuvC-like DEDD catalytic domain, an IS110 transposase domain, or both. These IS110s could then be synthesized and experimentally characterized to identify any favorable properties that they may have. In another embodiment, IS110 transposases may not be fused to an additional protein cofactor as a single amino acid sequence, but they may associate with them in a multi-protein complex. These complexes could be identified by searching for proteins that occur near an IS110 CDS with high frequency in natural genomes. These additional cofactors could be synthesized and experimentally characterized to identify any favorable properties that they may have.

[0153] In some embodiments, the present invention contemplates an approach to engineering IS110 systems wherein the transposase domain is replaced or fused with a integrase, a nucleobase deaminase, a reverse transcriptase, a recombinase, an integrase, a topoisomerase, a retrotransposon, phosphatase, polymerase, a ligase, a helitron, a helicase, a methylase, a demethylase, a translation activator, a translation repressor, a transcription activator, a transcription repressor, a transcription release factor, a chromatin modifier, a histone modifier, an acetylase, a deacetylase, a reverse transcriptase, or a nuclease. Fusions with the transposase domain can comprise simply fusing one of the aforementioned effector domain-comprising enzymes or domain(s) thereof with either the N- or C-terminus of the transposase. In some embodiments, the IS110 transposase may also be modified such that the catalytic activity of the RuvC or transposase domain is crippled. In some embodiments, as an alternative to direct fusions, co-delivery of one or more of these effector domains along with, for example, an inactive IS110 transposase domain.

[0154] In some embodiments, the present invention contemplates an approach to engineering IS110 systems wherein the IS110 transposase comprises one or more amino acid mutations as compared to a wild type, whereby the mutations increase binding and/or interaction with a target site sequence, donor site sequence, and/or bridgeRNA and/or increase IS110 transposase activity

[0155] In some embodiments, the IS110 transposases may be engineered in such a way so as to reduce, limit, or eliminate the reverse reactions of insertion, excisive recombination, or inversion, in accordance with the observation that IS110 transposons excise themselves using an inefficient mechanism.

[0156] In certain aspects, described herein are nucleic acids encoding any of the IS110 family transposase amino acid sequences provided herein. In any of the embodiments described herein, a nucleotide sequence encoding the IS110 transposases or portions thereof can be codon-optimized. This type of optimization is known in the art and entails the mutation of foreign-derived DNA to mimic the codon preferences of the intended host organism or cell while encoding the same protein. Thus, the codons are changed, but the encoded protein remains unchanged. For example, if the intended target cell was a human cell, a human codon-optimized IS110 transposases or portions thereof would be a suitable IS110 transposase. As another non-limiting example, if the intended host cell were a mouse cell, then a mouse codon-optimized IS110 transposases or portions thereof would be a suitable IS110 transposase. While codon optimization is not required, it is acceptable and may be preferable in certain cases.

### D. BridgeRNA

[0157] It was bioinformatically and experimentally determined that IS110 transposases bind an RNA, referred to herein as bridgeRNA, expressed from the IS110 element non-coding ends and which directs donor and target site specificity. See Examples 1 and 3-5. BridgeRNA was previously referred to as “directing RNA” or “dRNA” and any references to directing RNA or dRNA refer to the bridgeRNA.

[0158] As discussed above, concatenation of the RE and LE may form a promoter which promotes expression of the bridgeRNA. The bridgeRNA forms a RNA-protein complex with the transposase and recognizes via base-pairing the target site or the donor site and target site together to mediate transposition. In some embodiments, the bridgeRNA can be recombinantly expressed using any suitable promoter. In some embodiments, portions of the bridgeRNA can be recombinantly expressed as two separate molecules using one promoter or multiple promoters. In some embodiments, the bridgeRNA can be recombinantly expressed using a promoter designed from the concatenation sequence of the RE and LE as described supra. In some embodiments, the bridgeRNA can be recombinantly expressed using a type III pol III promoter, which is known in the art to be suitable for small RNA expression, such as for guide RNAs in CRISPR-Cas systems. In some embodiments, the promoter is a sigma70 promoter box.

[0159] The bridgeRNA for IS110 transposases of the IS110 group is typically encoded within the LE, although in some embodiments the bridgeRNA can be at least partially encoded within RE also. In some embodiments, the bridgeRNA can be encoded within the LE and at least partially encoded within a 5′ portion of the CDS sequence encoding the IS110 transposase. The bridgeRNA for IS110 transposases of the IS110 group have donor and target binding loops to recognize the donor site sequence and the target site sequence via base-pairing to mediate transposition.

[0160] The bridgeRNA for IS110 transposases of the IS1111 group is typically encoded within the RE. In some embodiments, the bridgeRNA can be encoded within the RE and at least partially encoded within a 3′ portion of the CDS sequence encoding the IS110 transposase (e.g., an IS1111 group I110 transposase). The bridgeRNA for I110 transposases of the IS1111 group have donor and target binding loops to recognize the donor site sequence and the target site sequence via base-pairing to mediate transposition. In some embodiments, the donor and target binding sequences of the bridgeRNA for IS110 transposases of the IS1111 group can be present on a single loop of the bridgeRNA that recognizes the donor site sequence and the target site sequence via base-pairing to mediate transposition. In some embodiments, the donor binding sequences of the bridgeRNA for IS110 transposases of the IS1111 group can be present on a multi-branched loop of the bridgeRNA that recognizes the donor site sequence via base-pairing to mediate transposition.

[0161] The bridgeRNA refers to a single-stranded RNA molecule that undergoes intramolecular base pairing to form one or more stem-loop structures (which includes stem structures with external loops, bulge loops, multi-branched loops, hairpin loops and/or internal loops, see e.g., FIG. 1 of Sato, K., Akiyama, M. & Sakakibara, Y. RNA secondary structure prediction using deep learning with thermodynamic integration. Nat Commun 12, 941 (2021), doi.org/10.1038/s41467-021-21194-4, the content of which is hereby incorporated by reference in its entirety). Typically, a stem is formed by two portions of the RNA molecule which are complementary when read in opposite directions and base pair to form a stem with intervening unpaired nucleotides between the two complementary portions forming a loop. A stem sequence does not need to be 100% complementary and can comprise mismatches, bulges, or internal loops.

[0162] In some embodiments, the bridgeRNA comprises a RNA molecule that comprises at least one stem-loop structure and further comprises one or more loops comprising a first nucleotide sequence that is complementary to a first target site sequence of a target DNA, a second nucleotide sequence that is complementary to a second target site sequence which is on the opposite strand of the target DNA to the first target site sequence, a third nucleotide sequence that is complementary to a first donor site sequence of a donor DNA, and a fourth nucleotide sequence that is complementary to a second donor site sequence which is on the opposite strand of the donor DNA to the first donor site sequence. In some embodiments, the bridgeRNA comprises a first internal loop comprising a first nucleotide sequence that is complementary to a first target site sequence of a target DNA, a second nucleotide sequence that is complementary to a second target site sequence which is on the opposite strand of the target DNA to the first target site sequence, and a second internal loop comprising a third nucleotide sequence that is complementary to a first donor site sequence of a donor DNA, and a fourth nucleotide sequence that is complementary to a second donor site sequence which is on the opposite strand of the donor DNA to the first donor site sequence. In some embodiments, the bridgeRNA comprises an internal loop comprising a first nucleotide sequence that is complementary to a first target site sequence of a target DNA, a second nucleotide sequence that is complementary to a second target site sequence which is on the opposite strand of the target DNA to the first target site sequence, and a multi-branched loop comprising a third nucleotide sequence that is complementary to a first donor site sequence of a donor DNA, and a fourth nucleotide sequence that is complementary to a second donor site sequence which is on the opposite strand of the donor DNA to the first donor site sequence. In some embodiments, said bridgeRNA binds a IS110 group transposase. In some embodiments, said bridgeRNA binds a IS1111 group transposase. In some embodiments, said bridgeRNA binds the transposase of IS621, ISPa11, IsPa29, ISMmg1, ISPfl1, ISMae40, ISStma6, ISAzs32, ISMex9, ISCARN28, ISAar16, ISCps7, ISPpu9, ISRe19, ISEsa2, ISMma5, IS900, or ISHne5. In some embodiments, said bridgeRNA binds the transposase of IS621. In some embodiments, a loop comprising the first and second nucleotide sequences that are complementary to the target site sequence of a target DNA may form a stem or partial stem structure when not bound by a transposase and form a single stranded structure when bound to a transposase. In some embodiments, a loop comprising the third and fourth nucleotide sequences that are complementary to the donor site sequence of a donor DNA may form a stem or partial stem structure when not bound by a transposase and form a single stranded structure when bound to a transposase.

[0163] With reference to the above bridgeRNA, in some embodiments, the first and second nucleotide sequences are fully complementary to their respective target site sequences of the target DNA. In some embodiments, the first and/or second nucleotide sequences are partially complementary to their respective target site sequences of the target DNA, i.e., there is non-canonical base pairing, mismatch and/or non-contiguous tolerance. In some embodiments, there is a single mismatch in the first or second nucleotide sequence. In some embodiments, there are two, three or four mismatches which can be in the first nucleotide sequence, in the second nucleotide sequence, or spread across the first and second nucleotide sequences. In some embodiments, the two, three or four mismatches are contiguous. In some embodiments, the two, three or four mismatches are non-contiguous. In some embodiments, there is a single non-canonical base pair in the first or second nucleotide sequence. In some embodiments, there are two, three or four non-canonical base pairs which can be in the first nucleotide sequence, in the second nucleotide sequence, or spread across the first and second nucleotide sequences. In some embodiments, the two, three or four non-canonical base pairs are contiguous. In some embodiments, the two, three or four non-canonical base pairs are non-contiguous. In some embodiments, the third and fourth nucleotide sequences are fully complementary to their respective donor site sequences of the donor DNA. In some embodiments, the third and/or fourth nucleotide sequences are partially complementary to their respective donor site sequences of the donor DNA, i.e., there is non-canonical base pairing, mismatch and/or non-contiguous tolerance. In some embodiments, there is a single mismatch in the third or fourth nucleotide sequence. In some embodiments, there are two mismatches which can be in the third nucleotide sequence, in the fourth nucleotide sequence, or spread across the third and fourth nucleotide sequences. In some embodiments, the two mismatches are contiguous. In some embodiments, the two mismatches are non-contiguous. In some embodiments, there is a single non-canonical base pair in the third or fourth nucleotide sequence. In some embodiments, there are two non-canonical base pairs which can be in the third nucleotide sequence, in the fourth nucleotide sequence, or spread across the third and fourth nucleotide sequences. In some embodiments, the two non-canonical base pairs are contiguous. In some embodiments, the two non-canonical base pairs are non-contiguous. In some embodiments, the non-canonical base pairing is non-Watson-Crick base pairing (i.e., is not a G-C base pair or A-T/U base pair). For example, see Pacesa M, Lin C H, Cléry A, et al., Structural basis for Cas9 off-target activity, Cell, 2022, 185(22):4067-4081.e21, the contents of which is hereby incorporated by reference in its entirety). In some embodiments, the non-canonical base pairing is wobble base pairing. In some embodiments, the non-canonical base pairing is Hoogsteen base pairing. In some embodiments, the non-canonical base pairing comprises a rG-dT base pair, a rU-dG base pair, a rA-dC base pair, a rC-dA base pair, a rA-dG base pair, or a rG-dG base pair.

[0164] In some embodiments, the bridgeRNA comprises a RNA molecule that comprises at least one stem-loop structure and further comprises one or more loops comprising a first nucleotide sequence that is complementary to a first target site sequence of a target DNA, a second nucleotide sequence that is complementary to a second target site sequence which is on the opposite strand of the target DNA to the first target site sequence. In some embodiments, the bridgeRNA further comprises a third nucleotide sequence that is complementary to a first donor site sequence of a donor DNA, and a fourth nucleotide sequence that is complementary to a second donor site sequence which is on the opposite strand of the donor DNA to the first donor site sequence. In some embodiments, the bridgeRNA comprises a first internal loop comprising a first nucleotide sequence that is complementary to a first target site sequence of a target DNA, a second nucleotide sequence that is complementary to a second target site sequence which is on the opposite strand of the target DNA to the first target site sequence. In some embodiments, the bridgeRNA comprises a second internal loop comprising a third nucleotide sequence that is complementary to a first donor site sequence of a donor DNA, and a fourth nucleotide sequence that is complementary to a second donor site sequence which is on the opposite strand of the donor DNA to the first donor site sequence. In some embodiments, the first internal loop (e.g. a multi-branched loop) of the bridgeRNA comprises a third nucleotide sequence that is complementary to a first donor site sequence of a donor DNA, and a fourth nucleotide sequence that is complementary to a second donor site sequence which is on the opposite strand of the donor DNA to the first donor site sequence. In some embodiments, said bridgeRNA binds an IS1111 group transposase. In some embodiments, said bridgeRNA binds the transposase of IS1111_229727. In some embodiments, a loop comprising the first and second nucleotide sequences that are complementary to the target site sequence of a target DNA may form a stem or partial stem structure when not bound by a transposase and form a single stranded structure when bound to a transposase. In some embodiments, a loop comprising the third and fourth nucleotide sequences that are complementary to the donor site sequence of a donor DNA may form a stem or partial stem structure when not bound by a transposase and form a single stranded structure when bound to a transposase.

[0165] With reference to the above bridgeRNA, in some embodiments, the first and second nucleotide sequences are fully complementary to their respective target site sequences of the target DNA. In some embodiments, the first and/or second nucleotide sequences are partially complementary to their respective target site sequences of the target DNA, i.e., there is non-canonical base pairing, mismatch and/or non-contiguous tolerance. In some embodiments, there is a single mismatch in the first or second nucleotide sequence. In some embodiments, there are two, three or four mismatches which can be in the first nucleotide sequence, in the second nucleotide sequence, or spread across the first and second nucleotide sequences. In some embodiments, the two, three or four mismatches are contiguous. In some embodiments, the two, three or four mismatches are non-contiguous. In some embodiments, there is a single non-canonical base pair in the first or second nucleotide sequence. In some embodiments, there are two, three or four non-canonical base pairs which can be in the first nucleotide sequence, in the second nucleotide sequence, or spread across the first and second nucleotide sequences. In some embodiments, the two, three or four non-canonical base pairs are contiguous. In some embodiments, the two, three or four non-canonical base pairs are non-contiguous. In some embodiments, the third and fourth nucleotide sequences are fully complementary to their respective donor site sequences of the donor DNA. In some embodiments, the third and/or fourth nucleotide sequences are partially complementary to their respective donor site sequences of the donor DNA, i.e., there is non-canonical base pairing, mismatch and/or non-contiguous tolerance. In some embodiments, there is a single mismatch in the third or fourth nucleotide sequence. In some embodiments, there are two mismatches which can be in the third nucleotide sequence, in the fourth nucleotide sequence, or spread across the third and fourth nucleotide sequences. In some embodiments, the two mismatches are contiguous. In some embodiments, the two mismatches are non-contiguous. In some embodiments, there is a single non-canonical base pair in the third or fourth nucleotide sequence. In some embodiments, there are two non-canonical base pairs which can be in the third nucleotide sequence, in the fourth nucleotide sequence, or spread across the third and fourth nucleotide sequences. In some embodiments, the two non-canonical base pairs are contiguous. In some embodiments, the two non-canonical base pairs are non-contiguous. In some embodiments, the non-canonical base pairing is non-Watson-Crick base pairing (i.e., is not a G-C base pair or A-T/U base pair). In some embodiments, the non-canonical base pairing is wobble base pairing. In some embodiments, the non-canonical base pairing is Hoogsteen base pairing. In some embodiments, the non-canonical base pairing comprises a rG-dT base pair, a rU-dG base pair, a rA-dC base pair, a rC-dA base pair, a rA-dG base pair, or a rG-dG base pair.

[0166] In some embodiments, the bridgeRNA comprises a RNA molecule that comprises at least two stem-loop structures, and with respect to the bridgeRNA having at least two stem-loop structures, these two structures are referred to as the “first stem-loop” and the “second stem-loop” where the first is 5′ or upstream to the second. In some embodiments, the first stem-loop comprises a target binding loop and the second stem-loop comprises a donor binding loop. In some embodiments, the first stem loop comprises a donor binding loop and the second stem-loop comprises a target binding loop. Thus, with this nomenclature, there can be additional stem-loop structures upstream of the first stem-loop, between the first and second stem-loops, and/or after the second-stem loop. In some embodiments, the bridgeRNA comprises at least a first internal loop referred to as a target binding loop and a second internal loop referred to as a donor binding loop. In some embodiments, the bridgeRNA comprises a RNA molecule that comprises at least two stem-loop structures as depicted in FIG. 2D and for Cluster 1 in FIG. 13. In FIG. 2D and for Cluster 1 in FIG. 13, and in some embodiments, the first stem-loop structure of the bridgeRNA comprises a first stem-loop (5-35 nt, 3-10 nt loop) comprising an internal loop (e.g., a target binding loop) (5-20 nt). In FIG. 2D and for Cluster 1 in FIG. 13, and in some embodiments, the second stem-loop structure of the bridgeRNA comprises a second stem-loop (5-35 nt, 3-10 nt loop) comprising an internal loop (e.g., a donor binding loop) (5-20 nt). The stem of the second stem-loop structure can include additional loops and bubbles that are 1-10 nucleotides each. As shown in FIG. 2D and in some embodiments, the bridgeRNA may further comprise an additional third stem-loop structure (5-15 nt stem, 3-10 nt loop) (accessory structure) 5′ to the first stem-loop. In some embodiments, said bridgeRNA binds the transposase of IS621. In some embodiments, said bridgeRNA binds the transposase of ISMae40 or ISStma6. In some embodiments, the donor binding loop and/or target binding loop may form a stem or partial stem structure when not bound by a transposase and form a single stranded structure when bound to a transposase.

[0167] Thus, in some embodiments, the bridgeRNA comprises a nucleotide sequence comprising the following secondary structure: first stem-loop comprising an internal target binding loop—second stem-loop comprising an internal donor binding loop. In some embodiments, the bridgeRNA comprises additional stem-loop structures, bulges, and/or loops (see, e.g., FIG. 2D). In some embodiments, the bridgeRNA comprises a nucleotide sequence comprising 5′-[A]-[B]-[C]-[D]-[E]-[F]-[G]-[H]-[I]-[J]-[K]-[L]-[M]-[N]-3′, wherein A is a first stem portion, B is a first side of an internal loop corresponding to a target binding loop, C is a second stem portion, D is a first loop portion, E is the reverse complement of C, F is a second side of the internal loop corresponding to the target binding loop, G is the reverse complement of A, H is a third stem portion, I is a first side of an internal loop corresponding to a donor binding loop, J is a fourth stem portion, K is a second loop portion, L is the reverse complement of J, M is a second side of the internal loop corresponding to the donor binding loop, and N is the reverse complement of H. In some embodiments, the reverse complement portions are not 100% complementary so that the stem structures may comprise one or more mismatches or bulges, or non-standard base-pairing may occur. In some embodiments, the first side of the internal loop corresponding to the target bind loop comprises a nucleotide sequence that is complementary to a first target site sequence of a target DNA (referred to as LTG (left target guide)) and the second side of the internal loop corresponding to the target bind loop comprises a second nucleotide sequence that is complementary to a second target site sequence which is on the opposite strand of the target DNA to the first target site sequence (referred to as RTG (right target guide)). In some embodiments, the first side of the internal loop corresponding to the donor binding loop comprises a nucleotide sequence that is complementary to a first donor site sequence of a donor DNA (referred to as LDG (left donor guide)) and the second side of the internal loop corresponding to the donor bind loop comprises a second nucleotide sequence that is complementary to a second donor site sequence which is on the opposite strand of the donor DNA to the first target site sequence (referred to as RDG (right donor guide)). In some embodiments, the stem structures may comprise one or more mismatches or bulges. In some embodiments, at least two portions of nucleotide sequence N are not complementary to the nucleotide sequence of portion H, so that the stem structure formed by base pairing between portion H and N comprises two bulges. In some embodiments, additional nucleotides are present between any of the portions A to N. For example, one or more non-base-paired nucleotides are present between portions G and H. In another embodiment, one or more nucleotides are present between the 5′ terminus and portion A. In another embodiment, one or more nucleotides are present between the 3′ terminus and portion N. In some embodiments, said bridgeRNA binds the transposase of IS621. In some embodiments, said bridgeRNA binds the transposase of ISMae40 or ISStma6. In some embodiments, the donor binding loop and/or target binding loop may form a stem or partial stem structure when not bound by a transposase and form a single stranded structure when bound to a transposase.

[0168] In some embodiments, the bridgeRNA comprises a nucleotide sequence comprising the following secondary structure: third stem-loop—first stem-loop comprising an internal target binding loop second stem-loop comprising an internal donor binding loop. In some embodiments, the bridgeRNA comprises additional stem-loop structures, bulges, and/or loops (see, e.g., FIG. 2D). In some embodiments, the bridgeRNA comprises a nucleotide sequence comprising 5′-[Z]-[X]—[Y]-[A]-[B]-[C]-[D]-[E]-[F]-[G]-[H]-[I]-[J]-[K]-[L]-[M]-[N]-3′, wherein Z is a fifth stem portion, X is a third loop portion, Y is the reverse complement of Z, A is a first stem portion, B is a first side of an internal loop corresponding to a target binding loop, C is a second stem portion, D is a first loop portion, E is the reverse complement of C, F is a second side of the internal loop corresponding to the target binding loop, G is the reverse complement of A, H is a third stem portion, I is a first side of an internal loop corresponding to a donor binding loop, J is a fourth stem portion, K is a second loop portion, L is the reverse complement of J, M is a second side of the internal loop corresponding to the donor binding loop, and N is the reverse complement of H. In some embodiments, the reverse complement portions are not 100% complementary so that the stem structures may comprise one or more mismatches or bulges, or non-standard base-pairing may occur. In some embodiments, the first side of the internal loop corresponding to the target bind loop comprises a nucleotide sequence that is complementary to a first target site sequence of a target DNA (referred to as LTG) and the second side of the internal loop corresponding to the target bind loop comprises a second nucleotide sequence that is complementary to a second target site sequence which is on the opposite strand of the target DNA to the first target site sequence (referred to as RTG). In some embodiments, the first side of the internal loop corresponding to the donor bind loop comprises a nucleotide sequence that is complementary to a first donor site sequence of a donor DNA (referred to as LDG) and the second side of the internal loop corresponding to the donor bind loop comprises a second nucleotide sequence that is complementary to a second donor site sequence which is on the opposite strand of the donor DNA to the first target site sequence (referred to as RDG). In some embodiments, the stem structures may comprise one or more mismatches or bulges. In some embodiments, at least two portions of nucleotide sequence N are not complementary to the nucleotide sequence of portion H, so that the stem structure formed by base pairing between portion H and N comprises two bulges. In some embodiments, additional nucleotides are present between any of the portions A to N. For example, one or more non-base-paired nucleotides are present between portions G and H. In another embodiment, one or more nucleotides are present between portions Y and A. In another embodiment, one or more nucleotides are present between the 5′ terminus and portion Z. In another embodiment, one or more nucleotides are present between the 3′ terminus and portion N. In some embodiments, said bridgeRNA binds the transposase of IS621. In some embodiments, the donor binding loop and/or target binding loop may form a stem or partial stem structure when not bound by a transposase and form a single stranded structure when bound to a transposase.

[0169] With reference to the above bridgeRNAs, in some embodiments, the LTG and RTG sequences are fully complementary to their respective target site sequences of the target DNA. In some embodiments, the LTG and/or RTG are partially complementary to their respective target site sequences of the target DNA, i.e., there is non-canonical base pairing, mismatch and/or non-contiguous tolerance. In some embodiments, there is a single mismatch in the LTG or RTG nucleotide sequence. In some embodiments, there are two, three or four mismatches which can be in the LTG, in the RTG, or spread across the LTG and RTG. In some embodiments, the two, three or four mismatches are contiguous. In some embodiments, the two, three or four mismatches are non-contiguous. In some embodiments, the LTG and/or RTG are partially complementary to their respective target site sequences of the target DNA so that there are one, two, three, or four nucleotides dispersed within LTG and/or RTG that do not base pair with the target DNA and form bulges. In some embodiments, there is a single non-canonical base pair in the LTG or RTG nucleotide sequence. In some embodiments, there are two, three or four non-canonical base pairs which can be in the LTG, in the RTG, or spread across the LTG and RTG. In some embodiments, the two, three or four non-canonical base pairs are contiguous. In some embodiments, the two, three or four non-canonical base pairs are non-contiguous. In some embodiments, the LDG and RDG nucleotide sequences are fully complementary to their respective donor site sequences of the donor DNA. In some embodiments, the LDG and/or RDG nucleotide sequences are partially complementary to their respective donor site sequences of the donor DNA, i.e., there is non-canonical base pairing, mismatch and/or non-contiguous tolerance. In some embodiments, there is a single mismatch in the LDG or RDG nucleotide sequence. In some embodiments, there are two, three or four mismatches which can be in the LDG, in the RDG, or spread across the LDG and RDG. In some embodiments, the two, three, or four mismatches are contiguous. In some embodiments, the two, three, or four mismatches are non-contiguous. In some embodiments, the LDG and/or RDG are partially complementary to their respective donor site sequences of the donor DNA so that there are one, two, three, or four nucleotides dispersed within LDG and/or RDG that do not base pair with the donor DNA and form bulges (see e.g., FIG. 36A). In some embodiments, there is a single non-canonical base pair in the LDG or RDG nucleotide sequence. In some embodiments, there are two, three, or four non-canonical base pairs which can be in the LDG, in the RDG, or spread across the LDG and RDG. In some embodiments, the two, three, or four non-canonical base pairs are contiguous. In some embodiments, the two, three, or four non-canonical base pairs are non-contiguous. In some embodiments, the non-canonical base pairing is non-Watson-Crick base pairing (i.e., is not a G-C base pair or A-T/U base pair). In some embodiments, the non-canonical base pairing is wobble base pairing. In some embodiments, the non-canonical base pairing is Hoogsteen base pairing. In some embodiments, the non-canonical base pairing comprises a rG-dT base pair, a rU-dG base pair, a rA-dC base pair, a rC-dA base pair, a rA-dG base pair, or a rG-dG base pair.

[0170] In some embodiments, the bridgeRNA comprises a nucleotide sequence comprising the sequence 5′--nnnnnnnnYYnRRnn----nnYYYnnnYnnnnRRnnnnYYGGAYGCCGYnYYnRnCCUnnRRYnnnARYYYGYnnYGU AGAUnnnYGCRnC-RRnYRYYnnnnnnnnYnnGYnnnRRRYCGRACnGnAUCnYnGGCYGGY-nnnYCGRnARYCYGCAUUYACAAGGUnGRUnRCRYRAnnn-n3′ (SEQ ID NO: 795156), wherein “n” represents any nucleotide, “R” represents an A or G nucleotide, and “Y” represents a C or U nucleotide. In some embodiments, the bridgeRNA comprises a nucleotide sequence comprising the sequence 5′--nnnnnnnnYYnRRnn----nnYYYnnnYnnnnRRnnnnYYGGAYGCCGYnYYnRnCCUnnRRYnnnARYYYGYnnYGU AGAUnnnYGCRnC-RRnYRYYnnnnnnnnYnnGYnnnRRRYCGRACnGnAUCnYnGGCYGGY-nnnYCGRnARYCYGCAUUYACAAGGUnGRUnRCRYRAnnn-n3′ (SEQ ID NO: 795156), wherein “n” represents any nucleotide, “R” represents an A or G nucleotide, and “Y” represents a C or U nucleotide and wherein the bridgeRNA comprises the secondary structure 5′........((((((..........)))))).....((((((((.(((............(((((....)))))..............))))).)))))))............................... ....(((((.....)))))..................................3′, wherein matching parentheses “(“and”)” indicate base-paired nucleotides, and “.” indicate unpaired bases. In some embodiments, the bridgeRNA comprises a nucleotide sequence comprising the sequence 5′--nnnnnnnnYYnRRnn----nnYYYnnnYnnnnRRnnnnYYGGAYGCCGYnYYnRnCCUnnRRYnnnARYYYGYnnYGU AGAUnnnYGCRnC-RRnYRYYnnnnnnnnYnnGYnnnRRRYCGRACnGnAUCnYnGGCYGGY-nnnYCGRnARYCYGCAUUYACAAGGUnGRUnRCRYRAnnn-n3′ (SEQ ID NO: 795156), wherein “n” represents any nucleotide, “R” represents an A or G nucleotide, and “Y” represents a C or U nucleotide and wherein the bridgeRNA comprises the secondary structure 5′.....((((((((((........)))))))))).((((((((((.(((............(((((....)))))..............))))).)))))))).......(.((((....(((.... .........((((((.....)))))...)...............)))..)))).)....3′, wherein matching parentheses “(“and”)” indicate base-paired nucleotides, and “.” indicate unpaired bases. In some embodiments, the bridgeRNA comprises a nucleotide sequence comprising the sequence 5′--nnnnnnnnYYnRRnn----nnYYYnnnYnnnnRRnnnnYYGGAYGCCGYnYYnRnCCUnnRRYnnnARYYYGYnnYGU AGAUnnnYGCRnC-RRnYRYYnnnnnnnnYnnGYnnnRRRYCGRACnGnAUCnYnGGCYGGY-nnnYCGRnARYCYGCAUUYACAAGGUnGRUnRCRYRAnnn-n3′ (SEQ ID NO: 795156), wherein “n” represents any nucleotide, “R” represents an A or G nucleotide, and “Y” represents a C or U nucleotide and wherein the bridgeRNA comprises the secondary structure 5′.....(((((((((((......))))))))))).((((((((((.(((...(((.((...(((((....)))))..))...)))....))))).))))))))......((((((((..((((. ..........((((((((.....)))))...))).............))))))))))))...3′, wherein matching parentheses “(“and”)” indicate base-paired nucleotides, and “.” indicate unpaired bases. In some embodiments, the bridgeRNA comprises a nucleotide sequence comprising the sequence 5′--nnnnnnnnYYnRRnn----nnYYYnnnYnnnnRRnnnnYYGGAYGCCGYnYYnRnCCUnnRRYnnnARYYYGYnnYGU AGAUnnnYGCRnC-RRnYRYYnnnnnnnnYnnGYnnnRRRYCGRACnGnAUCnYnGGCYGGY-nnnYCGRnARYCYGCAUUYACAAGGUnGRUnRCRYRAnnn-n3′ (SEQ ID NO: 795156), wherein “n” represents any nucleotide, “R” represents an A or G nucleotide, and “Y” represents a C or U nucleotide and wherein the bridgeRNA comprises the secondary structure 5′.....(((((((((((......))))))))))).((((((((((.(((...((((((...(((((....)))))..)))..)))....))))).))))))))...((.((((((((..(((((.((.((. ...((((((((.....)))))...))).....))...))))))))))))))))).3′, wherein matching parentheses “(” and “)” indicate base-paired nucleotides, and “.” indicate unpaired bases. In some embodiments, said bridgeRNA binds transposase IS621.

[0171] In some embodiments, the bridgeRNA comprises at least a target binding loop and a donor binding loop and is encoded by a sequence that is at least 50%, 55%, 60%, 65%, 70%, 75%, 80%, 85%, 90%, 91%, 92%, 93%, 94%, 95%, 96%, 97%, 98% or 99% identical to a bridgeRNA sequence of FIG. 15 (SEQ ID NOS: 1-348) or SEQ ID NOS: 349-10175. In some embodiments, the bridgeRNA comprises a sequence that is at least 50%, 55%, 60%, 65%, 70%, 75%, 80%, 85%, 90%, 91%, 92%, 93%, 94%, 95%, 96%, 97%, 98% or 99% identical to a bridgeRNA sequence of FIG. 15 (SEQ ID NOS: 1-348) or SEQ ID NOS: 349-10175.

[0172] In some embodiments, the bridgeRNA comprises a nucleotide sequence comprising any of the 5′ to 3′ sequences provided in FIG. 19, wherein “n” represents any nucleotide, “R” represents an A or G nucleotide, and “Y” represents a C or U nucleotide. In some embodiments, the bridgeRNA comprises a nucleotide sequence comprising any of the 5′ to 3′ sequences provided in FIG. 19, wherein “n” represents any nucleotide, “R” represents an A or G nucleotide, and “Y” represents a C or U nucleotide and wherein the bridgeRNA comprises the 5′ to 3′ secondary structure provided in the first row of secondary structure for said sequence provided in FIG. 19, wherein matching parentheses “(“and”)” indicate base-paired nucleotides, and “.” indicate unpaired bases. In some embodiments, the bridgeRNA comprises a nucleotide sequence comprising any of the 5′ to 3′ sequences provided in FIG. 19, wherein “n” represents any nucleotide, “R” represents an A or G nucleotide, and “Y” represents a C or U nucleotide and wherein the bridgeRNA comprises the 5′ to 3′ secondary structure provided in the second row of secondary structure for said sequence provided in FIG. 19, wherein matching parentheses “(“and”)” indicate base-paired nucleotides, and “.” indicate unpaired bases. In some embodiments, the bridgeRNA comprises a nucleotide sequence comprising any of the 5′ to 3′ sequences provided in FIG. 19, wherein “n” represents any nucleotide, “R” represents an A or G nucleotide, and “Y” represents a C or U nucleotide and wherein the bridgeRNA comprises the 5′ to 3′ secondary structure provided in the third row of secondary structure for said sequence provided in FIG. 19, wherein matching parentheses “(“and”)” indicate base-paired nucleotides, and “.” indicate unpaired bases. In some embodiments, the bridgeRNA comprises a nucleotide sequence comprising any of the 5′ to 3′ sequences provided in FIG. 19, wherein “n” represents any nucleotide, “R” represents an A or G nucleotide, and “Y” represents a C or U nucleotide and wherein the bridgeRNA comprises the 5′ to 3′ secondary structure provided in the fourth row of secondary structure for said sequence provided in FIG. 19, wherein matching parentheses “(“and”)” indicate base-paired nucleotides, and “.” indicate unpaired bases. In some embodiments, said bridgeRNA binds the IS110 transposase indicated after the “>” for said sequence provided in FIG. 19. In some embodiments, the nucleotide sequence or nucleotide sequence and secondary structure from FIG. 19 are for the bridgeRNAs of ISPa11, IsPa29, ISMmg1, ISPfl1, ISMae40, ISStma6, ISAzs32, ISMex9, ISCARN28, ISAar16, ISCps7, ISPpu9, ISRel9, ISEsa2, ISMma5, IS900, or ISHne5.

[0173] The target binding loop of the first stem-loop structure comprises a nucleotide sequence referred to as a left-target guide (LTG) and a nucleotide sequence referred to as a right-target guide (RTG). In some embodiments, the LTG and RTG sequences can be reprogrammed in order to bind to a target site of interest. See Section E. In some embodiments, the LTG and RTG sequences are not reprogrammed and the transpososome comprising such a bridgeRNA will target the wild-type target site sequence and identical sequences found in other organisms, or other sites that are similar to that site (e.g., sequences that are similar or identical to the wild-type target site sequence of the transposase). See Section E.

[0174] The donor binding loop of the second stem-loop structure comprises a nucleotide sequence referred to as a left-donor guide (LDG) and a nucleotide sequence referred to as a right-donor guide (RDG). In some embodiments, the LDG and RDG sequences can be reprogrammed in order to bind to a donor site sequence of interest. See Section E. In some embodiments, the LDG and RDG sequences are not reprogrammed and the transpososome comprising such a bridgeRNA will target the wild-type donor sequence and identical sequences found in other organisms, or other sites that are similar to that site (e.g., sequences that are similar or identical to the wild-type donor site sequence of the transposase). See Section E.

[0175] IS110 donor and target site specificity thus may be encoded by the nucleotide sequences of the bridgeRNA found within the target binding and donor binding loops. The sequence of at least one of the LTG, RTG, LDG, or RDG may be reprogrammed (relative to the wild-type IS110 bridgeRNA sequence) via substitutions, insertions, deletions, truncations, and extensions. See FIG. 4 and Section E. Advantageously, described herein is reprogramming of at least one of LTG, RTG, LDG, or RDG can impart specificity for any predefined sequence. BridgeRNA sequences may be reprogrammed via substitutions, insertions, deletions, truncations, and extensions. As described above, certain non-canonical base pairing, mismatch and/or non-contiguous tolerance within the target binding and/or donor binding loops may be acceptable.

[0176] In some embodiments, the bridgeRNA comprises a RNA molecule that comprises a stem-loop structure comprising at least one multi-branched loop comprising at least three stems. In some embodiments, the bridgeRNA comprises at least a first internal loop referred to as a target binding loop and comprising an RTG and LTG sequence and a second internal loop referred to as a donor binding loop comprising an RDG and LDG sequence. In some embodiments, the bridgeRNA comprises a RNA molecule that comprises a stem-loop structure comprising at least one multi-branched loop comprising at least three stems as depicted for Cluster 1 in FIG. 13. In Cluster 1 of FIG. 13 and in some embodiments, the stem-loop structure of the bridgeRNA comprises a multi-branched loop comprising a first stem, a second stem which comprises a stem-loop and an internal loop, and a third stem which comprises a stem-loop. The first stem, second stem, or third stem can include additional loops and bubbles. One or more of the loops (e.g., the multi-branched loop, or one or more internal loops, e.g., the internal loop of the second stem) may correspond to the target binding loop and donor binding loop and comprise nucleotide sequences corresponding to the RTG and LTG sequences and RDG and LDG sequences. In some embodiments, the internal loop of the second stem comprises a target binding loop and the multi-branched loop comprises a donor binding loop. See e.g., FIGS. 35A-B. As shown in Cluster 1 of FIG. 13 and in some embodiments, the bridgeRNA may further comprise an additional stem-loop structure 5′ to the multi-branched loop structure. In some embodiments, said bridgeRNA binds the transposase of ISPa11, ISPa29, ISMmg1, or ISPfl1. In some embodiments, the donor binding loop and/or target binding loops may form a stem or partial stem structure when not bound by a transposase and form a single stranded structure when bound to a transposase.

[0177] In some embodiments, the bridgeRNA comprises a RNA molecule that comprises a stem-loop structure comprising at least one multi-branched loop comprising at least three stems. In some embodiments, the bridgeRNA comprises at least a first internal loop referred to as a target binding loop and comprising an RTG and LTG sequence and a second internal loop referred to as a donor binding loop comprising an RDG and LDG sequence. In some embodiments, the bridgeRNA comprises a RNA molecule that comprises a stem-loop structure comprising at least one multi-branched loop comprising at least three stems as depicted for Cluster 3 in FIG. 13. In Cluster 3 of FIG. 13 and in some embodiments, the stem-loop structure of the bridgeRNA comprises a multi-branched loop comprising a first stem, a second stem which comprises a stem-loop and an internal loop, and a third stem which comprises a stem-loop. The first stem, second stem, or third stem can include additional loops and bubbles. One or more of the loops (e.g., the multi-branched loop, or one or more internal loops, e.g., the internal loop of the second stem) may correspond to the target binding loop and donor binding loop and comprise nucleotide sequences corresponding to the RTG and LTG sequences and RDG and LDG sequences. In some embodiments, the internal loop of the second stem comprises a target binding loop and the multi-branched loop comprises a donor binding loop. See e.g., FIGS. 35A-B. As shown in Cluster 3 of FIG. 13, the bridgeRNA further comprises an additional stem-loop structure 5′ to the multi-branched loop structure. In some embodiments, said bridgeRNA binds the transposase of ISAzs32 or ISMex9. In some embodiments, the donor binding loop and/or target binding loops may form a stem or partial stem structure when not bound by a transposase and form a single stranded structure when bound to a transposase.

[0178] In some embodiments, the bridgeRNA comprises a RNA molecule that comprises a stem-loop structure comprising at least one multi-branched loop comprising at least three stems. In some embodiments, the bridgeRNA comprises at least a first internal loop referred to as a target binding loop and comprising an RTG and LTG sequence and a second internal loop referred to as a donor binding loop comprising an RDG and LDG sequence. In some embodiments, the bridgeRNA comprises a RNA molecule that comprises a stem-loop structure comprising at least one multi-branched loop comprising at least three stems as depicted for Cluster 4 in FIG. 13. In Cluster 4 of FIG. 13 and in some embodiments, the stem-loop structure of the bridgeRNA comprises a multi-branched loop comprising a first stem, a second stem which comprises a stem-loop and an internal loop, and a third stem which comprises a stem-loop and an internal loop. The first stem, second stem, or third stem can include additional loops and bubbles. One or more of the loops (e.g., the multi-branched loop, or one or more internal loops, e.g., the internal loop of the second stem or internal loop of the third stem) may correspond to the target binding loop and donor binding loop and comprise nucleotide sequences corresponding to the RTG and LTG sequences and RDG and LDG sequences. In some embodiments, the internal loop of the second stem comprises a target binding loop and the internal loop of the third stem comprises a donor binding loop. See e.g., FIGS. 35A-B. In some embodiments, said bridgeRNA binds the transposase of ISCARN28. In some embodiments, the donor binding loop and/or target binding loops may form a stem or partial stem structure when not bound by a transposase and form a single stranded structure when bound to a transposase.

[0179] In some embodiments, the bridgeRNA comprises a RNA molecule that comprises a stem-loop structure comprising a clover-leaf like structure comprising at least three stem-loops. In some embodiments, the bridgeRNA comprises at least a first internal loop referred to as a target binding loop and comprising an RTG and LTG sequence and a second internal loop referred to as a donor binding loop comprising an RDG and LDG sequence. In some embodiments, the bridgeRNA comprises a RNA molecule that comprises a stem-loop structure comprising a clover-leaf like structure comprising at least three stem-loops as depicted for Cluster 5 or Cluster 12 in FIG. 13. In Cluster 5 or Cluster 12 of FIG. 13 and in some embodiments, the stem-loop structure of the bridgeRNA comprises a clover-leaf like structure comprising a first stem, a first stem-loop, a second stem-loop which comprises an internal loop, and a third stem-loop which comprises a an internal loop. The stems of the first stem, first stem-loop, second stem-loop, or third stem-loop can include additional loops and bubbles. One or more of the loops (e.g., the one or more internal loops, e.g., the internal loop of the second stem-loop or internal loop of the third stem-loop) may correspond to the target binding loop and donor binding loop and comprise nucleotide sequences corresponding to the RTG and LTG sequences and RDG and LDG sequences. In some embodiments, the internal loop of the second stem-loop comprises a target binding loop and the internal loop of the third stem-loop comprises a donor binding loop. See e.g., FIGS. 35A-B. In some embodiments, said bridgeRNA binds the transposase of ISAar16 or ISHne5. In some embodiments, the donor binding loop and/or target binding loops may form a stem or partial stem structure when not bound by a transposase and form a single stranded structure when bound to a transposase.

[0180] In some embodiments, the bridgeRNA comprises a RNA molecule that comprises a stem-loop structure comprising at least one multi-branched loop comprising at least three stems. In some embodiments, the bridgeRNA comprises at least a first internal loop referred to as a target binding loop and comprising an RTG and LTG sequence and a second internal loop referred to as a donor binding loop comprising an RDG and LDG sequence. In some embodiments, the bridgeRNA comprises a RNA molecule that comprises a stem-loop structure comprising at least one multi-branched loop comprising at least three stems as depicted for Cluster 6 in FIG. 13. In Cluster 6 of FIG. 13 and in some embodiments, the stem-loop structure of the bridgeRNA comprises a multi-branched loop comprising a first stem, a second stem which comprises a stem-loop, and a third stem which comprises a stem-loop and an internal loop. The first stem, second stem, or third stem can include additional loops and bubbles. One or more of the loops (e.g., the multi-branched loop, or one or more internal loops, e.g., the internal loop of the third stem) may correspond to the target binding loop and donor binding loop and comprise nucleotide sequences corresponding to the RTG and LTG sequences and RDG and LDG sequences. In some embodiments, the internal loop of the third stem comprises a target binding loop and the multi-branched loop comprises a donor binding loop. In some embodiments, said bridgeRNA binds the transposase of ISCps7. In some embodiments, the donor binding loop and/or target binding loops may form a stem or partial stem structure when not bound by a transposase and form a single stranded structure when bound to a transposase.

[0181] In some embodiments, the bridgeRNA comprises a RNA molecule that comprises a stem-loop structure comprising at least one multi-branched loop comprising at least three stems. In some embodiments, the bridgeRNA comprises at least a first internal loop referred to as a target binding loop and comprising an RTG and LTG sequence and a second internal loop referred to as a donor binding loop comprising an RDG and LDG sequence. In some embodiments, the bridgeRNA comprises a RNA molecule that comprises a stem-loop structure comprising at least one multi-branched loop comprising at least three stems as depicted for Cluster 7 in FIG. 13. In Cluster 7 of FIG. 13 and in some embodiments, the stem-loop structure of the bridgeRNA comprises a multi-branched loop comprising a first stem, a second stem which comprises a stem-loop and an internal loop, and a third stem which comprises a stem-loop and an internal loop. The first stem, second stem, or third stem can include additional loops and bubbles. One or more of the loops (e.g., the multi-branched loop, or one or more internal loops, e.g., the internal loop of the second stem or internal loop of the third stem) may correspond to the target binding loop and donor binding loop and comprise nucleotide sequences corresponding to the RTG and LTG sequences and RDG and LDG sequences. In some embodiments, the internal loop of the second stem comprises a target binding loop and the internal loop of the third stem comprises a donor binding loop. See e.g., FIGS. 35A-B. In some embodiments, said bridgeRNA binds the transposase of ISPpu9 or ISPpu10. In some embodiments, the donor binding loop and/or target binding loops may form a stem or partial stem structure when not bound by a transposase and form a single stranded structure when bound to a transposase.

[0182] In some embodiments, the bridgeRNA comprises a RNA molecule that comprises a stem-loop structure comprising at least one multi-branched loop comprising at least four stems and at least two stem-loop structures. In some embodiments, the bridgeRNA comprises at least a first internal loop referred to as a target binding loop and comprising an RTG and LTG sequence and a second internal loop referred to as a donor binding loop comprising an RDG and LDG sequence. In some embodiments, the bridgeRNA comprises a RNA molecule that comprises a stem-loop structure comprising at least one multi-branched loop comprising at least four stems and at least two stem-loop structures as depicted for Cluster 8 in FIG. 13. In Cluster 8 of FIG. 13 and in some embodiments, the stem-loop structure of the bridgeRNA comprises a first stem-loop, a second stem-loop comprising an internal loop, and a multi-branched loop comprising a first stem, a second stem which comprises a stem-loop, a third stem which comprises a stem-loop, and a fourth stem which comprises a stem-loop. The first stem-loop, second stem-loop, and stems of the first, second, third, or fourth stem of the multi-branched loop can include additional loops and bubbles. One or more of the loops (e.g., the multi-branched loop, or one or more internal loops, e.g., the internal loop of the second stem-loop) may correspond to the target binding loop and donor binding loop and comprise nucleotide sequences corresponding to the RTG and LTG sequences and RDG and LDG sequences. In some embodiments, the internal loop of the second stem comprises a target binding loop and the multi-branched loop comprises a donor binding loop. In some embodiments, said bridgeRNA binds the transposase of ISRel9. In some embodiments, the donor binding loop and/or target binding loops may form a stem or partial stem structure when not bound by a transposase and form a single stranded structure when bound to a transposase.

[0183] In some embodiments, the bridgeRNA comprises a RNA molecule that comprises at least three stem-loop structures. In some embodiments, the bridgeRNA comprises at least a first internal loop referred to as a target binding loop and comprising an RTG and LTG sequence and a second internal loop referred to as a donor binding loop comprising an RDG and LDG sequence. In some embodiments, the bridgeRNA comprises a RNA molecule that comprises a stem-loop structure comprising at least three stem-loop structures as depicted for Cluster 9 or Cluster 11 in FIG. 13. In Cluster 9 or Cluster 11 of FIG. 13 and in some embodiments, the bridgeRNA comprises a first stem-loop, a second stem-loop comprising an internal loop, and a third stem-loop comprising an internal loop. The first stem-loop, second stem-loop, or third stem-loop can include additional loops and bubbles. One or more of the loops (e.g., the internal loop of the second stem-loop and/or internal loop of the third stem-loop) may correspond to the target binding loop and donor binding loop and comprise nucleotide sequences corresponding to the RTG and LTG sequences and RDG and LDG sequences. In some embodiments, the internal loop of the second stem-loop comprises a target binding loop and the internal loop of the third stem-loop comprises a donor binding loop. In some embodiments, said bridgeRNA binds the transposase of ISEsa2 or IS900. In some embodiments, the donor binding loop and/or target binding loops may form a stem or partial stem structure when not bound by a transposase and form a single stranded structure when bound to a transposase.

[0184] In some embodiments, the bridgeRNA comprises a RNA molecule that comprises a stem-loop structure comprising at least one multi-branched loop comprising at least three stems. In some embodiments, the bridgeRNA comprises at least a first internal loop referred to as a target binding loop and comprising an RTG and LTG sequence and a second internal loop referred to as a donor binding loop comprising an RDG and LDG sequence. In some embodiments, the bridgeRNA comprises a RNA molecule that comprises a stem-loop structure comprising at least one multi-branched loop comprising at least three stems as depicted for Cluster 10 in FIG. 13. In Cluster 10 of FIG. 13 and in some embodiments, the stem-loop structure of the bridgeRNA comprises a multi-branched loop comprising a first stem, a second stem which comprises a stem-loop and an internal loop, and a third stem which comprises a stem-loop and an internal loop. The first stem, second stem, or third stem can include additional loops and bubbles. One or more of the loops (e.g., the multi-branched loop, or one or more internal loops, e.g., the internal loop of the second stem or internal loop of the third stem) may correspond to the target binding loop and donor binding loop and comprise nucleotide sequences corresponding to the RTG and LTG sequences and RDG and LDG sequences. In some embodiments, the internal loop of the second stem comprises a target binding loop and the internal loop of the third stem comprises a donor binding loop. In some embodiments, the internal loop of the second stem comprises a target binding loop and the multi-branched loop comprises a donor binding loop. In some embodiments, said bridgeRNA binds the transposase of ISMma5. In some embodiments, the donor binding loop and/or target binding loops may form a stem or partial stem structure when not bound by a transposase and form a single stranded structure when bound to a transposase.

[0185] With reference to any of the above bridgeRNAs, in some embodiments, the LTG and RTG sequences are fully complementary to their respective target site sequences of the target DNA. In some embodiments, the LTG and/or RTG are partially complementary to their respective target site sequences of the target DNA, i.e., there is non-canonical base pairing, mismatch and/or non-contiguous tolerance. In some embodiments, there is a single mismatch in the LTG or RTG nucleotide sequence. In some embodiments, there are two, three or four mismatches which can be in the LTG, in the RTG, or spread across the LTG and RTG. In some embodiments, the two, three or four mismatches are contiguous. In some embodiments, the two, three or four mismatches are non-contiguous. In some embodiments, there is a single non-canonical base pair in the LTG or RTG nucleotide sequence. In some embodiments, there are two, three or four non-canonical base pairs which can be in the LTG, in the RTG, or spread across the LTG and RTG. In some embodiments, the two, three or four non-canonical base pairs are contiguous. In some embodiments, the two, three or four non-canonical base pairs are non-contiguous. In some embodiments, the LDG and RDG nucleotide sequences are fully complementary to their respective donor site sequences of the donor DNA. In some embodiments, the LDG and/or RDG nucleotide sequences are partially complementary to their respective donor site sequences of the donor DNA, i.e., there is non-canonical base pairing, mismatch and/or non-contiguous tolerance. In some embodiments, there is a single mismatch in the LDG or RDG nucleotide sequence. In some embodiments, there are two, three, or four mismatches which can be in the LDG, in the RDG, or spread across the LDG and RDG. In some embodiments, the two, three, or four mismatches are contiguous. In some embodiments, the two, three, or four mismatches are non-contiguous. In some embodiments, there is a single non-canonical base pair in the LDG or RDG nucleotide sequence. In some embodiments, there are two, three, or four non-canonical base pairs which can be in the LDG, in the RDG, or spread across the LDG and RDG. In some embodiments, the two, three, or four non-canonical base pairs are contiguous. In some embodiments, the two, three, or four non-canonical base pairs are non-contiguous. In some embodiments, the non-canonical base pairing is non-Watson-Crick base pairing (i.e., is not a G-C base pair or A-T/U base pair). In some embodiments, the non-canonical base pairing is wobble base pairing. In some embodiments, the non-canonical base pairing is Hoogsteen base pairing. In some embodiments, the non-canonical base pairing comprises a rG-dT base pair, a rU-dG base pair, a rA-dC base pair, a rC-dA base pair, a rA-dG base pair, or a rG-dG base pair.

[0186] In some embodiments, the bridgeRNA comprises a RNA molecule that comprises a stem-loop structure comprising at least one multi-branched loop comprising at least three stems. In some embodiments, the bridgeRNA comprises at least a first internal loop referred to as a target binding loop and comprising an RTG and LTG sequence and a second internal loop referred to as a donor binding loop comprising an RDG and LDG sequence. In some embodiments, the bridgeRNA comprises a RNA molecule that comprises a stem-loop structure comprising at least one multi-branched loop comprising at least three stems as depicted for IS1111 transposases in FIG. 11B. In FIG. 11B and in some embodiments, the stem-loop structure of the bridgeRNA comprises a multi-branched loop comprising a first stem, a second stem which comprises a stem-loop and an internal loop, and a third stem which comprises a stem-loop and an internal loop. The first stem, second stem, or third stem can include additional loops and bubbles. One or more of the loops (e.g., the internal loop of the second stem and internal loop of the third stem) may correspond to the target binding loop and donor binding loop and comprise nucleotide sequences corresponding to the RTG and LTG sequences and RDG and LDG sequences. In some embodiments, the internal loop of the second stem comprises a target binding loop and the internal loop of the third stem comprises a donor binding loop. In some embodiments, said bridgeRNA binds the transposase of IS1111_229727. In some embodiments, the donor binding loop and/or target binding loops may form a stem or partial stem structure when not bound by a transposase and form a single stranded structure when bound to a transposase.

[0187] Thus, in some embodiments, the bridgeRNA comprises a nucleotide sequence comprising the following secondary structure: first stem-multi-branched loop-second stem comprising a stem-loop and an internal loop-third stem comprising a stem-loop and internal loop. In some embodiments, the bridgeRNA comprises additional stem-loop structures, bulges, and/or loops (see, e.g., FIG. 11B). In some embodiments, the bridgeRNA comprises a nucleotide sequence comprising 5′-[A]-[B]-[C]-[D]-[E]-[F]-[G]-[H]-[I]-[J]-[K]-[L]-[M]-[N]—[O]—[P]-[Q]-[R]—[S]-3′, wherein A is a first stem portion, B is a first portion of a multi-branched loop, C is second stem portion, D is a first side of an internal loop corresponding to a target binding loop, E is a third stem portion, F is a first loop portion, G is the reverse complement of E, H is a second side of the internal loop corresponding to the target binding loop, I is the reverse complement of C, J is a second portion of the multi-branched loop, K is a fourth stem portion, L is a first side of an internal loop corresponding to a donor binding loop, M is a fifth stem portion, N is a second loop portion, O is the reverse complement of M, P is a second side of the internal loop corresponding to the donor binding loop, Q is the reverse complement of K, R is a third portion of the multi-branched loop, and S is the reverse complement of A. In some embodiments, the reverse complement portions are not 100% complementary so that the stem structures may comprise one or more mismatches or bulges, or non-standard base-pairing may occur. In some embodiments, the first side of the internal loop corresponding to the target binding loop comprises a nucleotide sequence that is complementary to a first target site sequence of a target DNA (referred to as LTG) and the second side of the internal loop corresponding to the target binding loop comprises a second nucleotide sequence that is complementary to a second target site sequence which is on the opposite strand of the target DNA to the first target site sequence (referred to as RTG). In some embodiments, the first side of the internal loop corresponding to the donor binding loop comprises a nucleotide sequence that is complementary to a first donor site sequence of a donor DNA (referred to as LDG) and the second side of the internal loop corresponding to the donor binding loop comprises a second nucleotide sequence that is complementary to a second donor site sequence which is on the opposite strand of the donor DNA to the first target site sequence (referred to as RDG). In some embodiments, the stem structures may comprise one or more mismatches or bulges. In some embodiments, at least two portions of nucleotide sequence S are not complementary to the nucleotide sequence of portion A, so that the stem structure formed by base pairing between portion A and S comprises two bulges. In some embodiments, at least one portion of nucleotide sequence I is not complementary to the nucleotide sequence of portion C, so that the stem structure formed by base pairing between portion I and C comprises a bulge. In another embodiment, one or more nucleotides are present between the 5′ terminus and portion A. In another embodiment, one or more nucleotides are present between the 3′ terminus and portion S. In some embodiments, said bridgeRNA binds the transposase of IS1111_229727. In some embodiments, the donor binding loop and/or target binding loops may form a stem or partial stem structure when not bound by a transposase and form a single stranded structure when bound to a transposase.

[0188] Thus, in some embodiments, the bridgeRNA comprises a nucleotide sequence comprising the following secondary structure: first stem-multi-branched loop-second stem comprising a stem-loop and an internal loop-third stem comprising a stem-loop and internal loop. In some embodiments, the bridgeRNA comprises additional stem-loop structures, bulges, and/or loops (see, e.g., FIG. 11B). In some embodiments, the bridgeRNA comprises a nucleotide sequence comprising 5′-[A]-[B]-[C]-[D]-[E]-[F]-[G]-[H]-[I]-[J]-[K]-[L]-[M]-[N]—[O]—[P]-[Q]-[R]—[S]-3′, wherein A is a first stem portion, B is a first portion of a multi-branched loop, C is second stem portion, D is a first side of an internal loop corresponding to a donor binding loop, E is a third stem portion, F is a first loop portion, G is the reverse complement of E, H is a second side of the internal loop corresponding to the donor binding loop, I is the reverse complement of C, J is a second portion of the multi-branched loop, K is a fourth stem portion, L is a first side of an internal loop corresponding to a target binding loop, M is a fifth stem portion, N is a second loop portion, O is the reverse complement of M, P is a second side of the internal loop corresponding to the target binding loop, Q is the reverse complement of K, R is a third portion of the multi-branched loop, and S is the reverse complement of A. In some embodiments, the reverse complement portions are not 100% complementary so that the stem structures may comprise one or more mismatches or bulges, or non-standard base-pairing may occur. In some embodiments, the first side of the internal loop corresponding to the target binding loop comprises a nucleotide sequence that is complementary to a first target site sequence of a target DNA (referred to as LTG) and the second side of the internal loop corresponding to the target binding loop comprises a second nucleotide sequence that is complementary to a second target site sequence which is on the opposite strand of the target DNA to the first target site sequence (referred to as RTG). In some embodiments, the first side of the internal loop corresponding to the donor binding loop comprises a nucleotide sequence that is complementary to a first donor site sequence of a donor DNA (referred to as LDG) and the second side of the internal loop corresponding to the donor binding loop comprises a second nucleotide sequence that is complementary to a second donor site sequence which is on the opposite strand of the donor DNA to the first target site sequence (referred to as RDG). In some embodiments, the stem structures may comprise one or more mismatches or bulges. In some embodiments, at least two portions of nucleotide sequence S are not complementary to the nucleotide sequence of portion A, so that the stem structure formed by base pairing between portion A and S comprises two bulges. In some embodiments, at least one portion of nucleotide sequence I is not complementary to the nucleotide sequence of portion C, so that the stem structure formed by base pairing between portion I and C comprises a bulge. In another embodiment, one or more nucleotides are present between the 5′ terminus and portion A. In another embodiment, one or more nucleotides are present between the 3′ terminus and portion S. In some embodiments, said bridgeRNA binds the transposase of IS1111_229727. In some embodiments, the donor binding loop and/or target binding loops may form a stem or partial stem structure when not bound by a transposase and form a single stranded structure when bound to a transposase.

[0189] With reference to the above bridgeRNAs, in some embodiments, the LTG and RTG sequences are fully complementary to their respective target site sequences of the target DNA. In some embodiments, the LTG and/or RTG are partially complementary to their respective target site sequences of the target DNA, i.e., there is non-canonical base pairing, mismatch and/or non-contiguous tolerance. In some embodiments, there is a single mismatch in the LTG or RTG nucleotide sequence. In some embodiments, there are two, three or four mismatches which can be in the LTG, in the RTG, or spread across the LTG and RTG. In some embodiments, the two, three or four mismatches are contiguous. In some embodiments, the two, three or four mismatches are non-contiguous. In some embodiments, there is a single non-canonical base pair in the LTG or RTG nucleotide sequence. In some embodiments, there are two, three or four non-canonical base pairs which can be in the LTG, in the RTG, or spread across the LTG and RTG. In some embodiments, the two, three or four non-canonical base pairs are contiguous. In some embodiments, the two, three or four non-canonical base pairs are non-contiguous. In some embodiments, the LDG and RDG nucleotide sequences are fully complementary to their respective donor site sequences of the donor DNA. In some embodiments, the LDG and/or RDG nucleotide sequences are partially complementary to their respective donor site sequences of the donor DNA, i.e., there is non-canonical base pairing, mismatch and/or non-contiguous tolerance. In some embodiments, there is a single mismatch in the LDG or RDG nucleotide sequence. In some embodiments, there are two, three, or four mismatches which can be in the LDG, in the RDG, or spread across the LDG and RDG. In some embodiments, the two, three, or four mismatches are contiguous. In some embodiments, the two mismatches are non-contiguous. In some embodiments, there is a single non-canonical base pair in the LDG or RDG nucleotide sequence. In some embodiments, there are two, three, or four non-canonical base pairs which can be in the LDG, in the RDG, or spread across the LDG and RDG. In some embodiments, the two, three, or four non-canonical base pairs are contiguous. In some embodiments, the two, three, or four non-canonical base pairs are non-contiguous. In some embodiments, the non-canonical base pairing is non-Watson-Crick base pairing (i.e., is not a G-C base pair or A-T/U base pair). In some embodiments, the non-canonical base pairing is wobble base pairing. In some embodiments, the non-canonical base pairing is Hoogsteen base pairing. In some embodiments, the non-canonical base pairing comprises a rG-dT base pair, a rU-dG base pair, a rA-dC base pair, a rC-dA base pair, a rA-dG base pair, or a rG-dG base pair.

[0190] In certain aspects, described herein is bridgeRNA comprising means for directing the IS110 transposase to a polynucleotide comprising a donor or target site sequence. In some embodiments, the means for directing the IS110 transposase to a polynucleotide comprising a donor or target site sequence comprises a bridgeRNA sequence of FIG. 15 (SEQ ID NOS: 1-348) or SEQ ID NOS: 349-10175.

[0191] BridgeRNA sequence modification may be used to alter binding specificity between a bridgeRNA and an IS110 transposase. For example, bridgeRNA sequence modification may be used to increase affinity of the bridgeRNA for an IS110 transposase or IS110 transpososome.

[0192] In some embodiments, the one or more bridgeRNAs are transcribed from the non-coding ends of the IS110 elements, for example from an integrated element (core (if present)-LE-Transposase-RE-core (if present)), or the circular form of the IS110 element (Transposase-RE-core (if present)-LE). In some embodiments, one or more bridgeRNAs are transcribed from an engineered construct derived from the IS110 element non-coding ends. In some embodiments, one or more bridgeRNAs are transcribed from an engineered construct derived from the IS110 element non-coding ends and a 5′ or 3′ portion of the CDS. In some embodiments, one or more bridgeRNAs are transcribed from a nucleotide sequence comprising RE-core-LE. In some embodiments, one or more bridgeRNAs are transcribed from a nucleotide sequence comprising RE-core-LE, wherein RE-core-LE comprises an LE, core, and RE provided in FIG. 15 (SEQ ID NOS: 1-348), FIG. 17 (SEQ ID NOS: 30354-30529), or SEQ ID NOS: 349-10175 or 30530-40356. In some embodiments, one or more bridgeRNAs are transcribed from a nucleotide sequence comprising a portion of an RE-core-LE sequence. In some embodiments, one or more bridgeRNAs are transcribed from a nucleotide sequence comprising RE-LE. In some embodiments, one or more bridgeRNAs are transcribed from a nucleotide sequence comprising RE-LE, wherein RE-LE comprises an LE and RE provided in FIG. 15 (SEQ ID NOS: 1-348), FIG. 17 (SEQ ID NOS: 30354-30529), or SEQ ID NOS: 349-10175 or 30530-40356. In some embodiments, one or more bridgeRNAs are transcribed from a nucleotide sequence comprising a portion of an RE-LE sequence. In some embodiments, one or more bridgeRNAs are transcribed from a nucleotide sequence comprising LE. In some embodiments, LE comprises an LE provided in FIG. 15 (SEQ ID NOS: 1-348), FIG. 17 (SEQ ID NOS: 30354-30529), or SEQ ID NOS: 349-10175 or 30530-40356. In some embodiments, one or more bridgeRNAs are transcribed from a nucleotide sequence comprising a portion of an LE sequence. In some embodiments, one or more bridgeRNAs are transcribed from a nucleotide sequence comprising RE. In some embodiments, RE comprises an RE provided in FIG. 15 (SEQ ID NOS: 1-348), FIG. 17 (SEQ ID NOS: 30354-30529), or SEQ ID NOS: 349-10175 or 30530-40356. In some embodiments, one or more bridgeRNAs are transcribed from a nucleotide sequence comprising a portion of an RE sequence.

[0193] Any bridgeRNA described herein may comprise additional nucleotide portions, nucleotide linkers, loops, and modifications (e.g. structured RNA pseudoknots or other RNA structures) as is understood by a person skilled in the art.

[0194] Any bridgeRNA described herein may be expressed from linear or circular dsDNA or ssDNA or supplied as a synthetic RNA. When the bridgeRNA is encoded by an expression construct, the bridgeRNA coding sequence can be expressed from a suitable promoter, such as promoter derived from the non-coding ends of an IS110 member or from an ectopic promoter, such as a type III pol III promoter.

[0195] In one embodiment, the present invention contemplates an approach to engineering IS110 systems. Given the abundance and diversity of IS110 orthologs, taking different domains or sequences from closely or distantly related orthologs and creating new combinations could yield new IS110 systems with favorable enzymatic properties. In one embodiment, one IS110 ortholog may have a particular RuvC-like DEDD catalytic domain with high efficiency, and another IS110 may have a bridgeRNA with highly specific target and/or donor loops. These IS110 systems could be combined in such a way that takes advantage of the favorable properties of each. In another embodiment, the bridgeRNA binding subdomains of the RuvC-like DEDD catalytic domain and transposase domains may have an affinity for a particular bridgeRNA, and they may be swapped and combined with a related system to take advantage of the favorable properties of each. In another embodiment, two or more distinct bridgeRNA structures could be compared, and their subsequences and domains could be swapped to yield new bridgeRNA species with favorable properties.

[0196] For example, bridgeRNA structural models could be built using standard bioinformatic software packages such as Infernal (Nawrocki and Eddy 2013). These models could be searched against genomic sequence databases to identify bridgeRNA sequences, and the length and sequence of the guide subsequences of the predicted target and donor site binding loops for each candidate could be calculated. Candidate IS110 systems with especially long guides encoded within the target and/or donor binding loops could be prioritized for experimental characterization. In another embodiment, target loop sequences could be searched against nearby flanking sequences to identify complementary target sequences, and candidates with especially long matches between target sites and target binding loops could be prioritized for experimental characterization. In another embodiment, bridgeRNA donor binding loop sequences could be searched against IS110 terminal end sequences to identify complementary donor sequences, and candidates with especially long matches between target sites and bridgeRNA target binding loops could be prioritized for experimental characterization.

### E. Donor and Target Sites

[0197] The donor and target site sequences may be any sequence that can be bound by the transposase in concert with bridgeRNA. For example, the bridgeRNA target binding loop encodes a LTG and RTG which have base-pairing specificity for sequences of the target site, i.e., the left target (LT) and right target (RT) sequences, in a target molecule. In some embodiments, the bridgeRNA donor binding loop encodes a LDG and RDG which have base-pairing specificity for sequences of the donor site, i.e., the left donor (LD) and right donor (RD) sequences, in a donor molecule, thereby positioning the transposase to mediate site-specific transposition between the DNA molecules comprising the target site and donor sites. The target site sequence and the donor site sequence may be on the same or different molecules. The binding loops of the bridgeRNA may also bind the core sequences of the target site or donor site sequences. As described above, certain mismatch and/or non-contiguous tolerance between the LTG and RTG and the target site sequences and/or the LDG and RDG and the donor site sequences may be acceptable.

[0198] Described herein is the use of IS110 family transposases to mediate insertion, excisive recombination, and inversion reactions. The type of reaction mediated by the IS110 family transposase is a function of the orientation and DNA strand location of the LT and RT target site sequences and LD and RD donor site sequences as described below.

[0199] Described herein is the use of wild-type bridgeRNAs or a bridgeRNA comprising a wild-type donor binding loop and/or target binding loop to mediate recombination between DNA sequences containing the wild-type target and donor site sequences. For example, where a donor site sequence for any of the IS110 family transposases described herein (see e.g., FIG. 17 (SEQ ID NOS: 30354-30529) or SEQ ID NOS: 30530-40356) is present on a DNA molecule and a corresponding target site sequence (see e.g., FIG. 18 (SEQ ID NOS: 20351-20526) or SEQ ID NOS: 20527-30353) is present on a DNA molecule, expression of said IS110 family transposase and corresponding bridgeRNA can result in insertion, excisive recombination, or inversion.

[0200] In some embodiments, wild-type bridgeRNAs or a bridgeRNA comprising a wild-type donor binding loop and target binding loop can be used to mediate an insertion, excisive recombination, or inversion reaction between DNA sequences containing the wild-type target site sequence and wild-type donor site sequence.

[0201] Also described herein, is reprogramming of bridgeRNA donor binding loop and/or target binding loop sequences to mediate transposition between DNA sequences of interest.

[0202] In some embodiments, a bridgeRNA comprising a wild-type donor binding loop can be used in combination with a reprogrammed target binding loop to mediate an insertion, excisive recombination, or inversion reaction between DNA sequences containing the wild-type donor site sequence and a target site sequence of interest. In some embodiments, a bridgeRNA comprising a reprogrammed donor binding loop can be used in combination with a wild-type target binding loop to mediate an insertion reaction between DNA sequences containing a donor site sequence of interest and the wild-type target site sequence.

[0203] In some embodiments, a bridgeRNA comprising a reprogrammed donor binding loop can be used in combination with a reprogrammed target binding loop to mediate an insertion reaction between DNA sequences containing a donor site sequence of interest and a target site sequence of interest.

[0204] In some embodiments, different bridgeRNAs (in combination with the same or different transposases) can be used to target more than one target site sequence or donor site sequence simultaneously.

### E.1. Insertion Reaction

[0205] To mediate insertion reactions, the target site and donor site sequences are present on separate DNA molecules. In the case that the donor site sequence is arranged on a circular DNA molecule, the transposition reaction functionally results in insertion of the circular DNA molecule that contains the donor site sequence into the target site sequence of the second DNA molecule. In the case that the target site sequence is arranged on a circular DNA molecule, the transposition reaction functionally results in insertion of the circular DNA molecule containing the target site sequence into the donor site sequence of the second DNA molecule. In the case that both the donor site sequence and target site sequence are on linear DNA molecules, the transposition reaction functionally results in insertion of the linear DNA molecule that contains the donor site sequence into the target site sequence of the second DNA molecule, the double stranded break that occurs after recombination with a linear DNA molecule is repaired by endogenous DNA repair pathways, such as non-homologous end joining. In the case that both the donor site sequence and target site sequence are on different linear chromosomes, the transposition reaction functionally results to effectuate chromosomal translocation without a double stranded break.

[0206] In embodiments where a core sequence is not present, to mediate insertion, the sequence of the LTG of the target binding loop in the 5′ to 3′ direction is complementary to a first strand of a target site sequence. The sequence of the RTG of the target binding loop in the 5′ to 3′ direction is the reverse complement to the opposite strand to the first strand of the target site sequence with the 3′ end of the RTG reverse complementary to the nucleotide immediately following the target site sequence complementary to the LTG. In some embodiments, the sequence of the RTG of the target binding loop in the 5′ to 3′ direction is the reverse complement to the opposite strand to the first strand of the target site sequence with the 3′ end of the RTG reverse complementary to the second or third nucleotide immediately following the target site sequence complementary to the LTG (i.e., there is 1-2 nucleotide gap between where LTG and RTG bind). The sequence of the LDG of the donor binding loop in the 5′ to 3′ direction is complementary to a first strand of the donor site sequence. The sequence of the RDG in the 5′ to 3′ direction is the reverse complement to the opposite strand to the first strand of the donor site sequence with the 3′ end of the RDG reverse complementary to the nucleotide immediately following the donor site sequence complementary to the LDG. In some embodiments, the sequence of the RDG in the 5′ to 3′ direction is the reverse complement to the opposite strand to the first strand of the donor site sequence with the 3′ end of the RDG reverse complementary to the second or third nucleotide immediately following the donor site sequence complementary to the LDG (i.e., there is 1-2 nucleotide gap between where LDG and RDG bind).

[0207] In some embodiments where a core sequence is present, to mediate insertion, the sequence of the LTG of the target binding loop in the 5′ to 3′ direction is complementary to a first strand of a target site sequence with the 3′ end of the LTG complementary to at least one of the nucleotides of the core sequence on the first strand of the target site sequence. The sequence of the RTG in the 5′ to 3′ direction is the reverse complement to the opposite strand to the first strand of the target site sequence with the 3′ end of the RTG reverse complementary to at least one of the nucleotides of the core sequence on the opposite strand to the first strand of the target site sequence. In some embodiments, there is 1-2 nucleotide gap between where LTG and RTG bind. The sequence of the LDG in the 5′ to 3′ direction is complementary to a first strand of the donor site sequence with the 3′ end of the LDG complementary to at least one of the nucleotides of the core sequence on the first strand of the donor site sequence. The sequence of the RDG in the 5′ to 3′ direction is the reverse complement to the opposite strand to the first strand of the donor site sequence with the 3′ end of the RDG reverse complementary to at least one of the nucleotides of the core sequence on the opposite strand to the first of the donor site sequence. In some embodiments, there is 1-2 nucleotide gap between where LDG and RDG bind. See FIG. 4, FIG. 35B.

[0208] In some embodiments where a core sequence is present, to mediate insertion, the sequence of the LTG of the target binding loop in the 5′ to 3′ direction is complementary to a first strand of a target site sequence. The sequence of the RTG in the 5′ to 3′ direction is the reverse complement to the opposite strand to the first strand of the target site sequence. The sequence of the LDG in the 5′ to 3′ direction is complementary to the first strand of the donor site sequence. The sequence of the RDG in the 5′ to 3′ direction is the reverse complement to the opposite strand to the first strand of the donor site sequence. Thus, in this embodiment, the RTG, LTG, RDG, and LDG do not bind to the core sequence even though it is present. In some embodiments, one or more of RTG, LTG, RDG, and LDG can be complementary to at least one of the nucleotides of the core sequence. See e.g., FIG. 35B. Furthermore, in some embodiments, there is 1-2 nucleotide gap between where LDG and RDG bind and/or between where LTG and RTG bind. In some embodiments, a bridgeRNA has been engineered or modified so that one or more of the RTG, LTG, RDG, and LDG no longer bind to the core sequence even though it is present in the donor and target site sequences. For example, a naturally occurring bridgeRNA wherein one or more of the RTG, LTG, RDG, and LDG bind to the core sequence can be modified so that the one or more of the RTG, LTG, RDG, and LDG no longer bind to the core sequence even though it is remains present in the donor and target site sequences. Such an approach can increase the binding specificity of the bridgeRNA for the donor site sequence and/or target site sequence. See e.g., FIG. 40A-D.

[0209] In any of the above embodiments, the LTG and RTG sequences are fully complementary to their respective target site sequences of the target DNA. In some embodiments, the LTG and/or RTG are partially complementary to their respective target site sequences of the target DNA, i.e., there is non-canonical base pairing, mismatch and/or non-contiguous tolerance. In some embodiments, there is a single mismatch in the LTG or RTG nucleotide sequence. In some embodiments, there are two, three or four mismatches which can be in the LTG, in the RTG, or spread across the LTG and RTG. In some embodiments, the two, three or four mismatches are contiguous. In some embodiments, the two, three or four mismatches are non-contiguous. In some embodiments, there is a single non-canonical base pair in the LTG or RTG nucleotide sequence. In some embodiments, there are two, three or four non-canonical base pairs which can be in the LTG, in the RTG, or spread across the LTG and RTG. In some embodiments, the two, three or four non-canonical base pairs are contiguous. In some embodiments, the two, three or four non-canonical base pairs are non-contiguous. In some embodiments, the LDG and RDG nucleotide sequences are fully complementary to their respective donor site sequences of the donor DNA. In some embodiments, the LDG and/or RDG nucleotide sequences are partially complementary to their respective donor site sequences of the donor DNA, i.e., there is non-canonical base pairing, mismatch and/or non-contiguous tolerance. In some embodiments, there is a single mismatch in the LDG or RDG nucleotide sequence. In some embodiments, there are two, three, or four mismatches which can be in the LDG, in the RDG, or spread across the LDG and RDG. In some embodiments, the two, three, or four mismatches are contiguous. In some embodiments, the two, three, or four mismatches are non-contiguous. In some embodiments, there is a single non-canonical base pair in the LDG or RDG nucleotide sequence. In some embodiments, there are two, three, or four non-canonical base pairs which can be in the LDG, in the RDG, or spread across the LDG and RDG. In some embodiments, the two, three, or four non-canonical base pairs are contiguous. In some embodiments, the two, three, or four non-canonical base pairs are non-contiguous. In some embodiments, the non-canonical base pairing is non-Watson-Crick base pairing (i.e., is not a G-C base pair or A-T/U base pair). In some embodiments, the non-canonical base pairing is wobble base pairing. In some embodiments, the non-canonical base pairing is Hoogsteen base pairing. In some embodiments, the non-canonical base pairing comprises a rG-dT base pair, a rU-dG base pair, a rA-dC base pair, a rC-dA base pair, a rA-dG base pair, or a rG-dG base pair.

[0210] In some embodiments, it is not necessary to define the sequences of the donor site and/or target site or LT, RT, LD, and RD (and, therefore, LTG, RTG, LDG, and RDG). Instead an insertion reaction can be mediated between a DNA molecule comprising a donor site comprising wild-type RE-LE or a subsequence thereof, or, where core is used, RE-core-LE or a subsequence thereof of any of the IS110 family transposases described herein (see FIG. 15 (SEQ ID NOS: 1-348), FIG. 17 (SEQ ID NOS: 30354-30529), or SEQ ID NOS: 349-10175 or 30530-40356) and a DNA molecule comprising a target sequence comprising LF-RF or a subsequence thereof, or where core is used, LF-core-RF of any of the IS110 family transposases described herein (see FIG. 18 (SEQ ID NOS: 20351-20526), or SEQ ID NOS: 20527-30353) by providing the IS110 family transposase and its corresponding bridgeRNA. It is also not necessary to define the sequence of the bridgeRNA since bridgeRNA is encoded in LE or RE. Thus, in some embodiments, bridgeRNA sequence can be provided by providing the nucleotide sequence of LE or RE.

[0211] For insertion reactions described herein, the system may further comprise one or more polynucleotides for insertion (e.g., for insertion into a target site) comprising a cargo and a donor site sequence. In another embodiment, the system further comprises one or more polynucleotides for insertion (e.g., for insertion into a donor site) comprising a cargo sequence and a target site sequence. In some embodiments, the polynucleotide for insertion is circular. In some embodiments, the polynucleotide for insertion is linear. When a polynucleotide for insertion is linear, the double stranded break that occurs after recombination with a linear DNA molecule is repaired by endogenous DNA repair pathways, such as non-homologous end joining.

[0212] For insertion reactions that result in cassette exchange (e.g., recombinase mediated cassette exchange (RMCE)), in some embodiments, the one or more polynucleotides for insertion further comprises a second donor site sequence that is different from the first donor site sequence (i.e., the one or more polynucleotides for insertion comprises two donor site sequences). In some embodiments, the one or more polynucleotides for insertion further comprises a target site sequence that corresponds to a different donor site from the first donor site sequence (i.e., the one or more polynucleotides for insertion comprises a donor site sequence and a target site sequence). In some embodiments, the one or more polynucleotides for insertion further comprises a second target site sequence that is different from the first target site sequence (i.e., the one or more polynucleotides for insertion comprises two target site sequences). In some embodiments, the one or more polynucleotides for insertion further comprises a donor site sequence that corresponds to a different target site from the first target site sequence (i.e., the one or more polynucleotides for insertion comprises a donor site sequence and a target site sequence). In such embodiments, the system comprises a transposase with a first bridgeRNA that targets the first donor or target site sequence and a transposase with a second bridgeRNA that targets the second donor or target site sequence. In some embodiments, the transposase bound to the first bridgeRNA and second bridgeRNA are the same type, e.g. IS621. In some embodiments, the transposase bound to the first bridgeRNA and second bridgeRNA are different transposases.

[0213] In some embodiments, the system comprises components that effectuate at least two (and in some embodiments more than two) desired reactions. A polynucleotide for insertion comprising a cargo, a donor site sequence and a target site sequence, for example on a plasmid, is recombined using a bridgeRNA that targets the donor and target site sequences to create two mini circles, one with a LT-RD junction and the other with an LD-RT junction. A second bridgeRNA, that comprises a binding loop that has specificity for the newly formed LT-RD or LD-RT and a binding loop that targets a site in a genome of interest, binds the mini circle and integrates it into a target site sequence, such as into a genome of interest. Thus, for such insertion reactions, in some embodiments, the system may comprise one or more first circular polynucleotides (e.g. a plasmid) comprising a cargo, a first donor site sequence comprising LD and RD sequences, and a second target site sequence comprising LT and RT sequences. In some embodiments, the system further comprises a transposase with a first bridgeRNA that targets the first donor site sequence and the first target site sequence on the first polynucleotide and a second bridgeRNA that targets a second donor site sequence and a second target site sequence, wherein the second donor site sequence comprises LT of the first target site sequence and RD of the first donor site or LD of the first donor site and RT of the first target site and the second target site sequence is a site in a target of interest (e.g., a genome). The second bridgeRNA can target the second donor site sequence using a donor binding loop (i.e., a donor binding loop of the second bridgeRNA targets the second donor site sequence) or a target binding loop (i.e., a target binding loop of the second bridgeRNA targets the second donor site sequence) as long as the other loop targets the site of interest (e.g., a genome). In some embodiments, the system results in the recombination of the donor site sequence and target site sequence of the first polynucleotide to create a first minicircle comprising a LT-RD junction and a second minicircle with a LD-RT junction. Depending on the orientation of the cargo, the first donor site sequence and the first target site sequence, either the first minicircle comprises the cargo or the second minicircle comprises the cargo and the second bridgeRNA targets whichever minicircle comprises the cargo. In some embodiments, the system results in the recombination of the either the first or second minicircle, whichever comprises the cargo, with the site of interest to result in the cargo inserted at the site of interest.

[0214] In some embodiments, the first circular polynucleotide further comprises a second cargo and the system further comprises a third bridgeRNA that targets a third donor site sequence and a third target site sequence, wherein the third donor site sequence comprises LT of the first target site sequence and RD of the first donor site or LD of the first donor site and RT of the first target site (e.g., whichever of LT-RD or LD-RT not targeted by the second bridgeRNA) and the second target site sequence is a second site in a target of interest (e.g., a genome). The third bridgeRNA can target the third donor site sequence using a donor binding loop (i.e., a donor binding loop of the third bridgeRNA targets the third donor site sequence) or a target binding loop (i.e., a target binding loop of the third bridgeRNA targets the third donor site sequence) as long as the other loop targets the second site of interest (e.g., a genome). In some embodiments, the system results in the recombination of the donor site sequence and target site sequence of the first polynucleotide to create a first minicircle comprising a LT-RD junction and either the first cargo and a second minicircle with a LD-RT junction and either the second cargo, or vice versa (e.g., second cargo comprised on the minicircle with LT-RD junction and first cargo comprised on the minicircle with LD-RT junction). In some embodiments, the system results in the recombination of the first minicircle with the first site in a target of interest and recombination of the second minicircle with the second site in a target of interest, or vice versa, with the site of interest to result in the first cargo and second cargos inserted at the respective sites of interest.

[0215] In some embodiments, in the system comprising one or more polynucleotides for insertion comprising a cargo and a donor site sequence, the cargo sequence is oriented in the 5′ to 3′ direction relative to the donor site sequence. In some embodiments, in the system comprising one or more polynucleotides for insertion comprising a cargo and a donor site, the cargo sequence is oriented in the 3′ to 5′ direction relative to the donor site sequence. In some embodiments, in the system comprising one or more polynucleotides for insertion comprising a cargo and two donor site sequences, the cargo sequence is oriented in the 5′ to 3′ direction between the two donor site sequences. In some embodiments, in the system comprising one or more polynucleotides for insertion comprising a cargo and two donor site sequences, the cargo sequence is oriented in the 3′ to 5′ direction between the two donor site sequences. In some embodiments, in the system comprising one or more polynucleotides for insertion comprising a cargo and a donor site sequence and a target site sequence that corresponds to a different donor site, the cargo sequence is oriented in the 5′ to 3′ direction between the donor site sequence and target site sequence. In some embodiments, in the system comprising one or more polynucleotides for insertion comprising a cargo and a donor site sequence and a target site sequence that corresponds to a different donor site, the cargo sequence is oriented in the 3′ to 5′ direction between the donor site sequence and target site sequence.

[0216] In some embodiments, in the system comprising one or more polynucleotides for insertion comprising a cargo and a target site sequence, the cargo sequence is oriented in the 5′ to 3′ direction relative to the target site sequence. In some embodiments, in the system comprising one or more polynucleotides for insertion comprising a cargo and a target site sequence, the cargo sequence is oriented in the 3′ to 5′ direction relative to the target site sequence. In some embodiments, in the system comprising one or more polynucleotides for insertion comprising a cargo and two target site sequences, the cargo sequence is oriented in the 5′ to 3′ direction between the two target site sequences. In some embodiments, in the system comprising one or more polynucleotides for insertion comprising a cargo and two target site sequences, the cargo sequence is oriented in the 3′ to 5′ direction between the two target site sequences. In some embodiments, in the system comprising one or more polynucleotides for insertion comprising a cargo and a target site sequence and a donor site sequence that corresponds to a different target site, the cargo sequence is oriented in the 5′ to 3′ direction between the target site sequence and donor site sequence. In some embodiments, in the system comprising one or more polynucleotides for insertion comprising a cargo and target site sequences and donor site sequence, the cargo sequence is oriented in the 3′ to 5′ direction between the target site sequences and donor site sequence.

[0217] A polynucleotide for insertion may be an equivalent of a transposable element that can be inserted or integrated to a target site sequence or donor site sequence. The polynucleotide for insertion may be or comprise one or more components of a transposon.

[0218] The cargo of a polynucleotide for insertion may comprise any type of polynucleotide, including, but not limited to, a gene, a gene fragment, a non-coding polynucleotide, a regulatory polynucleotide, or a synthetic polynucleotide.

[0219] The polynucleotide for insertion may include a transposon left end (LE) and transposon right end (RE). The LE or RE sequences may be endogenous sequences for the IS110 used or may be heterologous sequences recognizable by the IS110 used, or may be synthetic sequences that comprise a sequence or structure feature recognized by the IS110 and sufficient to allow insertion of the polynucleotide into the target site sequence. In certain example embodiments, the LE or RE sequences are truncated. In certain example embodiments, the LE or RE sequences may be between 20-500 base pairs, between 500-490 base pairs, between 500-480 base pairs, between 500-470 base pairs, between 500-460 base pairs, between 500-450 base pairs, between 500-440 base pairs, between 500-430 base pairs, between 500-420 base pairs, between 500-410 base pairs, between 500-400 base pairs, between 400-390 base pairs, between 400-380 base pairs, between 400-370 base pairs, between 400-360 base pairs, between 400-350 base pairs, between 400-340 base pairs, between 400-330 base pairs, between 400-320 base pairs, between 400-310 base pairs, between 400-300 base pairs, between 300-290 base pairs, between 300-280 base pairs, between 300-270 base pairs, between 300-260 base pairs, between 300-250 base pairs, between 300-240 base pairs, between 300-230 base pairs, between 300-220 base pairs, between 300-210 base pairs, between 300-200 base pairs, between 200-100 base pairs, between 100-190 base pairs, 100-180 base pairs, 100-170 base pairs, 100-160 base pairs, 100-150 base pairs, 100-140 base pairs, 100-130 base pairs, 100-120 base pairs, 100-110 base pairs, 20-100 base pairs, 20-90 base pairs, 20-80 base pairs, 20-70 base pairs, 20-60 base pairs, 20-50 base pairs, 20-40 base pairs, 20-30 base pairs, 50 to 100 base pairs, 60-100 base pairs, 70-100 base pairs, 80-100 base pairs, or 90-100 base pairs in length. In some embodiments, the polynucleotide for insertion may include a transposon LD and transposon RD.

[0220] The polynucleotide for insertion may include a transposon left flank (LF) and transposon right flank (RF). The LF or RF sequences may be endogenous sequences for the IS110 used or may be heterologous sequences recognizable by the IS110 used, or may be synthetic sequences that comprise a sequence or structure feature recognized by the IS110 and sufficient to allow insertion of the polynucleotide into the donor site. In certain example embodiments, the LF or RF sequences are truncated. In certain example embodiments, the LF or RF sequences may be between 20-500 base pairs, between 500-490 base pairs, between 500-480 base pairs, between 500-470 base pairs, between 500-460 base pairs, between 500-450 base pairs, between 500-440 base pairs, between 500-430 base pairs, between 500-420 base pairs, between 500-410 base pairs, between 500-400 base pairs, between 400-390 base pairs, between 400-380 base pairs, between 400-370 base pairs, between 400-360 base pairs, between 400-350 base pairs, between 400-340 base pairs, between 400-330 base pairs, between 400-320 base pairs, between 400-310 base pairs, between 400-300 base pairs, between 300-290 base pairs, between 300-280 base pairs, between 300-270 base pairs, between 300-260 base pairs, between 300-250 base pairs, between 300-240 base pairs, between 300-230 base pairs, between 300-220 base pairs, between 300-210 base pairs, between 300-200 base pairs, between 200-100 base pairs, between 100-190 base pairs, 100-180 base pairs, 100-170 base pairs, 100-160 base pairs, 100-150 base pairs, 100-140 base pairs, 100-130 base pairs, 100-120 base pairs, 100-110 base pairs, 20-100 base pairs, 20-90 base pairs, 20-80 base pairs, 20-70 base pairs, 20-60 base pairs, 20-50 base pairs, 20-40 base pairs, 20-30 base pairs, 50 to 100 base pairs, 60-100 base pairs, 70-100 base pairs, 80-100 base pairs, or 90-100 base pairs in length. In some embodiment, the polynucleotide for insertion may include a transposon LT and transposon RT.

[0221] The term “cargo”, “cargo gene” or “cargo sequence” as used herein, refers to a gene or nucleic acid sequence that may be integrated via transposition into a target site sequence or donor site sequence. The term “cargo(es) to be delivered”, “cargo gene(s) to be delivered” or “cargo sequence(s) to be delivered” refers to any gene, system of genes, regulatory sequences, or sequences that can be delivered to and integrated into a target site sequence or donor site sequence via transposition events. In some embodiments, the cargo gene or sequence is to be delivered to a target cell in vitro, in vivo, or ex vivo.

[0222] In some embodiments, the cargo gene or sequence to be delivered is a biologically active agent, i.e., it has activity in a cell, organ, tissue, and/or subject. For instance, a gene or sequence that, when administered to a subject, has a biological effect on that subject, is considered to be biologically active. In some embodiments, a cargo gene or sequence to be delivered is a therapeutic agent. As used herein, the term “therapeutic agent” refers to any agent that, when administered to a subject, has a beneficial effect. In some embodiments, the cargo gene or sequence to be delivered to a cell is a transcription factor, a tumor suppressor, a developmental regulator, a growth factor, a metastasis suppressor, a pro-apoptotic protein, a nuclease, or a recombinase. In some embodiments, the cargo gene or sequence to be encodes for a protein, some non-limiting examples include, p53, Rb (retinoblastoma protein), BRCA1, BRCA2, PTEN, APC, CD95, ST7, ST14, a BCL-2 family protein, a caspase; BRMS1, CRSP3, DRG1, KAI1, KISS1, NM23, a TIMP-family protein, a BMP-family growth factor, EGF, EPO, FGF, G-CSF, GM-CSF, a GDF-family growth factor, HGF, HDGF, IGF, PDGF, TPO, TGF-α, TGF-β, VEGF; a zinc finger nuclease, Cre, Dre, or FLP recombinase. In some embodiments, the cargo gene or sequence is associated with a small molecule. In some embodiments, the cargo gene or sequence to be delivered is a diagnostic agent. In some embodiments, the cargo gene or sequence to be delivered is a prophylactic agent. In some embodiments, the cargo gene or sequence to be delivered is useful as an imaging agent. In some embodiments, the diagnostic or imaging agent is, and in others it is not, biologically active.

[0223] In some embodiments, the polynucleotide for insertion comprises from 11 bases (b) or base pairs (bp) to about 100 kilobases (kb) or kilobase pairs (kbp) in length or higher (e.g., from about 17, 18, 19, 20, 21, 22, 23, 24, 25, 26, 27, 28, 29, 30, 31, 32, 33, 34, 35, 36, 37, 38, 39, 40, 41, 42, 43, 44, 45, 46, 47, 48, 49, 50, 75, or 100 b or bp to about 110, 120, 125, 150, 200, 225, 250, 275, 300, 325, 350, 375, 400, 425, 450, 475, 500, 525, 550, 575, 600, 650, 700, 750, 800, 850, 900, 950, 1000, 1250, 1500, 1750, 2000, 2250, 2500, 2750, 3000, 3250, 3500, 3750, 4000, 4250, 4500, 4750, 5000, 5500, 6000, 6500, 7000, 7500, 8000, 8500, 9000, 9500, 10,000, 10,500, 11,000, 11,500, 12,000, 12,500, 13,000, 13,500, 14,000, 14,500, 15,000, 16,000, 17,000, 18,000, 19,000, 20,000, 21,000, 22,000, 23,000, 24,000, 25,000, 26,000, 27,000, 28,000, 29,000 30,000, 40,000, 50,000, 60,000, 70,000, 80,000, 90,000, or 100,000 b or bp in length) with the upper limit corresponding to the delivery limit for delivering the polynucleotide for insertion into a cell of interest.

[0224] Polynucleotide for insertion can be delivered as dsDNA, or as ssDNA or RNA if cellular machinery, or additional components are delivered, to make these molecules into dsDNA. Polynucleotides can be provided in the form of a circular or linearized plasmid or as a component of a vector (e.g., as a component of a viral vector), or an amplification or polymerization product thereof. Shorter DNA molecules can be provided as double stranded oligonucleotides. Exemplary double-stranded template oligonucleotides are, or are least about 15, 16, 17, 18, 19, 20, 21, 22, 23, 24, 25, 26, 27, 28, 29, 30, 31, 32, 33, 34, 35, 36, 37, 38, 39, 40, 41, 42, 43, 44, 45, 46, 47, 48, 49, 50, 51, 52, 53, 54, 55, 56, 57, 58, 59, 60, 61, 62, 63, 64, 65, 66, 67, 68, 69, 70, 71, 72, 73, 74, 75, 76, 77, 78, 79, 80, 81, 82, 83, 84, 85, 86, 87, 88, 89, 90, 91, 92, 93, 94, 95, 96, 97, 98, 99, 100, 110, 115, 120, 125, 150, 175, 200, 225, or 250 b or bp in length. The polynucleotide for insertion can be provided in the reaction mixture for introduction into the cell at a concentration of from about 1 μM to about 200 μM, from about 2 μM to about 190 μM, from about 2 μM to about 180 μM, from about 5 μM to about 180 μM, from about 9 μM to about 180 μM, from about 10 μM to about 150 μM, from about 20 μM to about 140 μM, from about 30 μM to about 130 μM, from about 40 μM to about 120 μM, or from about 45 or 50 μM to about 90 or 100 μM. In some cases, the donor DNA can be provided in the reaction mixture for introduction into the cell at a concentration of, or of about, 1 μM, 2 μM, 3 μM, 4 μM, 5 μM, 6 μM, 7 μM, 8 μM, 9 μM, 10 μM, 11 μM, 12 μM, 13 μM, 14 μM, 15 μM, 16 μM, 17 μM, 18 μM, 19 μM, 20 μM, 25 μM, 30 μM, 35 μM, 40 μM, 45 μM, 50 μM, 55 μM, 60 μM, 70 μM, 80 μM, 90 μM, 100 μM, 110 μM, 115 μM, 120 μM, 130 μM, 140 μM, 150 μM, 160 μM, 170 μM, 180 μM, 190 μM, 200 μM, or more.

[0225] The polynucleotide for insertion can contain a wide variety of different sequences. In some cases, the polynucleotide encodes a stop codon, or frame shift, as compared to the target genomic region prior to insertion. Such a polynucleotide can be useful for knocking out or inactivating a gene or portion thereof. In some cases, the polynucleotide encodes one or more missense mutations or in-frame insertions or deletions as compared to the target genomic region. Such a polynucleotide can be useful for altering the expression level or activity (e.g., ligand specificity) of a target gene or portion thereof.

[0226] As described above, a polynucleotide for insertion comprises a donor site sequence and/or target site sequence for insertion into a DNA sequence comprising a target site sequence and/or donor site sequence, respectively. The target site sequence and/or donor site sequence for insertion into can be located on any polynucleotide sequence of interest, including, but not limited to genomic DNA and plasmids. In some embodiments, the target site sequence and/or donor site sequence for insertion into is a polynucleotide sequence present in the genome or DNA of interest. In some embodiments the target site sequence and/or donor site sequence naturally occurs in the genome or DNA of interest. In some embodiments, the target site sequence and/or donor site sequence for insertion into is introduced into the genome or a DNA of interest. Methods of introducing DNA sequences, such as the target site sequence or donor site sequence, into a genome or DNA of interest are known in the art and include, but are not limited to, CRISPR-Cas9, homology directed repair (HDR), transposases, integrases, etc. In some embodiments, the genomic DNA is located in a cell. In some embodiments, the cell is a eukaryotic cell. In some embodiments, the cell is prokaryotic. In some embodiments, the cell is a mammalian cell. In some embodiments, the cell is a human cell. In some embodiments, the cell is a mouse cell. In some embodiments, the cell is a stem cell.

[0227] The target site sequence for insertion into may include a transposon left flank (LF) and transposon right flank (RF). The LF or RF sequences may be endogenous sequences for the IS110 used or may be heterologous sequences recognizable by the IS110 used, or may be synthetic sequences that comprise a sequence or structure feature recognized by the IS110 and sufficient to allow insertion of the polynucleotide into the donor site sequence. In certain example embodiments, the LF or RF sequences are truncated. In certain example embodiments, the LF or RF sequences may be between 20-500 base pairs, between 500-490 base pairs, between 500-480 base pairs, between 500-470 base pairs, between 500-460 base pairs, between 500-450 base pairs, between 500-440 base pairs, between 500-430 base pairs, between 500-420 base pairs, between 500-410 base pairs, between 500-400 base pairs, between 400-390 base pairs, between 400-380 base pairs, between 400-370 base pairs, between 400-360 base pairs, between 400-350 base pairs, between 400-340 base pairs, between 400-330 base pairs, between 400-320 base pairs, between 400-310 base pairs, between 400-300 base pairs, between 300-290 base pairs, between 300-280 base pairs, between 300-270 base pairs, between 300-260 base pairs, between 300-250 base pairs, between 300-240 base pairs, between 300-230 base pairs, between 300-220 base pairs, between 300-210 base pairs, between 300-200 base pairs, between 200-100 base pairs, between 100-190 base pairs, 100-180 base pairs, 100-170 base pairs, 100-160 base pairs, 100-150 base pairs, 100-140 base pairs, 100-130 base pairs, 100-120 base pairs, 100-110 base pairs, 20-100 base pairs, 20-90 base pairs, 20-80 base pairs, 20-70 base pairs, 20-60 base pairs, 20-50 base pairs, 20-40 base pairs, 20-30 base pairs, 50 to 100 base pairs, 60-100 base pairs, 70-100 base pairs, 80-100 base pairs, or 90-100 base pairs in length. In some embodiments, the target site sequence for insertion into may include a transposon left target (LT) and transposon right target (RT).

[0228] The donor site sequence for insertion into may include a transposon left end (LE) and transposon right end (RE). The LE or RE sequences may be endogenous sequences for the IS110 used or may be heterologous sequences recognizable by the IS110 used, or may be synthetic sequences that comprise a sequence or structure feature recognized by the IS110 and sufficient to allow insertion of the polynucleotide into the donor site sequence. In certain example embodiments, the LE or RE sequences are truncated. In certain example embodiments, the LE or RE sequences may be between 20-500 base pairs, between 500-490 base pairs, between 500-480 base pairs, between 500-470 base pairs, between 500-460 base pairs, between 500-450 base pairs, between 500-440 base pairs, between 500-430 base pairs, between 500-420 base pairs, between 500-410 base pairs, between 500-400 base pairs, between 400-390 base pairs, between 400-380 base pairs, between 400-370 base pairs, between 400-360 base pairs, between 400-350 base pairs, between 400-340 base pairs, between 400-330 base pairs, between 400-320 base pairs, between 400-310 base pairs, between 400-300 base pairs, between 300-290 base pairs, between 300-280 base pairs, between 300-270 base pairs, between 300-260 base pairs, between 300-250 base pairs, between 300-240 base pairs, between 300-230 base pairs, between 300-220 base pairs, between 300-210 base pairs, between 300-200 base pairs, between 200-100 base pairs, between 100-190 base pairs, 100-180 base pairs, 100-170 base pairs, 100-160 base pairs, 100-150 base pairs, 100-140 base pairs, 100-130 base pairs, 100-120 base pairs, 100-110 base pairs, 20-100 base pairs, 20-90 base pairs, 20-80 base pairs, 20-70 base pairs, 20-60 base pairs, 20-50 base pairs, 20-40 base pairs, 20-30 base pairs, 50 to 100 base pairs, 60-100 base pairs, 70-100 base pairs, 80-100 base pairs, or 90-100 base pairs in length. The donor site sequence for insertion into may include a transposon LD and transposon RD.

### E.2. Excisive Recombination and Inversion

[0229] To mediate excisive recombination or inversion reactions, the target site sequence and donor site sequence are present on a single DNA molecule. When the target site sequence and donor site sequence are present on a single DNA molecule, and in the case that the target site sequence and donor site sequence are arranged such that the LT and LD are on the same DNA strand and the RT and RD are on the same DNA strand, the insertion reaction functionally results in excision of the DNA sequence (excisive recombination) intervening the target and donor site. When the target site sequence and donor site sequence are present on a single DNA molecule, and in the case that the target site sequence and donor site sequence are arranged such that the LT and RD are on the same DNA strand and the RT and LD are on the same DNA strand the insertion reaction functionally results in inversion of the DNA sequence intervening the target and donor site. In some embodiments where a core sequence is present, the core sequences of the donor site sequence and target site sequence are on opposite strands. Inversion reactions on a chromosomal scale can be referred to as intrachromosomal translocations.

[0230] In some embodiments, where a core sequence is not present, to mediate excisive recombination, the sequence of the LTG of the target binding loop in the 5′ to 3′ direction is complementary to a first strand of a target site sequence. The sequence of the RTG of the target binding loop in the 5′ to 3′ direction is the reverse complement to the opposite strand to the first strand of the target site sequence, with the 3′ end of the RTG reverse complementary to the nucleotide immediately following the target site sequence complementary to the LTG. In some embodiments, the sequence of the RTG of the target binding loop in the 5′ to 3′ direction is the reverse complement to the opposite strand to the first strand of the target site sequence, with the 3′ end of the RTG reverse complementary to the second or third nucleotide immediately following the target site sequence complementary to the LTG (i.e., there is 1-2 nucleotide gap between where LTG and RTG bind). The sequence of the LDG of the donor binding loop in the 5′ to 3′ direction is complementary to a first strand of the donor site sequence. The sequence of the RDG in the 5′ to 3′ direction is the reverse complement to the opposite strand to the first strand of the donor site sequence with the 3′ end of the RDG reverse complementary to the nucleotide immediately following the target site sequence complementary to the LDG. In some embodiments, the sequence of the RDG in the 5′ to 3′ direction is the reverse complement to the opposite strand to the first strand of the donor site sequence with the 3′ end of the RDG reverse complementary to the second or third nucleotide immediately following the target site sequence complementary to the LDG (i.e., there is 1-2 nucleotide gap between where LDG and RDG bind). The first strand of the target site sequence and donor site sequence are on the same strand of the same DNA molecule. The donor and target sites can be any distance apart on a DNA molecule to result in excision of shorter DNA fragments (e.g. from about 11 bases or base pairs) up to many kilobases of DNA (e.g. the length of a chromosome) (e.g., from about 11, 12, 13, 14, 15, 16, 17, 18, 19, 20, 21, 22, 23, 24, 25, 26, 27, 28, 29, 30, 31, 32, 33, 34, 35, 36, 37, 38, 39, 40, 41, 42, 43, 44, 45, 46, 47, 48, 49, 50, 75, or 100 b or bp to about 110, 120, 125, 150, 200, 225, 250, 275, 300, 325, 350, 375, 400, 425, 450, 475, 500, 525, 550, 575, 600, 650, 700, 750, 800, 850, 900, 950, 1000, 1250, 1500, 1750, 2000, 2250, 2500, 2750, 3000, 3250, 3500, 3750, 4000, 4250, 4500, 4750, 5000, 5500, 6000, 6500, 7000, 7500, 8000, 8500, 9000, 9500, 10,000, 10,500, 11,000, 11,500, 12,000, 12,500, 13,000, 13,500, 14,000, 14,500, 15,000, 16,000, 17,000, 18,000, 19,000, 20,000, 21,000, 22,000, 23,000, 24,000, 25,000, 26,000, 27,000, 28,000, 29,000, 30,000 b or bp in length, or up to the length of a chromosome in a cell of interest).

[0231] In some embodiments where a core sequence is present, to mediate excisive recombination, the sequence of the LTG of the target binding loop in the 5′ to 3′ direction is complementary to a first strand of a target site sequence with the 3′ end of the LTG complementary to at least one of the nucleotides of the core sequence on the first strand of the target site sequence. The sequence of the RTG in the 5′ to 3′ direction is the reverse complement to the opposite strand to the first strand of the target site sequence with the 3′ end of the RTG reverse complementary to at least one of the nucleotides of the core sequence on the opposite strand to the first strand of the target site sequence. In some embodiments, there is 1-2 nucleotide gap between where LTG and RTG bind. The sequence of the LDG in the 5′ to 3′ direction is complementary to a first strand of the donor site sequence with the 3′ end of the LDG complementary to at least one of the nucleotides of the core sequence on the opposite strand to the first strand of the donor site sequence. The sequence of the RDG in the 5′ to 3′ direction is the reverse complement to the opposite strand to the first strand of the donor site sequence with the 3′ end of the RDG reverse complementary to at least one of the nucleotides of the core sequence on the opposite strand to the first strand of the donor site sequence. See FIG. 8B. In some embodiments, there is 1-2 nucleotide gap between where LDG and RDG bind.

[0232] In some embodiments where a core sequence is present, to mediate excisive recombination, the sequence of the LTG of the target binding loop in the 5′ to 3′ direction is complementary to a first strand of a target site sequence. The sequence of the RTG in the 5′ to 3′ direction is the reverse complement to the opposite strand to the first strand of the target site sequence. The sequence of the LDG in the 5′ to 3′ direction is complementary to a first strand of the donor site sequence. The sequence of the RDG in the 5′ to 3′ direction is the reverse complement to the opposite strand to the first strand of the donor site sequence. Thus, in this embodiment, the RTG, LTG, RDG, and LDG do not bind to the core sequence even though it is present. In some embodiments, one or more of RTG, LTG, RDG, and LDG can be complementary to at least one of the nucleotides of the core sequence. See e.g., FIG. 35B. Furthermore, in some embodiments, there is 1-2 nucleotide gap between where LDG and RDG bind and/or between where LTG and RTG bind.

[0233] In any of these embodiments, the first strand of the target site sequence and donor site sequence are on the same strand of the same DNA molecule. The donor and target site sequences can be any distance apart on a DNA molecule to result in excision of shorter DNA fragments (e.g. from about 11 bases or base pairs) up to many kilobases of DNA (e.g. the length of a chromosome) (e.g., from about 11, 12, 13, 14, 15, 16, 17, 18, 19, 20, 21, 22, 23, 24, 25, 26, 27, 28, 29, 30, 31, 32, 33, 34, 35, 36, 37, 38, 39, 40, 41, 42, 43, 44, 45, 46, 47, 48, 49, 50, 75, or 100 b or bp to about 110, 120, 125, 150, 200, 225, 250, 275, 300, 325, 350, 375, 400, 425, 450, 475, 500, 525, 550, 575, 600, 650, 700, 750, 800, 850, 900, 950, 1000, 1250, 1500, 1750, 2000, 2250, 2500, 2750, 3000, 3250, 3500, 3750, 4000, 4250, 4500, 4750, 5000, 5500, 6000, 6500, 7000, 7500, 8000, 8500, 9000, 9500, 10,000, 10,500, 11,000, 11,500, 12,000, 12,500, 13,000, 13,500, 14,000, 14,500, 15,000, 16,000, 17,000, 18,000, 19,000, 20,000, 21,000, 22,000, 23,000, 24,000, 25,000, 26,000, 27,000, 28,000, 29,000, 30,000 b or bp in length, or up to the length of a chromosome in a cell of interest).

[0234] In some embodiments, where a core sequence is not present, to mediate inversion, the sequence of the LTG of the target binding loop in the 5′ to 3′ direction is reverse complementary to the opposite strand to the first strand of a target site sequence. The sequence of the RTG of the target binding loop in the 5′ to 3′ direction is complementary to the first strand of the target site sequence with the 3′ end of the RTG reverse complementary to the nucleotide immediately following the target site sequence complementary to the LTG. In some embodiments, the sequence of the RTG of the target binding loop in the 5′ to 3′ direction is complementary to the first strand of the target site sequence with the 3′ end of the RTG reverse complementary to the second or third nucleotide immediately following the target site sequence complementary to the LTG (i.e., there is 1-2 nucleotide gap between where LTG and RTG bind). The sequence of the LDG of the donor binding loop in the 5′ to 3′ direction is complementary to the first strand of the donor site sequence. The sequence of the RDG in the 5′ to 3′ direction is the reverse complement to the opposite strand to the first strand of the donor site sequence with the 3′ end of the RDG reverse complementary to the nucleotide immediately following the target site sequence complementary to the LDG. In some embodiments, the sequence of the RDG in the 5′ to 3′ direction is the reverse complement to the opposite strand to the first strand of the donor site sequence with the 3′ end of the RDG reverse complementary to the second or third nucleotide immediately following the target site sequence complementary to the LDG (i.e., there is 1-2 nucleotide gap between where LDG and RDG bind). The first strand of the target site and donor site sequence are on the same strand of the same DNA molecule. The donor and target sites can be any distance apart on a DNA molecule to result in inversion of shorter DNA fragments (e.g. from about 11 bases or base pairs) up to many kilobases of DNA (e.g. the length of a chromosome) (e.g., from about 11, 12, 13, 14, 15, 16, 17, 18, 19, 20, 21, 22, 23, 24, 25, 26, 27, 28, 29, 30, 31, 32, 33, 34, 35, 36, 37, 38, 39, 40, 41, 42, 43, 44, 45, 46, 47, 48, 49, 50, 75, or 100 b or bp to about 110, 120, 125, 150, 200, 225, 250, 275, 300, 325, 350, 375, 400, 425, 450, 475, 500, 525, 550, 575, 600, 650, 700, 750, 800, 850, 900, 950, 1000, 1250, 1500, 1750, 2000, 2250, 2500, 2750, 3000, 3250, 3500, 3750, 4000, 4250, 4500, 4750, 5000, 5500, 6000, 6500, 7000, 7500, 8000, 8500, 9000, 9500, 10,000, 10,500, 11,000, 11,500, 12,000, 12,500, 13,000, 13,500, 14,000, 14,500, 15,000, 16,000, 17,000, 18,000, 19,000, 20,000, 21,000, 22,000, 23,000, 24,000, 25,000, 26,000, 27,000, 28,000, 29,000, 30,000 b or bp in length, or up to the length of a chromosome in a cell of interest).

[0235] In some embodiments where a core sequence is present, to mediate inversion, the sequence of the LTG of the target binding loop in the 5′ to 3′ direction is reverse complementary to the opposite strand to the first strand of a target site sequence with the 3′ end of the LTG reverse complementary to at least one of the nucleotides of the core sequence on the opposite strand to the first strand of the target site sequence. The sequence of the RTG in the 5′ to 3′ direction is complementary to a first strand of the target site sequence with the 3′ end of the RTG complementary to at least one of the nucleotides of the core sequence on the first strand of the target site sequence. In some embodiments, there is 1-2 nucleotide gap between where LTG and RTG bind. The sequence of the LDG in the 5′ to 3′ direction is complementary to a first strand of the donor site sequence with the 3′ end of the LDG complementary to at least one of the nucleotides of the core sequence on the first strand of the donor site sequence. The sequence of the RDG in the 5′ to 3′ direction is the reverse complement to the opposite strand to the first strand of the donor site sequence with the 3′ end of the RDG reverse complementary to at least one of the nucleotides of the core sequence on the opposite strand to the first strand of the donor site sequence. See FIG. 8C. In some embodiments, there is 1-2 nucleotide gap between where LDG and RDG bind.

[0236] In some embodiments where a core sequence is present, to mediate inversion, the sequence of the LTG of the target binding loop in the 5′ to 3′ direction is reverse complementary to the opposite strand to the first strand of a target site sequence. The sequence of the RTG in the 5′ to 3′ direction is complementary to a first strand of the target site sequence. The sequence of the LDG in the 5′ to 3′ direction is complementary to a first strand of the donor site sequence. The sequence of the RDG in the 5′ to 3′ direction is the reverse complement to the opposite strand to the first strand of the donor site sequence. Thus, in this embodiment, the RTG, LTG, RDG, and LDG do not bind to the core sequence even though it is present. In some embodiments, one or more of RTG, LTG, RDG, and LDG can be complementary to at least one of the nucleotides of the core sequence. See e.g., FIG. 35B. Furthermore, in some embodiments, there is 1-2 nucleotide gap between where LDG and RDG bind and/or between where LTG and RTG bind.

[0237] In any of these embodiments, the first strand of the target site and donor site sequences are on the same strand of the same DNA molecule. The donor and target sites can be any distance apart on a DNA molecule to result in inversion of shorter DNA fragments (e.g. from about 11 bases or base pairs) up to many kilobases of DNA (e.g. the length of a chromosome) (e.g., from about 11, 12, 13, 14, 15, 16, 17, 18, 19, 20, 21, 22, 23, 24, 25, 26, 27, 28, 29, 30, 31, 32, 33, 34, 35, 36, 37, 38, 39, 40, 41, 42, 43, 44, 45, 46, 47, 48, 49, 50, 75, or 100 b or bp to about 110, 120, 125, 150, 200, 225, 250, 275, 300, 325, 350, 375, 400, 425, 450, 475, 500, 525, 550, 575, 600, 650, 700, 750, 800, 850, 900, 950, 1000, 1250, 1500, 1750, 2000, 2250, 2500, 2750, 3000, 3250, 3500, 3750, 4000, 4250, 4500, 4750, 5000, 5500, 6000, 6500, 7000, 7500, 8000, 8500, 9000, 9500, 10,000, 10,500, 11,000, 11,500, 12,000, 12,500, 13,000, 13,500, 14,000, 14,500, 15,000, 16,000, 17,000, 18,000, 19,000, 20,000, 21,000, 22,000, 23,000, 24,000, 25,000, 26,000, 27,000, 28,000, 29,000, 30,000 b or bp in length, or up to the length of a chromosome in a cell of interest).

[0238] In any of the above embodiments, the LTG and RTG sequences are fully complementary to their respective target site sequences of the target DNA. In some embodiments, the LTG and/or RTG are partially complementary to their respective target site sequences of the target DNA, i.e., there is mismatch and/or non-contiguous tolerance. In some embodiments, there is a single mismatch in the LTG or RTG nucleotide sequence. In some embodiments, there are two, three or four mismatches which can be in the LTG, in the RTG, or spread across the LTG and RTG. In some embodiments, the two, three or four mismatches are contiguous. In some embodiments, the two, three or four mismatches are non-contiguous. In some embodiments, the LDG and RDG nucleotide sequences are fully complementary to their respective donor site sequences of the donor DNA. In some embodiments, the LDG and/or RDG nucleotide sequences are partially complementary to their respective donor site sequences of the donor DNA, i.e., there is mismatch and/or non-contiguous tolerance. In some embodiments, there is a single mismatch in the first or second nucleotide sequence. In some embodiments, there are two mismatches which can be in the LDG, in the RDG, or spread across the LDG and RDG. In some embodiments, the two mismatches are contiguous. In some embodiments, the two mismatches are non-contiguous.

[0239] In some embodiments, it is not necessary to define the sequences of LT, RT, LD, and RD (and, therefore, LTG, RTG, LDG, and RDG). Instead an excisive recombination or inversion reaction can be mediated between a DNA molecule comprising a donor site sequence comprising wild-type RE-LE or a subsequence thereof, or, where core is used, RE-core-LE or a subsequence thereof of any of the IS110 family transposases described herein (see FIG. 15 (SEQ ID NOS: 1-348), FIG. 17 (SEQ ID NOS: 30354-30529), or SEQ ID NOS: 349-10175 or 30530-40356), a DNA molecule comprising a target site sequence comprising LF-RF or a subsequence thereof, or where core is used, LF-core-RF of any of the IS110 family transposases described herein (see FIG. 18 (SEQ ID NOS: 20351-20526), or SEQ ID NOS: 20527-30353) by providing the IS110 family transposase and its corresponding bridgeRNA. It is also not necessary to define the sequence of the bridgeRNA since bridgeRNA is encoded in LE or RE. Thus, in some embodiments, bridgeRNA sequence can be provided by providing the nucleotide sequence of LE or RE.

[0240] The target site sequence or donor site sequence mediating the excisive recombination or inversion reaction can be located on any polynucleotide sequence of interest, including, but not limited to genomic DNA and plasmids. In some embodiments, the target site sequence and/or donor site sequence is a polynucleotide sequence present in the genome or DNA of interest. In some embodiments the target site sequence and/or donor site sequence naturally occurs in the genome or DNA of interest. In some embodiments, the target site sequence and/or donor site sequence is introduced into the genome or a DNA of interest. Methods of introducing DNA sequences, such as the target site sequence or donor site sequence, into a genome or DNA of interest are known in the art and include, but are not limited to, CRISPR-Cas9, homology directed repair (HDR), transposases, integrases, etc. In some embodiments, the genomic DNA is located in a cell. In some embodiments, the cell is a eukaryotic cell. In some embodiments, the cell is prokaryotic. In some embodiments, the cell is a mammalian cell. In some embodiments, the cell is a human cell. In some embodiments, the cell is a mouse cell. In some embodiments, the cell is a stem cell.

[0241] The target site sequence may include a transposon left flank (LF) and transposon right flank (RF). The LF or RF sequences may be endogenous sequences for the IS110 used or may be heterologous sequences recognizable by the IS110 used, or may be synthetic sequences that comprise a sequence or structure feature recognized by the IS110 and sufficient to allow insertion of the polynucleotide into the donor site. In certain example embodiments, the LF or RF sequences are truncated. In certain example embodiments, the LF or RF sequences may be between 20-500 base pairs, between 500-490 base pairs, between 500-480 base pairs, between 500-470 base pairs, between 500-460 base pairs, between 500-450 base pairs, between 500-440 base pairs, between 500-430 base pairs, between 500-420 base pairs, between 500-410 base pairs, between 500-400 base pairs, between 400-390 base pairs, between 400-380 base pairs, between 400-370 base pairs, between 400-360 base pairs, between 400-350 base pairs, between 400-340 base pairs, between 400-330 base pairs, between 400-320 base pairs, between 400-310 base pairs, between 400-300 base pairs, between 300-290 base pairs, between 300-280 base pairs, between 300-270 base pairs, between 300-260 base pairs, between 300-250 base pairs, between 300-240 base pairs, between 300-230 base pairs, between 300-220 base pairs, between 300-210 base pairs, between 300-200 base pairs, between 200-100 base pairs, between 100-190 base pairs, 100-180 base pairs, 100-170 base pairs, 100-160 base pairs, 100-150 base pairs, 100-140 base pairs, 100-130 base pairs, 100-120 base pairs, 100-110 base pairs, 20-100 base pairs, 20-90 base pairs, 20-80 base pairs, 20-70 base pairs, 20-60 base pairs, 20-50 base pairs, 20-40 base pairs, 20-30 base pairs, 50 to 100 base pairs, 60-100 base pairs, 70-100 base pairs, 80-100 base pairs, or 90-100 base pairs in length. In some embodiments, the target site sequence may include a transposon LT and transposon RT.

[0242] The donor site sequence may include a transposon left end (LE) and transposon right end (RE). The LE or RE sequences may be endogenous sequences for the IS110 used or may be heterologous sequences recognizable by the IS110 used, or may be synthetic sequences that comprise a sequence or structure feature recognized by the IS110 and sufficient to allow insertion of the polynucleotide into the donor site. In certain example embodiments, the LE or RE sequences are truncated. In certain example embodiments, the LE or RE sequences may be between 20-500 base pairs, between 500-490 base pairs, between 500-480 base pairs, between 500-470 base pairs, between 500-460 base pairs, between 500-450 base pairs, between 500-440 base pairs, between 500-430 base pairs, between 500-420 base pairs, between 500-410 base pairs, between 500-400 base pairs, between 400-390 base pairs, between 400-380 base pairs, between 400-370 base pairs, between 400-360 base pairs, between 400-350 base pairs, between 400-340 base pairs, between 400-330 base pairs, between 400-320 base pairs, between 400-310 base pairs, between 400-300 base pairs, between 300-290 base pairs, between 300-280 base pairs, between 300-270 base pairs, between 300-260 base pairs, between 300-250 base pairs, between 300-240 base pairs, between 300-230 base pairs, between 300-220 base pairs, between 300-210 base pairs, between 300-200 base pairs, between 200-100 base pairs, between 100-190 base pairs, 100-180 base pairs, 100-170 base pairs, 100-160 base pairs, 100-150 base pairs, 100-140 base pairs, 100-130 base pairs, 100-120 base pairs, 100-110 base pairs, 20-100 base pairs, 20-90 base pairs, 20-80 base pairs, 20-70 base pairs, 20-60 base pairs, 20-50 base pairs, 20-40 base pairs, 20-30 base pairs, 50 to 100 base pairs, 60-100 base pairs, 70-100 base pairs, 80-100 base pairs, or 90-100 base pairs in length. In some embodiments, the donor site sequence may include a transposon LD and transposon RD.

E.3. Non-Core bridgeRNA Reprogramming

[0243] Disclosed herein is exemplary reprogramming of the target binding loop of a bridgeRNA in IS110 family transposase embodiments that dₒ not use a core sequence. Any target site sequence can be targeted for transposition by reprogramming the nucleotide sequences of LTG and RTG so they are complementary to the target site sequence of interest. For example, in order to target the target site sequence X₁X₂X₃X₄X₅X₆X₇X₈X₉X₁₀X₁₁ where X is any nucleotide, and X₈ is the 3′ nucleotide of LT and X₉ is 5′ nucleotide of RT and n is zero (i.e., Xₙ is absent and X₈X₉ is the concatenation site between LT and RT) or comprises 1 to 2 nucleotides, the bridgeRNA encodes an LTG in the 5′ to 3′ direction X₁X₂X₃X₄X₅X₆X₇X₈ and an RTG in the 5′ to 3′ direction Y₁₁Y₁₀Y₉ where Y is the complementary nucleotide to X. In some embodiments the target site sequence extends beyond X₁₁ by one or more nucleotides, (e.g., by one nucleotide to X₁X₂X₃X₄X₅X₆X₇X₈X₉X₁₀X₁₁X₁₂, by two nucleotides to X₁X₂X₃X₄X₅X₆X₇X₈X₉X₁₀X₁₁X₁₂X₁₃, by three nucleotides to X₁X₂X₃X₄X₅X₆X₇X₈X₉X₁₀X₁₁X₁₂X₁₃X₁₄, by four nucleotides to X₁X₂X₃X₄X₅X₆X₇X₈X₉X₁₀X₁₁X₁₂X₁₃X₁₄X₁₅, etc.) and the bridgeRNA encodes an RTG in the 5′ to 3′ direction Y₁₂Y₁₁Y₁₀Y₉, Y₁₃Y₁₂Y₁₁Y₁₀Y₉, Y₁₄Y₁₃Y₁₂Y₁₁Y₁₀Y₉, or Y₁₅Y₁₄Y₁₃Y₁₂Y₁₁Y₁₀Y₉, etc., where Y is the complementary nucleotide to X. In some embodiments the target site sequence extends in the other direction beyond X₁ by one or more nucleotides, (e.g., by one nucleotide to X₋₁X₁X₂X₃X₄X₅X₆X₇X₈X₉X₁₀X₁₁X₁₂, etc.) and the bridgeRNA encodes an LTG in the 5′ to 3′ direction X₋₁X₁X₂X₃X₄X₅X₆X₇X₈ etc. In some embodiments, the LTG or RTG can be extended further to increase the length of homology to their respective target site sequences. In some embodiments, Xₙ is absent (i.e., X₈X₉ is the concatenation site between RT and LT). In some embodiments, X₁ is one nucleotide. In some embodiments, X₁ is two nucleotides. In some embodiments, the LTG and/or RTG are partially complementary to their respective target site sequences of the target DNA, i.e., there is non-canonical base pairing, mismatch and/or non-contiguous tolerance. In some embodiments, there is a single mismatch or non-canonical base pair in the LTG or RTG nucleotide sequence, e.g., one of X₁X₂X₃X₄X₅X₆X₇X₈ or [Y₁₄Y₁₃Y₁₂ (if present)]Y₁₁Y₁₀Y₉ comprises a mismatch or non-canonical base pair with the target site sequence. In some embodiments, X₄ of the LTG non-canonically base pairs with the target site sequence (e.g., X₄ of the LTG is a “G” which base pairs with a “T” in the target site sequence. In some embodiments, there are two, three or four mismatches or non-canonical base pairs which can be in the LTG, in the RTG, or spread across the LTG and RTG, e.g., two, three, or four of X₁X₂X₃X₄X₅X₆X₇X₈ or [Y₁₄Y₁₃Y₁₂ (if present)]Y₁₁Y₁₀Y₉ comprises a mismatch or non-canonical base pair with the target site sequence. In some embodiments, the two, three or four mismatches or non-canonical base pairs are contiguous. In some embodiments, the two, three or four mismatches or non-canonical base pairs are non-contiguous. In some embodiments, the LTG and/or RTG are partially complementary to their respective target site sequences of the target DNA so that there are one, two, three, or four nucleotides dispersed within LTG and/or RTG that do not base pair with the target DNA and form bulges. A person of skill in the art understands that in RNA “T” is “U.” Although the target site sequence is exemplified as 11 nucleotides in length, in some embodiments, the target site sequence may be shorter or longer. In some embodiments, the target site sequence length is 5 nucleotides, 6 nucleotides, 7 nucleotides, 8 nucleotides, 9 nucleotides, 10 nucleotide, 11 nucleotides, 12 nucleotides, 13 nucleotides, 14 nucleotides, 15 nucleotides, 16 nucleotides, 17 nucleotides, 18 nucleotides, 19 nucleotides, 20 nucleotides, 21 nucleotides, 22 nucleotides, 23 nucleotides, 24 nucleotides, 25 nucleotides, 26 nucleotides, 27 nucleotides, 28 nucleotides, 29 nucleotides, or 30 nucleotides. The length of LTG and RTG can accordingly vary with the target site sequence length. In some embodiments, the non-canonical base pairing is non-Watson-Crick base pairing (i.e., is not a G-C base pair or A-T/U base pair). In some embodiments, the non-canonical base pairing is wobble base pairing. In some embodiments, the non-canonical base pairing is Hoogsteen base pairing. In some embodiments, the non-canonical base pairing comprises a rG-dT base pair, a rU-dG base pair, a rA-dC base pair, a rC-dA base pair, a rA-dG base pair, or a rG-dG base pair.

[0244] In some embodiments, disclosed herein are three bridgeRNA reprogramming approaches that can increase the specificity and/or efficiency of the system. First, in some embodiments, the bridgeRNA is reprogrammed so that LTG and/or RTG have longer homology to the target site sequence. In this embodiment, the target binding loop sequence itself is not made longer but the nucleotide sequence is reprogrammed so that additional nucleotide bases of the target binding loop sequence of the bridgeRNA are complementary to the target site sequence. For example, a bridgeRNA that has a 9 base LTG that is complementary to the target site sequence can be reprogrammed so that additional bases of bridgeRNA are complementary to the target site sequence resulting in an LTG with longer homology to the target site sequence. In some embodiments, the LTG comprises at least 7 bases, 8 bases, 9 bases, 10 bases, 15 bases, 20 bases, etc. in length. In some embodiments, the LTG further comprises at least one nucleotide complementary to a nucleotide of the concatenation site of the target site sequence. In some embodiments, the LTG comprises 7 bases complementary to the target site sequence before the concatenation site in the 5′ to 3′ direction. In some embodiments, the LTG comprises 8 bases complementary to the target site sequence before the concatenation site in the 5′ to 3′ direction. In some embodiments, the LTG comprises 9 bases complementary to the target site sequence before the concatenation site in the 5′ to 3′ direction. For example, a bridgeRNA that has a 4 base RTG that is complementary to the target site sequence can be reprogrammed so that additional bases of bridgeRNA are complementary to the target site sequence resulting in an RTG with longer homology to the target site sequence. In some embodiments, the RTG comprises at least 2 bases, 3 bases, 4 bases, 5 bases, 6 bases, 7 bases, 9 bases, 10 bases, 15 bases, 20 bases, etc. in length. In some embodiments, the RTG further comprises at least one nucleotide complementary to a nucleotide of the concatenation site. In some embodiments, the RTG comprises 3 bases complementary to the target site sequence after the concatenation site in the 5′ to 3′ direction. In some embodiments, the RTG comprises 4 bases complementary to the target site sequence after the concatenation site in the 5′ to 3′ direction. In some embodiments, the RTG comprises 5 bases complementary to the target site sequence after the concatenation site in the 5′ to 3′ direction. In some embodiments, the RTG comprises 6 bases complementary to the target site sequence after the concatenation site in the 5′ to 3′ direction. In some embodiments, the RTG comprises 7 bases complementary to the target site sequence after the concatenation site in the 5′ to 3′ direction.

[0245] Second, in some embodiments, the bridgeRNA is reprogrammed so that LDG and/or RDG are shifted relative to each other so that the span of bases of the donor site sequence bound by the LDG and RDG is longer. In this embodiment, the donor binding loop sequence itself is not made longer but the nucleotide sequence is reprogrammed so that LDG and/or RDG are complementary to the donor site sequence so that they span a longer sequence, e.g. overlap between where LDG and RDG bind is reduced. For example, a bridgeRNA that has a LDG X₁X₂X₃X₄X₅X₆X₇X₈ and an RDG Y₁₁Y₁₀Y₉ that targets the donor site sequence X₁X₂X₃X₄X₅X₆X₇X₈X₉X₁₀X₁₁ can be reprogrammed so that the LDG comprises X₋₁X₁X₂X₃X₄X₅X₆X₇ which in conjunction with the RDG Y₁₁Y₁₀Y₉ now targets the donor site sequence X₋₁X₁X₂X₃X₄X₅X₆X₇X₈X₉X₁₀X₁₁ thus increasing the span of bases of the donor site sequence bound by the LDG and RDG. In some embodiments, the LDG can be shifted at least 1 base, 2 bases, 3 bases, etc. in length. In another example, a bridgeRNA that has a LDG X₁X₂X₃X₄X₅X₆X₇X₈ and an RDG Y₁₁Y₁₀Y₉ that targets the donor site sequence X₁X₂X₃X₄X₅X₆X₇X₈X₉X₁₀X₁₁ can be reprogrammed so that the RDG comprises Y₁₂Y₁₁Y₁₀ which in conjunction with the LDG X₁X₂X₃X₄X₅X₆X₇X₈ now targets the target site sequence X₁X₂X₃X₄X₅X₆X₇X₈X₉X₁₀X₁₁X₁₂ thus increasing the span of bases of the target site sequence bound by the LDG and RDG. In some embodiments, the RDG can be shifted at least 1 base, 2 bases, 3 bases, etc. in length. In some embodiments, both the LDG and RDG can be shifted.

[0246] Third, in some embodiments, the bridgeRNA is reprogrammed so that LTG and/or RTG have longer homology to the target site sequence. In this embodiment, the target binding loop sequence is made longer to include additional nucleotide bases of the target binding loop sequence of the bridgeRNA that are complementary to the target site sequence. For example, a bridgeRNA that has a 9 base LTG that is complementary to the target site sequence can be reprogrammed to insert additional bases into the bridgeRNA that are complementary to the target site sequence so that the LTG has longer homology to the target site sequence. In some embodiments, the LTG comprises at least 7 bases, 8 bases, 9 bases, 10 bases, 15 bases, 20 bases, etc. in length. In some embodiments, the LTG further comprises at least one nucleotide complementary to a nucleotide of the concatenation site. In some embodiments, the LTG comprises 7 bases complementary to the target site sequence before the concatenation site in the 5′ to 3′ direction. In some embodiments, the LTG comprises 8 bases complementary to the target site sequence before the concatenation site in the 5′ to 3′ direction. In some embodiments, the LTG comprises 9 bases complementary to the target site sequence before the concatenation site in the 5′ to 3′ direction. For example, a bridgeRNA that has a 4 base RTG that is complementary to the target site sequence can be reprogrammed to insert additional bases into the bridgeRNA that are complementary to the target site sequence so that the RTG has longer homology to the target site sequence. In some embodiments, the RTG comprises at least 2 bases, 3 bases, 4 bases, 5 bases, 6 bases, 7 bases, 9 bases, 10 bases, 15 bases, 20 bases, etc. in length. In some embodiments, the RTG further comprises at least one nucleotide complementary to a nucleotide of the concatenation site. In some embodiments, the RTG comprises 3 bases complementary to the target site sequence after the concatenation site in the 5′ to 3′ direction. In some embodiments, the RTG comprises 4 bases complementary to the target site sequence after the concatenation site in the 5′ to 3′ direction. In some embodiments, the RTG comprises 5 bases complementary to the target site sequence after the concatenation site in the 5′ to 3′ direction. In some embodiments, the RTG comprises 6 bases complementary to the target site sequence after the concatenation site in the 5′ to 3′ direction. In some embodiments, the RTG comprises 7 bases complementary to the target site sequence after the concatenation site in the 5′ to 3′ direction.

[0247] Disclosed herein is exemplary reprogramming of the donor binding loop of a bridgeRNA in IS110 family transposase embodiments that do not use a core sequence. Any donor site sequence can be targeted for insertion by reprogramming the nucleotide sequences of LDG and RDG so they are complementary to the donor site sequence of interest. For example, in order to target the donor site sequence STIR-Xₙ₁—X₁X₂X₃X₄X₅X₆X₇X₈X₉X₁₀X₁₁—Xₙ₂-STIR where X is any nucleotide and STIR is optional, but if present is a sub-terminal inverted repeat comprising 2 to 20 nucleotides (e.g., such as a three nucleotide STIR “ATA” and “TAT”), X₈ is the 3′ nucleotide of LD and X₉ is 5′ nucleotide of RD and n is zero (i.e., Xₙ is absent and X₈X₉ is the concatenation site between LD and RD) or comprises 1 to 2 nucleotides, and n1 and n2 can independently be zero to 10, the bridgeRNA encodes an LDG in the 5′ to 3′ direction X₁X₂X₃X₄X₅X₆X₇X₈ and an RDG in the 5′ to 3′ direction Y₁₁Y₁₀Y₉ where Y is the complementary nucleotide to X. In some embodiments the donor site sequence extends beyond X₁₁ by one or more nucleotides, (e.g., by one nucleotide to X₁X₂X₃X₄X₅X₆X₇X₈X₉X₁₀X₁₁X₁₂, by two nucleotides to X₁X₂X₃X₄X₅X₆X₇X₈X₉X₁₀X₁₁X₁₂X₁₃, by three nucleotides to X₁X₂X₃X₄X₅X₆X₇X₈X₉X₁₀X₁X₁₂X₁₃X₁₄, by four nucleotides to X₁X₂X₃X₄X₅X₆X₇X₈X₉X₁₀X₁₁X₁₂X₁₃X₁₄X₁₅, etc.) and the bridgeRNA encodes an RDG in the 5′ to 3′ direction Y₁₂Y₁₁Y₁₀Y₉, Y₁₃Y₁₂Y₁₁Y₁₀Y₉, Y₁₄Y₁₃Y₁₂Y₁₁Y₁₀Y₉, or Y₁₅Y₁₄Y₁₃Y₁₂Y₁₁Y₁₀Y₉, where Y is the complementary nucleotide to X. In some embodiments the donor site sequence extends in the other direction beyond X₁ by one or more nucleotides, (e.g., by one nucleotide to X₋₁X₁X₂X₃X₄X₅X₆X₇X₈X₉X₁₀X₁X₁₂, etc.) and the bridgeRNA encodes an LDG in the 5′ to 3′ direction X₋₁X₁X₂X₃X₄X₅X₆X₇X₈ etc. In some embodiments, the LDG or RDG can be extended further to increase the length of homology to their respective target site sequences. In some embodiments, X₁ is absent (i.e., X₈X₉ is the concatenation site between RD and LD). In some embodiments, X₁ is one nucleotide. In some embodiments, X₁ is two nucleotides. In some embodiments, the LDG and/or RDG are partially complementary to their respective donor site sequences of the donor DNA, i.e., there is non-canonical base pairing, mismatch and/or non-contiguous tolerance. In some embodiments, there is a single mismatch or non-canonical base pair in the LDG or RDG nucleotide sequence, e.g., one of X₁X₂X₃X₄X₅X₆X₇X₈ or [Y₁₄Y₁₃Y₁₂ (if present)]Y₁₁Y₁₀Y₉ comprises a mismatch or non-canonical base pair with the donor site sequence. In some embodiments, Y₁₃ of the RDG non-canonically base pairs with the target site sequence (e.g., Y₁₃ of the RDG is a “G” which base pairs with a “T” in the target site sequence). In some embodiments, Y₁₂ of the RDG non-canonically base pairs with the target site sequence (e.g., Y₁₂ of the RDG is a “G” which base pairs with a “T” in the target site sequence). In some embodiments, the nucleotides of the donor site sequence may show a sequence preference. In some embodiments, there are two, three or four mismatches or non-canonical base pair which can be in the LDG, in the RDG, or spread across the LDG and RDG, e.g., two, three, or four of X₁X₂X₃X₄X₅X₆X₇X₈ or [Y₁₄Y₁₃Y₁₂ (if present)]Y₁₁Y₁₀Y₉ comprises a mismatch or non-canonical base pair with the donor site sequence. In some embodiments, Y₁₄Y₁₃ comprise high mismatch tolerance with the donor site sequence. In some embodiments, the two, three or four mismatches or non-canonical base pairs are contiguous. In some embodiments, the two, three or four mismatches or non-canonical base pairs are non-contiguous. In some embodiments, the LDG and/or RDG are partially complementary to their respective donor site sequences of the donor DNA so that there are one, two, three, or four nucleotides dispersed within LDG and/or RDG that do not base pair with the donor DNA and form bulges (see e.g., FIG. 36A). A person of skill in the art understands that in RNA “T” is “U.” Although the donor site sequence between STIR-Xₙ₁ and Xₙ₂-STIR is exemplified as 11 nucleotides in length, in some embodiments, the donor site sequence between STIR-Xₙ₁ and Xₙ₂-STIR may be shorter or longer. In some embodiments, the donor site length between STIR-Xₙ₁ and Xₙ₂-STIR is 5 nucleotides, 6 nucleotides, 7 nucleotides, 8 nucleotides, 9 nucleotides, 10 nucleotide, 11 nucleotides, 12 nucleotides, 13 nucleotides, 14 nucleotides, 15 nucleotides, 16 nucleotides, 17 nucleotides, 18 nucleotides, 19 nucleotides, 20 nucleotides, 21 nucleotides, 22 nucleotides, 23 nucleotides, 24 nucleotides, 25 nucleotides, 26 nucleotides, 27 nucleotides, 28 nucleotides, 29 nucleotides, or 30 nucleotides. The length of LDG and RDG can accordingly vary with the donor site length. In some embodiments, the STIR, if present, comprises a G/T rich nucleotide sequence. In some embodiments, the 5′ STIR, if present, comprises a G/T rich nucleotide sequence. In some embodiments, the non-canonical base pairing is non-Watson-Crick base pairing (i.e., is not a G-C base pair or A-T/U base pair). In some embodiments, the non-canonical base pairing is wobble base pairing. In some embodiments, the non-canonical base pairing is Hoogsteen base pairing. In some embodiments, the non-canonical base pairing comprises a rG-dT base pair, a rU-dG base pair, a rA-dC base pair, a rC-dA base pair, a rA-dG base pair, or a rG-dG base pair.

[0248] In some embodiments, disclosed herein are three bridgeRNA reprogramming approaches that can increase the specificity and/or efficiency of the system. First, in some embodiments, the bridgeRNA is reprogrammed so that LDG and/or RDG have longer homology to the donor site sequence. In this embodiment, the donor binding loop sequence itself is not made longer but the nucleotide sequence is reprogrammed so that additional nucleotide bases of the donor binding loop sequence of the bridgeRNA are complementary to the donor site sequence. For example, a bridgeRNA that has a 9 base LDG that is complementary to the donor site sequence can be reprogrammed so that additional bases of bridgeRNA are complementary to the donor site sequence resulting in an LDG with longer homology to the donor site sequence. In some embodiments, the LTG comprises at least 7 bases, 8 bases, 9 bases, 10 bases, 15 bases, 20 bases, etc. in length. In some embodiments, the LDG further comprises at least one nucleotide complementary to a nucleotide of the concatenation site of the donor site sequence. In some embodiments, the LDG comprises 7 bases complementary to the donor site sequence before the concatenation site in the 5′ to 3′ direction. In some embodiments, the LDG comprises 8 bases complementary to the donor site sequence before the concatenation site in the 5′ to 3′ direction. In some embodiments, the LDG comprises 9 bases complementary to the donor site sequence before the concatenation site in the 5′ to 3′ direction. For example, a bridgeRNA that has a 4 base RDG that is complementary to the donor site sequence can be reprogrammed so that additional bases of bridgeRNA are complementary to the donor site sequence resulting in an RDG with longer homology to the donor site sequence. In some embodiments, the RDG comprises at least 2 bases, 3 bases, 4 bases, 5 bases, 6 bases, 7 bases, 9 bases, 10 bases, 15 bases, 20 bases, etc. in length. In some embodiments, the RDG further comprises at least one nucleotide complementary to a nucleotide of the concatenation site. In some embodiments, the RDG comprises 3 bases complementary to the donor site sequence after the concatenation site in the 5′ to 3′ direction. In some embodiments, the RDG comprises 4 bases complementary to the donor site sequence after the concatenation site in the 5′ to 3′ direction. In some embodiments, the RDG comprises 5 bases complementary to the donor site sequence after the concatenation site in the 5′ to 3′ direction. In some embodiments, the RDG comprises 6 bases complementary to the donor site sequence after the concatenation site in the 5′ to 3′ direction. In some embodiments, the RDG comprises 7 bases complementary to the donor site sequence after the concatenation site in the 5′ to 3′ direction.

[0249] Second, in some embodiments, the bridgeRNA is reprogrammed so that LDG and/or RDG are shifted relative to each other so that the span of bases of the donor site sequence bound by the LDG and RDG is longer. In this embodiment, the donor binding loop sequence itself is not made longer but the nucleotide sequence is reprogrammed so that LDG and/or RDG are complementary to the donor site sequence so that they span a longer sequence, e.g. overlap between where LDG and RDG bind is reduced. For example, a bridgeRNA that has a LDG X₁X₂X₃X₄X₅X₆X₇X₈ and an RDG Y₁₁Y₁₀Y₉ that targets the donor site sequence X₁X₂X₃X₄X₅X₆X₇X₈X₉X₁₀X₁₁ can be reprogrammed so that the LDG comprises X₋₁X₁X₂X₃X₄X₅X₆X₇ which in conjunction with the RDG Y₁₁Y₁₀Y₉ now targets the donor site sequence X₋₁X₁X₂X₃X₄X₅X₆X₇X₈X₉X₁₀X₁₁ thus increasing the span of bases of the donor site sequence bound by the LDG and RDG. In some embodiments, the LDG can be shifted at least 1 base, 2 bases, 3 bases, etc. in length. In another example, a bridgeRNA that has a LDG X₁X₂X₃X₄X₅X₆X₇X₈ and an RDG Y₁₁Y₁₀Y₉ that targets the donor site sequence X₁X₂X₃X₄X₅X₆X₇X₈X₉X₁₀X₁₁ can be reprogrammed so that the RDG comprises Y₁₂Y₁₁Y₁₀ which in conjunction with the LDG X₁X₂X₃X₄X₅X₆X₇X₈ now targets the target site sequence X₁X₂X₃X₄X₅X₆X₇X₈X₉X₁₀X₁₁X₁₂ thus increasing the span of bases of the target site sequence bound by the LDG and RDG. In some embodiments, the RDG can be shifted at least 1 base, 2 bases, 3 bases, etc. in length. In some embodiments, both the LDG and RDG can be shifted.

[0250] Third, in some embodiments, the bridgeRNA is reprogrammed so that LDG and/or RDG have longer homology to the donor site sequence. In this embodiment, the donor binding loop sequence is made longer to include additional nucleotide bases of the donor binding loop sequence of the bridgeRNA that are complementary to the donor site sequence. For example, a bridgeRNA that has a 9 base LDG that is complementary to the donor site sequence can be reprogrammed to insert additional bases into the bridgeRNA that are complementary to the donor site sequence so that the LDG has longer homology to the target site sequence. In some embodiments, the LDG comprises at least 7 bases, 8 bases, 9 bases, 10 bases, 15 bases, 20 bases, etc. in length. In some embodiments, the LDG further comprises at least one nucleotide complementary to a nucleotide of the concatenation site. In some embodiments, the LDG comprises 7 bases complementary to the donor site sequence before the concatenation site in the 5′ to 3′ direction. In some embodiments, the LDG comprises 8 bases complementary to the donor site sequence before the concatenation site in the 5′ to 3′ direction. In some embodiments, the LDG comprises 9 bases complementary to the donor site sequence before the concatenation site in the 5′ to 3′ direction. For example, a bridgeRNA that has a 4 base RDG that is complementary to the donor site sequence can be reprogrammed to insert additional bases into the bridgeRNA that are complementary to the donor site sequence so that the RDG has longer homology to the target site sequence. In some embodiments, the RDG comprises at least 2 bases, 3 bases, 4 bases, 5 bases, 6 bases, 7 bases, 9 bases, 10 bases, 15 bases, 20 bases, etc. in length. In some embodiments, the RDG further comprises at least one nucleotide complementary to a nucleotide of the concatenation site. In some embodiments, the RDG comprises 3 bases complementary to the donor site sequence after the concatenation site in the 5′ to 3′ direction. In some embodiments, the RDG comprises 4 bases complementary to the donor site sequence after the concatenation site in the 5′ to 3′ direction. In some embodiments, the RDG comprises 5 bases complementary to the donor site sequence after the concatenation site in the 5′ to 3′ direction. In some embodiments, the RDG comprises 6 bases complementary to the donor site sequence after the concatenation site in the 5′ to 3′ direction. In some embodiments, the RDG comprises 7 bases complementary to the donor site sequence after the concatenation site in the 5′ to 3′ direction.

[0251] The donor site sequence may refer to the wild-type RE-LE or a subsequence thereof. The donor site sequence may refer to sequences derived or engineered from the wild-type RE-LE or non-coding end sequences, including substitutions, insertions, deletions, and truncations to as few as 5 bases. Subsequences of the donor site base-pair with subsequences of the bridgeRNA found within the donor binding loop. In conjunction with these teachings, the donor site sequence may comprise LD and RD sequences that are complementary, at least in part, to LDG and RDG sequences of a bridgeRNA molecule, respectively. In some embodiments, in the context of formation of an IS110 transpososome complex, the donor site sequence refers to a DNA sequence to which a bridgeRNA sequence is designed to have portions complementary to both strands of the donor site sequence, where base-pairing between a donor site sequence and a bridgeRNA sequence promotes the formation of a IS110 transposition complex.

[0252] The target site sequence may refer to the wild-type LF-RF or a subsequence thereof. The target site sequence may refer to sequences derived or engineered from the wild-type LF-RF sequences, including substitutions, insertions, deletions, and truncations to as few as 5 bases. Subsequences of the target site base-pair with subsequences of the bridgeRNA found within the target binding loop. The target site may also be referred to as the “acceptor target,” “acceptor target site,” “target sequence,” or “target site.” In conjunction with these teachings, the target site sequence may comprise LT and RT sequences that are complementary, at least in part, to LTG and RTG sequences of a bridgeRNA molecule, respectively. In some embodiments, in the context of formation of an IS110 transpososome complex, the target site sequence refers to a DNA sequence to which a bridgeRNA sequence is designed to have portions complementarity to both strands of the target site sequence, where base-pairing between a target site sequence and a bridgeRNA sequence promotes the formation of a IS110 transposition complex.

[0253] In some embodiments, the 3′ end of the bridgeRNA can further comprise a nucleotide sequence that corresponds to a nucleotide sequence derived from the coding sequence of the recombinase found in the natural IS element. In some embodiments, the 3′ end of the bridgeRNA can further comprise a nucleotide sequence that corresponds to about 100 nucleotides derived from the 5′ end of coding sequence of the recombinase found in the natural IS element. See FIGS. 40A-D. In some embodiments, the 3′ end of the bridgeRNA can further comprise a nucleotide sequence that corresponds to about 100 nucleotides derived from the 5′ end of coding sequence of the recombinase found in the natural IS element (e.g., when bridgeRNA is encoded on the bottom strand of the IS element). In some embodiments, the 5′ end of the bridgeRNA can further comprise a nucleotide sequence that corresponds to a nucleotide sequence derived from the coding sequence of the recombinase found in the natural IS element. In some embodiments, the 5′ end of the bridgeRNA can further comprise a nucleotide sequence that corresponds to about 100 nucleotides derived from the 3′ end of coding sequence of the recombinase found in the natural IS element.

E.4. Core bridgeRNA Reprogramming

[0254] Disclosed herein is exemplary reprogramming of the target binding loop of a bridgeRNA in IS110 family transposase embodiments that use a core sequence. Exemplary reprogramming of bridgeRNA is shown in FIG. 4. Any target site can be targeted for insertion by reprogramming the nucleotide sequences of LTG and RTG so they are complementary to the target site sequence of interest. For example, in order to target the target site sequence X₁X₂X₃X₄X₅X₆X₇X₈X₉X₁₀X₁₁ where X is any nucleotide, and X₈X₉ are the core, the bridgeRNA encodes an LTG in the 5′ to 3′ direction X₁X₂X₃X₄X₅X₆X₇X₈ and an RTG in the 5′ to 3′ direction Y₁₁Y₁₀Y₉Y₈ where Y is the complementary nucleotide to X. In some embodiments, the bridgeRNA encodes an LTG in the 5′ to 3′ direction X₁X₂X₃X₄X₅X₆X₇X₈X₉. In some embodiments, the bridgeRNA encodes an RTG in the 5′ to 3′ direction Y₁₁Y₁₀Y₉ where Y is the complementary nucleotide to X. In some embodiments, the bridgeRNA encodes an LTG in the 5′ to 3′ direction X₁X₂X₃X₄X₅X₆X₇. In some embodiments, the bridgeRNA encodes an RTG in the 5′ to 3′ direction Y₁Y₁₀ where Y is the complementary nucleotide to X. In some embodiments the target site sequence extends beyond X₁₁ by one or more nucleotides, (e.g., by one nucleotide to X₁X₂X₃X₄X₅X₆X₇X₈X₉X₁₀X₁₁X₁₂, by two nucleotides to X₁X₂X₃X₄X₅X₆X₇X₈X₉X₁₀X₁₁X₁₂X₁₃, by three nucleotides to X₁X₂X₃X₄X₅X₆X₇X₈X₉X₁₀X₁₁X₁₂X₁₃X₁₄, by four nucleotides to X₁X₂X₃X₄X₅X₆X₇X₈X₉X₁₀X₁₁X₁₂X₁₃X₁₄X₁₅, etc.) and the bridgeRNA encodes an RTG in the 5′ to 3′ direction Y₁₂Y₁₁Y₁₀, Y₁₂Y₁₁Y₁₀Y₉, Y₁₂Y₁₁Y₁₀Y₉Y₈, Y₁₃Y₁₂Y₁₁Y₁₀, Y₁₃Y₁₂Y₁₁Y₁₀Y₉, Y₁₃Y₁₂Y₁₁Y₁₀Y₉Y₈, Y₁₄Y₁₃Y₁₂Y₁₁Y₁₀, Y₁₄Y₁₃Y₁₂Y₁₁Y₁₀Y₉, Y₁₄Y₁₃Y₁₂Y₁₁Y₁₀Y₉Y₈, Y₁₅Y₁₄Y₁₃Y₁₂Y₁₁Y₁₀Y₉, or Y₁₅Y₁₄Y₁₃Y₁₂Y₁₁Y₁₀Y₉Y₈, where Y is the complementary nucleotide to X. In some embodiments the target site sequence extends in the other direction beyond X₁ by one or more nucleotides, (e.g., by one nucleotide to X₋₁X₁X₂X₃X₄X₅X₆X₇X₈X₉X₁₀X₁₁X₁₂, etc.) and the bridgeRNA encodes an LTG in the 5′ to 3′ direction X₋₁X₁X₂X₃X₄X₅X₆X₇X₈ or X₋₁X₁X₂X₃X₄X₅X₆X₇X₈X₉ etc. In some embodiments, the LTG or RTG can be extended further to increase the length of homology to their respective target site sequences. In some embodiments, the target site can comprise one or two additional nucleotides between X₇ and X₈ or between X₉ and X₁₀ which are not bound by LTG or RTG. In some embodiments, the core comprises a single nucleotide (i.e., there is either no X₈ or no X₉). In some embodiments, the LTG and/or RTG are partially complementary to their respective target site sequences of the target DNA, i.e., there is non-canonical base pairing, mismatch and/or non-contiguous tolerance. In some embodiments, there is a single mismatch or non-canonical base pair in the LTG or RTG nucleotide sequence, i.e., one of X₁X₂X₃X₄X₅X₆X₇X₈X₉ or [Y₁₄Y₁₃Y₁₂ (if present)]Y₁₁Y₁₀[Y₉Y₈ (if present)] comprises a mismatch or non-canonical base pair with the target site sequence. In some embodiments, X₄ of the LTG non-canonically base pairs with the target site sequence (e.g., X₄ of the LTG is a “G” which base pairs with a “T” in the target site sequence. In some embodiments, there are two, three or four mismatches or non-canonical base pairs which can be in the LTG, in the RTG, or spread across the LTG and RTG, e.g., two, three, or four of X₁X₂X₃X₄X₅X₆X₇X₈X₉ or [Y₁₄Y₁₃Y₁₂ (if present)]Y₁₁Y₁₀[Y₉Y₈ (if present)] comprises a mismatch or non-canonical base pair with the target site sequence. In some embodiments, the two, three or four mismatches or non-canonical base pairs are contiguous. In some embodiments, the two, three or four mismatches or non-canonical base pairs are non-contiguous. In some embodiments, the LTG and/or RTG are partially complementary to their respective target site sequences of the target DNA so that there are one, two, three, or four nucleotides dispersed within LTG and/or RTG that do not base pair with the target DNA and form bulges. A person of skill in the art understands that in RNA “T” is “U.” Although the target site is exemplified as 11 nucleotides in length, in some embodiments, the target site may be shorter or longer. In some embodiments, the target site length is 5 nucleotides, 6 nucleotides, 7 nucleotides, 8 nucleotides, 9 nucleotides, 10 nucleotide, 11 nucleotides, 12 nucleotides, 13 nucleotides, 14 nucleotides, 15 nucleotides, 16 nucleotides, 17 nucleotides, 18 nucleotides, 19 nucleotides, 20 nucleotides, 21 nucleotides, 22 nucleotides, 23 nucleotides, 24 nucleotides, 25 nucleotides, 26 nucleotides, 27 nucleotides, 28 nucleotides, 29 nucleotides, or 30 nucleotides. The length of LTG and RTG can accordingly vary with the target site length. The core X₈X₉ of the target site sequence of interest is the same as the core X₈X₉ of the donor site sequence. In some embodiments, the non-canonical base pairing is non-Watson-Crick base pairing (i.e., is not a G-C base pair or A-T/U base pair). In some embodiments, the non-canonical base pairing is wobble base pairing. In some embodiments, the non-canonical base pairing is Hoogsteen base pairing. In some embodiments, the non-canonical base pairing comprises a rG-dT base pair, a rU-dG base pair, a rA-dC base pair, a rC-dA base pair, a rA-dG base pair, or a rG-dG base pair.

[0255] In some embodiments, disclosed herein are three bridgeRNA reprogramming approaches that can increase the specificity and/or efficiency of the system. First, in some embodiments, the bridgeRNA is reprogrammed so that LTG and/or RTG have longer homology to the target site sequence. In this embodiment, the target binding loop sequence itself is not made longer but the nucleotide sequence is reprogrammed so that additional nucleotide bases of the target binding loop sequence of the bridgeRNA are complementary to the target site sequence. For example, a bridgeRNA that has a 9 base LTG that is complementary to the target site sequence can be reprogrammed so that additional bases of bridgeRNA are complementary to the target site sequence resulting in an LTG with longer homology to the target site sequence. In some embodiments, the LTG comprises at least 7 bases, 8 bases, 9 bases, 10 bases, 15 bases, 20 bases, etc. in length. In some embodiments, the LTG further comprises at least one nucleotide complementary to a nucleotide of the core sequence. In some embodiments, the LTG comprises 7 bases complementary to the target site sequence before the core sequence in the 5′ to 3′ direction. In some embodiments, the LTG comprises 8 bases complementary to the target site sequence before the core sequence in the 5′ to 3′ direction. In some embodiments, the LTG comprises 9 bases complementary to the target site sequence before the core sequence in the 5′ to 3′ direction. For example, a bridgeRNA that has a 4 base RTG that is complementary to the target site sequence can be reprogrammed so that additional bases of bridgeRNA are complementary to the target site sequence resulting in an RTG with longer homology to the target site sequence. In some embodiments, the RTG comprises at least 2 bases, 3 bases, 4 bases, 5 bases, 6 bases, 7 bases, 9 bases, 10 bases, 15 bases, 20 bases, etc. in length. In some embodiments, the RTG further comprises at least one nucleotide complementary to a nucleotide of the core sequence. In some embodiments, the RTG comprises 3 bases complementary to the target site sequence after the core sequence in the 5′ to 3′ direction. In some embodiments, the RTG comprises 4 bases complementary to the target site sequence after the core sequence in the 5′ to 3′ direction. In some embodiments, the RTG comprises 5 bases complementary to the target site sequence after the core sequence in the 5′ to 3′ direction. In some embodiments, the RTG comprises 6 bases complementary to the target site sequence after the core sequence in the 5′ to 3′ direction. In some embodiments, the RTG comprises 7 bases complementary to the target site sequence after the core sequence in the 5′ to 3′ direction.

[0256] Second, in some embodiments, the bridgeRNA is reprogrammed so that LTG and/or RTG are shifted relative to each other so that the span of bases of the target site sequence bound by the LTG and RTG is longer. In this embodiment, the target binding loop sequence itself is not made longer but the nucleotide sequence is reprogrammed so that LTG and/or RTG are complementary to the target site sequence so that they span a longer sequence, e.g. overlap between where LTG and RTG bind is reduced. For example, a bridgeRNA that has a LTG X₁X₂X₃X₄X₅X₆X₇X₈ and an RTG Y₁₁Y₁₀Y₉ that targets the target site sequence X₁X₂X₃X₄X₅X₆X₇X₈X₉X₁₀X₁₁ can be reprogrammed so that the LTG comprises X₋₁X₁X₂X₃X₄X₅X₆X₇ which in conjunction with the RTG Y₁₁Y₁₀Y₉ now targets the target site sequence X₋₁X₁X₂X₃X₄X₅X₆X₇X₈X₉X₁₀X₁₁ thus increasing the span of bases of the target site sequence bound by the LTG and RTG. In some embodiments, the LTG can be shifted at least 1 base, 2 bases, 3 bases, etc. in length. In another example, a bridgeRNA that has a LTG X₁X₂X₃X₄X₅X₆X₇X₈ and an RTG Y₁₁Y₁₀Y₉ that targets the target site sequence X₁X₂X₃X₄X₅X₆X₇X₈X₉X₁₀X₁₁ can be reprogrammed so that the RTG comprises Y₁₂Y₁₁Y₁₀ which in conjunction with the LTG X₁X₂X₃X₄X₅X₆X₇X₈ now targets the target site sequence X₁X₂X₃X₄X₅X₆X₇X₈X₉X₁₀X₁₁X₁₂ thus increasing the span of bases of the target site sequence bound by the LTG and RTG. In some embodiments, the RTG can be shifted at least 1 base, 2 bases, 3 bases, etc. in length. In some embodiments, both the LTG and RTG can be shifted.

[0257] Third, in some embodiments, the bridgeRNA is reprogrammed so that LTG and/or RTG have longer homology to the target site sequence. In this embodiment, the target binding loop sequence is made longer to include additional nucleotide bases of the target binding loop sequence of the bridgeRNA that are complementary to the target site sequence. For example, a bridgeRNA that has a 9 base LTG that is complementary to the target site sequence can be reprogrammed to insert additional bases into the bridgeRNA that are complementary to the target site sequence so that the LTG has longer homology to the target site sequence. In some embodiments, the LTG comprises at least 7 bases, 8 bases, 9 bases, 10 bases, 15 bases, 20 bases, etc. in length. In some embodiments, the LTG further comprises at least one nucleotide complementary to a nucleotide of the concatenation site. In some embodiments, the LTG comprises 7 bases complementary to the target site sequence before the concatenation site in the 5′ to 3′ direction. In some embodiments, the LTG comprises 8 bases complementary to the target site sequence before the concatenation site in the 5′ to 3′ direction. In some embodiments, the LTG comprises 9 bases complementary to the target site sequence before the concatenation site in the 5′ to 3′ direction. For example, a bridgeRNA that has a 4 base RTG that is complementary to the target site sequence can be reprogrammed to insert additional bases into the bridgeRNA that are complementary to the target site sequence so that the RTG has longer homology to the target site sequence. In some embodiments, the RTG comprises at least 2 bases, 3 bases, 4 bases, 5 bases, 6 bases, 7 bases, 9 bases, 10 bases, 15 bases, 20 bases, etc. in length. In some embodiments, the RTG further comprises at least one nucleotide complementary to a nucleotide of the concatenation site. In some embodiments, the RTG comprises 3 bases complementary to the target site sequence after the concatenation site in the 5′ to 3′ direction. In some embodiments, the RTG comprises 4 bases complementary to the target site sequence after the concatenation site in the 5′ to 3′ direction. In some embodiments, the RTG comprises 5 bases complementary to the target site sequence after the concatenation site in the 5′ to 3′ direction. In some embodiments, the RTG comprises 6 bases complementary to the target site sequence after the concatenation site in the 5′ to 3′ direction. In some embodiments, the RTG comprises 7 bases complementary to the target site sequence after the concatenation site in the 5′ to 3′ direction.

[0258] Disclosed herein is exemplary reprogramming of the donor binding loop of a bridgeRNA in IS110 family transposase embodiments that use a core sequence. Any donor site sequence can be targeted for insertion by reprogramming the nucleotide sequences of LDG and RDG so they are complementary to the donor site sequence of interest. For example, in order to target the donor site STIR-Xₙ₁—X₁X₂X₃X₄X₅X₆X₇X₈X₉X₁₀X₁₁—X₁₂-STIR where X is any nucleotide, STIR is optional, but if present is a sub-terminal inverted repeat comprising 2 to 20 nucleotides (e.g., such as a three nucleotide STIR “ATA” and “TAT”), and X₈X₉ are the core, and n1 and n2 can independently be zero to 10, the bridgeRNA encodes an LDG in the 5′ to 3′ direction X₁X₂X₃X₄X₅X₆X₇X₈ and an RDG in the 5′ to 3′ direction Y₁₁Y₁₀Y₉Y₈ where Y is the complementary nucleotide to X. In some embodiments, the bridgeRNA encodes an LDG in the 5′ to 3′ direction X₁X₂X₃X₄X₅X₆X₇X₈X₉. In some embodiments, the bridgeRNA encodes an RDG in the 5′ to 3′ direction Y₁₁Y₁₀Y₉ where Y is the complementary nucleotide to X. In some embodiments, the bridgeRNA encodes an LDG in the 5′ to 3′ direction X₁X₂X₃X₄X₅X₆X₇. In some embodiments, the bridgeRNA encodes an RDG in the 5′ to 3′ direction Y₁₁Y₁₀ where Y is the complementary nucleotide to X. In some embodiments the donor site sequence extends beyond X₁₁ by one or more nucleotides, (e.g., by one nucleotide to X₁X₂X₃X₄X₅X₆X₇X₈X₉X₁₀X₁₁X₁₂, by two nucleotides to X₁X₂X₃X₄X₅X₆X₇X₈X₉X₁₀X₁₁X₁₂X₁₃, by three nucleotides to X₁X₂X₃X₄X₅X₆X₇X₈X₉X₁₀X₁₁X₁₂X₁₃X₁₄, by four nucleotides to X₁X₂X₃X₄X₅X₆X₇X₈X₉X₁₀X₁₁X₁₂X₁₃X₁₄X₁₅, etc.) and the bridgeRNA encodes an RDG in the 5′ to 3′ direction Y₁₂Y₁₁Y₁₀, Y₁₂Y₁₁Y₁₀Y₉, Y₁₂Y₁₁Y₁₀Y₉Y₈, Y₁₃Y₁₂Y₁₁Y₁₀, Y₁₃Y₁₂Y₁₁Y₁₀Y₉, Y₁₃Y₁₂Y₁₁Y₁₀Y₉Y₈, Y₁₄Y₁₃Y₁₂Y₁₁Y₁₀, Y₁₄Y₁₃Y₁₂Y₁₁Y₁₀Y₉, Y₁₄Y₁₃Y₁₂Y₁₁Y₁₀Y₉Y₈, Y₁₅Y₁₄Y₁₃Y₁₂Y₁₁Y₁₀Y₉, or Y₁₅Y₁₄Y₁₃Y₁₂Y₁₁Y₁₀Y₉Y₈, where Y is the complementary nucleotide to X. In some embodiments the donor site sequence extends in the other direction beyond X₁ by one or more nucleotides, (e.g., by one nucleotide to X₋₁X₁X₂X₃X₄X₅X₆X₇X₈X₉X₁₀X₁₁X₁₂, etc.) and the bridgeRNA encodes an LDG in the 5′ to 3′ direction X₋₁X₁X₂X₃X₄X₅X₆X₇X₈ etc. In some embodiments, the LDG or RDG can be extended further to increase the length of homology to their respective target site sequence. In some embodiments, the donor site can comprise one or two additional nucleotides between X₇ and X₈ or between X₉ and X₁₀ which are not bound by LDG or RDG. In some embodiments, the core comprises a single nucleotide (i.e., there is either no X₈ or no X₉). A person of skill in the art understands that in RNA “T” is “U.” In some embodiments, the LDG and/or RDG are partially complementary to their respective donor site sequences of the donor DNA, i.e., there is non-canonical base pairing, mismatch and/or non-contiguous tolerance. In some embodiments, there is a single mismatch in the LDG or RDG nucleotide sequence, e.g., one of X₁X₂X₃X₄X₅X₆X₇X₈ or [Y₁₄Y₁₃Y₁₂ (if present)]Y₁₁Y₁₀[Y₉Y₈ (if present)] comprises a mismatch or non-canonical base pair with the donor site sequence. In some embodiments, Y₁₃ of the RDG non-canonically base pairs with the target site sequence (e.g., Y₁₃ of the RDG is a “G” which base pairs with a “T” in the target site sequence). In some embodiments, Y₁₂ of the RDG non-canonically base pairs with the target site sequence (e.g., Y₁₂ of the RDG is a “G” which base pairs with a “T” in the target site sequence). In some embodiments, the nucleotides of the donor site sequence may show a sequence preference. In some embodiments, there are two, three or four mismatches or non-canonical base pairs which can be in the LDG, in the RDG, or spread across the LDG and RDG, e.g., two, three, or four of X₁X₂X₃X₄X₅X₆X₇X₈ or [Y₁₄Y₁₃Y₁₂ (if present)]Y₁₁Y₁₀[Y₉Y₈ (if present)] comprises a mismatch or non-canonical base pair with the donor site sequence. In some embodiments, Y₁₄Y₁₃ comprise high mismatch tolerance with the donor site sequence. In some embodiments, the two, three or four mismatches or non-canonical base pairs are contiguous. In some embodiments, the two, three or four mismatches or non-canonical base pairs are non-contiguous. In some embodiments, Y₁₄Y₁₃ comprise high mismatch tolerance with the donor site sequence. In some embodiments, the LDG and/or RDG are partially complementary to their respective donor site sequences of the donor DNA so that there are one, two, three, or four nucleotides dispersed within LDG and/or RDG that dₒ not base pair with the donor DNA and form bulges (see e.g., FIG. 36A). Although the donor site sequence between STIR-Xₙ₁ and Xₙ₂-STIR is exemplified as 11 nucleotides in length, in some embodiments, the donor site between the STIRs may be shorter or longer. In some embodiments, the target site length is 5 nucleotides, 6 nucleotides, 7 nucleotides, 8 nucleotides, 9 nucleotides, 10 nucleotide, 11 nucleotides, 12 nucleotides, 13 nucleotides, 14 nucleotides, 15 nucleotides, 16 nucleotides, 17 nucleotides, 18 nucleotides, 19 nucleotides, 20 nucleotides, 21 nucleotides, 22 nucleotides, 23 nucleotides, 24 nucleotides, 25 nucleotides, 26 nucleotides, 27 nucleotides, 28 nucleotides, 29 nucleotides, or 30 nucleotides. The length of LDG and RDG can accordingly vary with the donor site length. The core X₈X₉ of the donor site sequence of interest is the same as the core X₈X₉ of the target site sequence. In some embodiments, the STIR, if present, comprises a G/T rich nucleotide sequence. In some embodiments, the 5′ STIR, if present, comprises a G/T rich nucleotide sequence. In some embodiments, the non-canonical base pairing is non-Watson-Crick base pairing (i.e., is not a G-C base pair or A-T/U base pair). In some embodiments, the non-canonical base pairing is wobble base pairing. In some embodiments, the non-canonical base pairing is Hoogsteen base pairing. In some embodiments, the non-canonical base pairing comprises a rG-dT base pair, a rU-dG base pair, a rA-dC base pair, a rC-dA base pair, a rA-dG base pair, or a rG-dG base pair.

[0259] In some embodiments, disclosed herein are three bridgeRNA reprogramming approaches that can increase the specificity and/or efficiency of the system. First, in some embodiments, the bridgeRNA is reprogrammed so that LDG and/or RDG have longer homology to the donor site sequence. In this embodiment, the donor binding loop sequence itself is not made longer but the nucleotide sequence is reprogrammed so that additional nucleotide bases of the donor binding loop sequence of the bridgeRNA are complementary to the donor site sequence. For example, a bridgeRNA that has a 9 base LDG that is complementary to the donor site sequence can be reprogrammed so that additional bases of bridgeRNA are complementary to the donor site sequence resulting in an LDG with longer homology to the donor site sequence. In some embodiments, the LTG comprises at least 7 bases, 8 bases, 9 bases, 10 bases, 15 bases, 20 bases, etc. in length. In some embodiments, the LDG further comprises at least one nucleotide complementary to a nucleotide of the core sequence of the donor site sequence. In some embodiments, the LDG comprises 7 bases complementary to the donor site sequence before the core sequence in the 5′ to 3′ direction. In some embodiments, the LDG comprises 8 bases complementary to the donor site sequence before the core sequence in the 5′ to 3′ direction. In some embodiments, the LDG comprises 9 bases complementary to the donor site sequence before the core sequence in the 5′ to 3′ direction. For example, a bridgeRNA that has a 4 base RDG that is complementary to the donor site sequence can be reprogrammed so that additional bases of bridgeRNA are complementary to the donor site sequence resulting in an RDG with longer homology to the donor site sequence. In some embodiments, the RDG comprises at least 2 bases, 3 bases, 4 bases, 5 bases, 6 bases, 7 bases, 9 bases, 10 bases, 15 bases, 20 bases, etc. in length. In some embodiments, the RDG further comprises at least one nucleotide complementary to a nucleotide of the core sequence. In some embodiments, the RDG comprises 3 bases complementary to the donor site sequence after the core sequence in the 5′ to 3′ direction. In some embodiments, the RDG comprises 4 bases complementary to the donor site sequence after the core sequence in the 5′ to 3′ direction. In some embodiments, the RDG comprises 5 bases complementary to the donor site sequence after the core sequence in the 5′ to 3′ direction. In some embodiments, the RDG comprises 6 bases complementary to the donor site sequence after the core sequence in the 5′ to 3′ direction. In some embodiments, the RDG comprises 7 bases complementary to the donor site sequence after the core sequence in the 5′ to 3′ direction.

[0260] Second, in some embodiments, the bridgeRNA is reprogrammed so that LDG and/or RDG are shifted relative to each other so that the span of bases of the donor site sequence bound by the LDG and RDG is longer. In this embodiment, the donor binding loop sequence itself is not made longer but the nucleotide sequence is reprogrammed so that LDG and/or RDG are complementary to the donor site sequence so that they span a longer sequence, e.g., overlap between where LDG and RDG bind is reduced. For example, a bridgeRNA that has a LDG X₁X₂X₃X₄X₅X₆X₇X₈ and an RDG Y₁₁Y₁₀Y₉ that targets the donor site sequence X₁X₂X₃X₄X₅X₆X₇X₈X₉X₁₀X₁₁ can be reprogrammed so that the LDG comprises X₋₁X₁X₂X₃X₄X₅X₆X₇ which in conjunction with the RDG Y₁₁Y₁₀Y₉ now targets the donor site sequence X₋₁X₁X₂X₃X₄X₅X₆X₇X₈X₉X₁₀X₁₁ thus increasing the span of bases of the donor site sequence bound by the LDG and RDG. In some embodiments, the LDG can be shifted at least 1 base, 2 bases, 3 bases, etc. in length. In another example, a bridgeRNA that has a LDG X₁X₂X₃X₄X₅X₆X₇X₈ and an RDG Y₁₁Y₁₀Y₉ that targets the donor site sequence X₁X₂X₃X₄X₅X₆X₇X₈X₉X₁₀X₁₁ can be reprogrammed so that the RDG comprises Y₁₂Y₁₁Y₁₀ which in conjunction with the LDG X₁X₂X₃X₄X₅X₆X₇X₈ now targets the target site sequence X₁X₂X₃X₄X₅X₆X₇X₈X₉X₁₀X₁X₁₂ thus increasing the span of bases of the target site sequence bound by the LDG and RDG. In some embodiments, the RDG can be shifted at least 1 base, 2 bases, 3 bases, etc. in length. In some embodiments, both the LDG and RDG can be shifted.

[0261] Third, in some embodiments, the bridgeRNA is reprogrammed so that LDG and/or RDG have longer homology to the donor site sequence. In this embodiment, the donor binding loop sequence is made longer to include additional nucleotide bases of the donor binding loop sequence of the bridgeRNA that are complementary to the donor site sequence. For example, a bridgeRNA that has a 9 base LDG that is complementary to the donor site sequence can be reprogrammed to insert additional bases into the bridgeRNA that are complementary to the donor site sequence so that the LDG has longer homology to the target site sequence. In some embodiments, the LDG comprises at least 7 bases, 8 bases, 9 bases, 10 bases, 15 bases, 20 bases, etc. in length. In some embodiments, the LDG further comprises at least one nucleotide complementary to a nucleotide of the core sequence. In some embodiments, the LDG comprises 7 bases complementary to the donor site sequence before the core sequence in the 5′ to 3′ direction. In some embodiments, the LDG comprises 8 bases complementary to the donor site sequence before the core sequence in the 5′ to 3′ direction. In some embodiments, the LDG comprises 9 bases complementary to the donor site sequence before the core sequence in the 5′ to 3′ direction. For example, a bridgeRNA that has a 4 base RDG that is complementary to the donor site sequence can be reprogrammed to insert additional bases into the bridgeRNA that are complementary to the donor site sequence so that the RDG has longer homology to the target site sequence. In some embodiments, the RDG comprises at least 2 bases, 3 bases, 4 bases, 5 bases, 6 bases, 7 bases, 9 bases, 10 bases, 15 bases, 20 bases, etc. in length. In some embodiments, the RDG further comprises at least one nucleotide complementary to a nucleotide of the core sequence. In some embodiments, the RDG comprises 3 bases complementary to the donor site sequence after the core sequence in the 5′ to 3′ direction. In some embodiments, the RDG comprises 4 bases complementary to the donor site sequence after the core sequence in the 5′ to 3′ direction. In some embodiments, the RDG comprises 5 bases complementary to the donor site sequence after the core sequence in the 5′ to 3′ direction. In some embodiments, the RDG comprises 6 bases complementary to the donor site sequence after the core sequence in the 5′ to 3′ direction. In some embodiments, the RDG comprises 7 bases complementary to the donor site sequence after the core sequence in the 5′ to 3′ direction.

[0262] The donor site sequence may refer to the wild-type RE-core-LE or a subsequence thereof. The donor site may refer to sequences derived or engineered from the wild-type RE-core-LE or non-coding end sequences, including substitutions, insertions, deletions, and truncations to as few as 5 bases. Subsequences of the donor site sequence base-pair with subsequences of the bridgeRNA found within the donor binding loop. In conjunction with these teachings, the donor site sequence may comprise LD and RD sequences that are complementary, at least in part, to LDG and RDG sequences of a bridgeRNA molecule, respectively. In some embodiments, in the context of formation of an IS110 transpososome complex, the donor site sequence refers to a DNA sequence to which a bridgeRNA sequence is designed to have portions complementarity to both strands of the donor site sequence, where base-pairing between a donor site sequence and a bridgeRNA sequence promotes the formation of a IS110 transposition complex.

[0263] The target site sequence may refer to the wild-type LF-RF or a subsequence thereof. The target site sequence may refer to sequences derived or engineered from the wild-type LF-RF sequences, including substitutions, insertions, deletions, and truncations to as few as 5 bases. Subsequences of the target site base-pair with subsequences of the bridgeRNA found within the target binding loop. The target site may also be referred to as the “acceptor target,” “acceptor target site,” “target sequence,” or “target site.” In conjunction with these teachings, the target site sequence may comprise LT and RT sequences that are complementary, at least in part, to LTG and RTG sequences of a bridgeRNA molecule, respectively. In some embodiments, in the context of formation of an IS110 transpososome complex, the target site sequence refers to a DNA sequence to which a bridgeRNA sequence is designed to have portions complementarity to both strands of the target site sequence, where base-pairing between a target site sequence and a bridgeRNA sequence promotes the formation of a IS110 transposition complex.

[0264] In some embodiments, the 3′ end of the bridgeRNA can further comprise a nucleotide sequence that corresponds to a nucleotide sequence derived from the coding sequence of the recombinase found in the natural IS element. In some embodiments, the 3′ end of the bridgeRNA can further comprise a nucleotide sequence that corresponds to about 100 nucleotides derived from the 5′ end of coding sequence of the recombinase found in the natural IS element. See FIGS. 40A-D. In some embodiments, the 3′ end of the bridgeRNA can further comprise a nucleotide sequence that corresponds to about 100 nucleotides derived from the 5′ end of coding sequence of the recombinase found in the natural IS element (e.g., when bridgeRNA is encoded on the bottom strand of the IS element). In some embodiments, the 5′ end of the bridgeRNA can further comprise a nucleotide sequence that corresponds to a nucleotide sequence derived from the coding sequence of the recombinase found in the natural IS element. In some embodiments, the 5′ end of the bridgeRNA can further comprise a nucleotide sequence that corresponds to about 100 nucleotides derived from the 3′ end of coding sequence of the recombinase found in the natural IS element.

### F. Split Systems

[0265] In some embodiments, the present invention contemplates a split system such as described in Berrios K N, Evitt N H, DeWeerd R A, Ren D, Luo M, Barka A, Wang T, Bartman C R, Lan Y, Green A M, Shi J, Kohli R M, Controllable genome editing with split-engineered base editors, Nat Chem Biol., 2021 December; 17(12):1262-1270). In some embodiments, a split IS110 system refers to the expression of subsequences of any IS110 transposase protein from different promoters. It may also refer to a system in which protein sequences derived from IS110 transposase proteins are encoded or delivered as more than one molecule, with the intention that they reconstitute and have functional activity. An example is a first polypeptide encoding a protein comprising the RuvC-like DEDD catalytic domain and a linker and a second polypeptide encoding a protein comprising the transposase domain. In some embodiments, the linker is a coiled-coil domain. Another example is a first polypeptide encoding a protein comprising the RuvC-like DEDD catalytic domain and a second polypeptide encoding a protein comprising a linker and a transposase domain. In some embodiments, the linker is a coiled-coil domain. In some embodiments, the RuvC-like DEDD catalytic domain comprises an amino acid sequence that is 50-100% identical to the RuvC-like DEDD catalytic domain sequences provided in FIG. 16 (SEQ ID NOS: 10176-10523) or SEQ ID NOS: 10524-20350 or 40357-516430 as described in Section C.1, forms a similar tertiary structure to the RuvC-like DEDD catalytic domain as described in Section C.1, comprises an amino acid sequence that is 20-100% identical to the RuvC-like DEDD catalytic domain sequences provided in FIG. 16 (SEQ ID NOS: 10176-10523) or SEQ ID NOS: 10524-20350 or 40357-516430 and forms a similar tertiary structure to the RuvC-like DEDD catalytic domain as described in Section C.1, and/or comprises an amino acid sequence that is 50-100% identical to a protein or protein domain comprising any of the motifs or sequences in FIGS. 21-28 as described in Section C.1. In some embodiments, the linker domain comprises an amino acid sequence that is 50-100% identical to the linker domain sequences provided in FIG. 16 (SEQ ID NOS: 10176-10523) or SEQ ID NOS: 10524-20350 or 40357-516430 as described in Section C.3. In some embodiments, the transposase domain comprises an amino acid sequence that is 50-100% identical to the transposase domain sequences provided in FIG. 16 (SEQ ID NOS: 10176-10523) or SEQ ID NOS: 10524-20350 or 40357-516430 as described in Section C.2, forms a similar tertiary structure to the transposase domain as described in Section C.2, comprises an amino acid sequence that is 20-100% identical to the transposase domain sequences provided in FIG. 16 (SEQ ID NOS: 10176-10523) or SEQ ID NOS: 10524-20350 or 40357-516430 and forms a similar tertiary structure to the transposase domain as described in Section C.2, and/or comprises an amino acid sequence that is 50-100% identical to a protein or protein domain comprising any of the motifs or sequences in FIGS. 29-34 as described in Section C.2.

[0266] A split IS110 system may reconstitute the IS110 transposase on its own by binding the bridgeRNA. A split IS110 system may be induced to reconstitute by tethering a known dimerization system, such as FKB-FKBP to each of the two polypeptides similar to the base editing approach cited in Berrios et al., 2021. The IS110 transposase protein may also be delivered in one or more pieces without tethering to an association domain, doing so in such a way that allows reconstitution of the full functional protein, similar to the approach employed for making split-GFP molecules.

[0267] Provision of a “pulse” of genome edits may be performed by providing an inducer for the expression of a polypeptide comprising an IS110 transposase or one or more domains of an IS110 transposase or providing a molecule to allow reconstitution of the functional complex. bridgeRNAs may also be split into one or molecules and similarly reconstitute within a transpososome complex.

[0268] In one embodiment, the present invention contemplates an approach to engineer IS110 systems by the provision of IS110 domains as individually expressed proteins. One or more individual proteins may comprise a RuvC-like DEDD catalytic domain and linker domain, a linker domain and transposase domain, a RuvC-like DEDD catalytic domain, a linker domain, or a transposase domain. These proteins may be co-expressed, including in the presence of a bridgeRNA, a DNA molecule comprising a donor site sequence, and/or a DNA molecule comprising a target site sequence, for the purposes of genome engineering of any other techniques described herein.

[0269] The present invention also contemplates, for example, splitting the bridgeRNA anywhere along its sequence. Such an embodiment is applicable to any bridgeRNA disclosed herein, including those described in Sections D and E. In one embodiment, the bridgeRNA is split so that the target binding loop and donor binding loop are on separate RNA molecules. In one embodiment, a first RNA molecule comprises a stem-loop comprising a target binding loop and a second RNA molecule comprises a stem-loop comprising a donor binding loop. In some embodiments, the first and/or second RNA molecule further comprise portions of a bridgeRNA molecule (e.g., 5′ stem-loop or 3′ extension). In one embodiment, a first RNA molecule comprises a bridgeRNA and a second RNA molecule comprises a stem-loop comprising a target binding loop, optionally wherein one or more of the loops of the bridgeRNA encodes non-targeting guides. In one embodiment, a first RNA molecule comprises a bridgeRNA and a second RNA molecule comprises a stem-loop comprising a donor binding loop, optionally wherein one or more of the loops of the bridgeRNA encodes non-targeting guides. In some embodiments, the portions of the split bridgeRNA described herein are encoded on different DNA molecules. In some embodiments, the portions of the split bridgeRNA described herein are encoded on the same DNA molecule expressed from different promoters. Thus, in some embodiments the system comprises a nucleic acid encoding a first portion of a split bridgeRNA operably linked to a first promoter and a second portion of a split bridgeRNA operably linked to a second promoter.

[0270] In certain aspects, provided herein at split bridgeRNA systems that use ribozymes on the 5′ or 3′ end of a bridgeRNA or on any portion of a split bridgeRNA such that cleavage occurs at an intended location (e.g., but not limited to hammerhead (HH) ribozyme, hepatitis delta virus (HDV) ribozyme, or others known in the art.). For example, a ribozyme can be used such that a bridgeRNA can be split after transcription from a single promoter. In one embodiment, an RNA molecule comprising a target binding loop-a HH ribozyme site-a HDV ribozyme site-a donor binding loop results in a target binding loop and donor binding loop as separate RNA molecules after cleavage with ribozyme. As such, in one embodiment, the system comprises a RNA molecule comprising a target binding loop-a first ribozyme site-a second ribozyme site and a donor binding loop. In another embodiment, the system comprises a donor binding loop-a first ribozyme site-a second ribozyme site and a target binding loop. In some embodiments the first and second ribozyme sites are a HH ribozyme site and a HDV ribozyme site. In some embodiments, the system comprises a nucleic acid encoding any of the split bridgeRNAs disclosed herein.

[0271] In certain aspects, provided herein at split bridgeRNA systems that uses a group 1 intron between the target binding loop and donor binding loop, such that full-length intron circularization of the group 1 intron results in a target binding loop and donor binding loop as separate RNA molecules. As such, in one embodiment, the system comprises a RNA molecule comprising a target binding loop-a group 1 intron-a donor binding loop. In some embodiments, the system comprises a nucleic acid encoding a RNA molecule comprising a target binding loop-a group 1 intro-a donor binding loop.

[0272] Such systems can be used to control the transposition reaction, including for example, providing temporal control. A split bridgeRNA is also contemplated for use in massively parallel combinatorial screens employing pool-on-pool assays of target and donor loops with desired specificities, structures, or functions. All approaches using a split transposase protein or bridgeRNA would be compatible with any embodiment of donor site and target site sequences.

### G. Vectors and Cell Lines

[0273] Several aspects of the invention relate to vector systems comprising one or more vectors, or vectors as such comprising nucleic acid sequences encoding the IS110 elements described herein, IS110 transposases described herein, bridgeRNAs described herein, donor site sequences described herein, and/or target site sequences described herein. Vectors can be designed for expression of transcripts (e.g., nucleic acid transcripts, proteins, or enzymes) in prokaryotic or eukaryotic cells. For example, transcripts can be expressed in bacterial cells such as Escherichia coli, insect cells (using baculovirus expression vectors), yeast cells, or mammalian cells. Suitable host cells are discussed further in Goeddel, GENE EXPRESSION TECHNOLOGY: METHODS IN ENZYMOLOGY 185, Academic Press, San Diego, Calif. (1990). Alternatively, the recombinant expression vector can be transcribed and translated in vitro, for example using T7 promoter regulatory sequences and T7 polymerase.

[0274] Vectors may be introduced and propagated in a prokaryote. In some embodiments, a prokaryote is used to amplify copies of a vector to be introduced into a eukaryotic cell or as an intermediate vector in the production of a vector to be introduced into a eukaryotic cell (e.g., amplifying a plasmid as part of a viral vector packaging system). In some embodiments, a prokaryote is used to amplify copies of a vector and express one or more nucleic acids, such as to provide a source of nucleic acid constructs or one or more proteins for delivery to a host cell or host organism. Expression of proteins in prokaryotes is most often carried out in Escherichia coli with vectors containing constitutive or inducible promoters directing the expression of either fusion or non-fusion proteins. Fusion vectors add a number of amino acids to a protein encoded therein, such as to the amino terminus of a recombinant protein (in this case an IS110 transposase). Such fusion vectors may serve one or more purposes, such as: (i) to increase expression of recombinant protein; (ii) to increase the solubility of the recombinant protein; and (iii) to aid in the purification of the recombinant protein by acting as a ligand in affinity purification. Often, in fusion expression vectors, a proteolytic cleavage site is introduced at the junction of the fusion moiety and the recombinant protein to enable separation of the recombinant protein from the fusion moiety subsequent to purification of the fusion protein. Such enzymes, and their cognate recognition sequences, include Factor Xa, thrombin and enterokinase. Example fusion expression vectors include pGEX (Pharmacia Biotech Inc; Smith and Johnson, 1988. Gene 67: 31-40), pMAL (New England Biolabs, Beverly, Mass.) and pRIT5 (Pharmacia, Piscataway, N.J.) that fuse glutathione S-transferase (GST), maltose E binding protein, or protein A, respectively, to the target recombinant protein.

[0275] As used herein, minicircle refers to small circular plasmids or DNA vectors that are episomal and are produced as a circular expression cassette devoid of any bacterial plasmid backbone. They can be generated from a parental bacterial plasmid that contains a heterologous nucleic acid and two recombinase target sites by intramolecular (cis-) recombination using a site-specific recombinase, such as PhiC31 integrase. Recombination between the two sites generates a minicircle and a leftover miniplasmid. The minicircle can be recovered via separation from the miniplasmid.

[0276] Examples of suitable inducible non-fusion E. coli expression vectors include pTrc (Amrann et al., (1988) Gene 69:301-315) and pET lid (Studier et al., GENE EXPRESSION TECHNOLOGY: METHODS IN ENZYMOLOGY 185, Academic Press, San Diego, Calif. (1990) 60-89).

[0277] In some embodiments, a vector is a yeast expression vector. Examples of vectors for expression in yeast Saccharomyces cerivisae include pYepSec1 (Baldari, et al., 1987. EMBO J. 6: 229-234), pMFa (Kuijan and Herskowitz, 1982. Cell 30: 933-943), pJRY88 (Schultz et al., 1987. Gene 54: 113-123), pYES2 (Invitrogen Corporation, San Diego, Calif.), and picZ (InVitrogen Corp, San Diego, Calif.).

[0278] In some embodiments, a vector drives protein expression in insect cells using baculovirus expression vectors. Baculovirus vectors available for expression of proteins in cultured insect cells (e.g., SF9 cells) include the pAc series (Smith, et al., 1983. Mol. Cell. Biol. 3: 2156-2165) and the pVL series (Lucklow and Summers, 1989. Virology 170: 31-39).

[0279] In some embodiments, a vector is capable of driving expression of one or more sequences in mammalian cells using a mammalian expression vector. Examples of mammalian expression vectors include pCDM8 (Seed, 1987. Nature 329: 840) and pMT2PC (Kaufman, et al., 1987. EMBO J. 6: 187-195). When used in mammalian cells, the expression vector's control functions are typically provided by one or more regulatory elements. For example, commonly used promoters are derived from polyoma, adenovirus 2, cytomegalovirus, simian virus 40, and others disclosed herein and known in the art. For other suitable expression systems for both prokaryotic and eukaryotic cells see, e.g., Chapters 16 and 17 of Sambrook, et al., MOLECULAR CLONING: A LABORATORY MANUAL. 2nd ed., Cold Spring Harbor Laboratory, Cold Spring Harbor Laboratory Press, Cold Spring Harbor, N.Y., 1989.

[0280] In some embodiments, the recombinant mammalian expression vector is capable of directing expression of the nucleic acid preferentially in a particular cell type (e.g., tissue-specific regulatory elements are used to express the nucleic acid). Tissue-specific regulatory elements are known in the art. Non-limiting examples of suitable tissue-specific promoters include the albumin promoter (liver-specific; Pinkert, et al., 1987. Genes Dev. 1: 268-277), lymphoid-specific promoters (Calame and Eaton, 1988. Adv. Immunol. 43: 235-275), in particular promoters of T cell receptors (Winoto and Baltimore, 1989. EMBO J. 8: 729-733) and immunoglobulins (Baneiji, et al., 1983. Cell 33: 729-740; Queen and Baltimore, 1983. Cell 33: 741-748), neuron-specific promoters (e.g., the neurofilament promoter; Byrne and Ruddle, 1989. Proc. Natl. Acad. Sci. USA 86: 5473-5477), pancreas-specific promoters (Edlund, et al., 1985. Science 230: 912-916), and mammary gland-specific promoters (e.g., milk whey promoter; U.S. Pat. No. 4,873,316 and European Application Publication No. 264,166). Developmentally-regulated promoters are also encompassed, e.g., the murine hox promoters (Kessel and Gruss, 1990. Science 249: 374-379) and the α-fetoprotein promoter (Campes and Tilghman, 1989. Genes Dev. 3: 537-546).

[0281] In certain aspects, described herein is a cell comprising a nucleic acid encoding any of the IS110 transposases disclosed herein. In some embodiments, the cell further comprises a nucleic acid encoding a bridgeRNA. In some embodiments, the genome of the cell comprises a donor site sequence or a target site sequence for the IS110 transposase and corresponding bridgeRNA. Such a cell line can be used in a method wherein a nucleic acid comprising a donor site sequence or a target site sequence and a nucleic acid for insertion is introduced into the cell to generate an engineered cell line comprising the nucleic acid of interest inserted into the target site sequence or donor site sequence, respectively. In some embodiments, described herein is a kit comprising a cell comprising a nucleic acid encoding any of the IS110 transposases disclosed herein. In some embodiments, the cell further comprises a nucleic acid encoding a bridgeRNA In some embodiments, the genome of the cell of the kit comprises a donor site sequence or a target site sequence for the IS110 transposases and corresponding bridgeRNA. In some embodiments, the kit further comprises a nucleic acid vector (e.g. plasmid) encoding a bridgeRNA sequence. In some embodiments, in the case that the genome of the cell of the kit comprises a donor site sequence the kit further comprises a nucleic acid vector (e.g. plasmid) comprising a target site sequence. In some embodiments, in the case that the genome of the cell of the kit comprises a target site sequence the kit further comprises a nucleic acid vector (e.g. plasmid) comprising a donor site sequence. In some embodiments, the nucleic acid vector (e.g. plasmid) of the kit further comprises a multicloning site flanked by LE-core (where used) and core (where used)-RE for insertion of a nucleic acid of interest.

[0282] In some cases, expression of the components of the IS110 transposase system described herein are under the control of an inducible promoter or repressor element. The inducible promoter or repressor element can be inserted into the promoter region of a nucleic acid sequence encoding one or more components of the IS110 transposase system described herein to provide temporal and/or spatial control of the expression or activity. In some embodiments, a cell can be engineered with a feedback mechanism so that expression of the IS110 transposase is inactivated after a recombination reaction between a donor site sequence and target site sequence has occurred. For example, upon expression of system components, one or more bridgeRNAs may be provided such that the system effectuates recombination at a desired locus in addition to a DNA molecule encoding the IS110 transposase or bridgeRNA such that the DNA sequence is inverted, excised, or inserted into such that the transposase or bridgeRNA is functionally isolated or separated from the promoter driving its expression.

[0283] Upon delivery of a nucleic acid encoding an IS110 transposase described herein to a cell, the nucleic acid can be transcribed and translated into a IS110 transposase protein. Upon delivery of a DNA nucleic acid encoding a bridgeRNA described herein to a cell, the DNA nucleic acid can be transcribed into a RNA nucleic acid comprising the bridgeRNA. The IS110 transposase protein can form a complex with the bridgeRNA inside the cell.

### H. Methods of the Invention

[0284] In some embodiments, the IS110 transposases described herein are used for genetic engineering and integration of a nucleic acid molecule of interest via site-specific recombination.

[0285] In some embodiments, a polynucleotide comprising a cargo and donor site sequence can undergo an insertion reaction with a target site sequence using a IS110 transposase and a bridgeRNA which is specific for the donor site sequence and target site sequence. In some embodiments, a polynucleotide comprising a cargo and target site sequence can undergo an insertion reaction with a donor site sequence using a IS110 transposase and a bridgeRNA which is specific for the donor site sequence and target site sequence. In some embodiments, a polynucleotide sequence located between a donor site sequence and a target site sequence can be excised or inverted using a IS110 transposase and a bridgeRNA which is specific for the donor site sequence and target site sequence. In some embodiments, a polynucleotide sequence comprising a cargo and two different donor sequences can undergo an insertion reaction with two different target site sequences using a IS110 transposase and two different bridgeRNAs which are specific for each of the donor site sequences and target site sequences. In some embodiments, a polynucleotide sequence comprising a cargo and two different target sequences can undergo an insertion reaction with two different donor site sequences using a IS110 transposase and two different bridgeRNAs which are specific for each of the donor site sequences and target site sequences. In some embodiments, a polynucleotide sequence comprising a cargo and a donor site sequence and a target site sequence can undergo an insertion reaction with a target site sequence and a donor site sequence respectively, using a IS110 transposase and two different bridgeRNAs which are specific for each of the donor site sequences and target site sequences.

[0286] In certain aspects, disclosed herein is a method of integrating a DNA molecule of interest into a sequence specific site of a DNA of interest of a cell, the method comprising introducing into the cell: a nucleic acid editing system described herein. In some embodiments the cell is a prokaryotic cell. In some embodiments, the cell is a bacterial cell. In some embodiments, the cell is a eukaryotic cell. In some embodiments the cell is an archeal cell. In some embodiments, the cell is a fungus cell. In some embodiments, the cell is a yeast cell. In some embodiments, the cell is a plant cell. In some embodiments, the cell is a mammalian cell. In some embodiments, the cell is a human cell. In some embodiments, the DNA of interest of the cell comprises a donor site sequence and the DNA molecule of interest is part of a nucleic acid of the nucleic acid editing system comprising a target site sequence. In some embodiments, the DNA of interest of the cell comprises a target site sequence and the DNA molecule of interest is part of a nucleic acid of the nucleic acid editing system comprising a donor site sequence. In some embodiments, the DNA molecule of interest is flanked by two different donor site sequences. In some embodiments, the DNA molecule of interest is flanked by two different target site sequences. In some embodiments, the DNA molecule of interest is flanked by a donor site sequence and a target site sequence that corresponds to a different donor site sequence. In some embodiments, the sequence of the bridgeRNA was engineered before introduction of the nucleic acid editing system to bind to the donor site sequence and target site sequence. In some embodiments, the DNA of interest of the cell is the genome of the cell. In some embodiments, the DNA of interest of the cell is a plasmid. In some embodiments, the method comprises performing cassette exchange (e.g., recombinase mediated cassette exchange (RMCE) as described in Section E1. In some embodiments, the method comprises inserting one or more minicircles comprising a DNA molecule of interest as described in Section E1.

[0287] In certain aspects, disclosed herein is a method of inverting a DNA sequence of a DNA of interest of a cell, the method comprising introducing into the cell: a nucleic acid editing system disclosed herein, wherein a target site sequence and a donor site sequence are present on the same DNA molecule of interest and the LD of the donor site sequence and the RT of the target site sequence are on the same DNA strand and RD of the donor site sequence and LT of the target site sequence are on the same DNA strand. In some embodiments, the target DNA of interest of the cell is the genome of the cell. In some embodiments, the sequence of the bridgeRNA was engineered before introduction of the nucleic acid editing system to bind to the donor site sequence and the target site sequence.

[0288] In certain aspects, disclosed herein is a method of excising a DNA sequence of a DNA of interest of a cell, the method comprising introducing into the cell: a nucleic acid editing system disclosed herein, wherein a target site sequence and a donor site sequence are present on the same DNA molecule of interest and the LD of the donor site sequence and the LT of the target site sequence are on the same DNA strand. In some embodiments, the target DNA of interest of the cell is the genome of the cell. In some embodiments, the sequence of the bridgeRNA was engineered before introduction of the nucleic acid editing system to bind to the donor site sequence and the target site sequence.

[0289] In certain aspects, disclosed herein is a method of translocating DNA sequences between two linear DNA molecules of interest, the method comprising introducing into a cell: a nucleic acid editing system disclosed herein, wherein a donor site sequence is present on a first linear DNA molecule and a target site sequence is present on a second linear DNA molecule. In some embodiments, the linear DNA molecules of interest of the cell are chromosomes of the cell. In some embodiments, the sequence of the bridgeRNA was engineered before introduction of the nucleic acid editing system to bind to the donor site sequence and target site sequence.

[0290] In certain aspects, disclosed herein is a method of screening bridgeRNA for compatibility with a given donor site sequence and target site sequence. In some embodiments multiple pairs of donor site sequence and target site sequence are screened for ability to effectuate a transposition reaction and/or specificity and/or efficiency of the reaction. In some embodiments, one or more of LTG, RTG, LDG, and RDG of a bridgeRNA are modified (e.g., mutated, lengthened, shortened) and screened for ability to effectuate a transposition reaction and/or specificity and/or efficiency of the reaction. In some embodiments, the method comprises introducing into a cell the bridgeRNAs for screening and a donor molecule and measuring recombination, wherein the cell expresses a IS110 transposase. In some embodiments, recombination is measured using a reporter or sequencing based assay.

[0291] The invention comprehends the use of the compositions of the current invention to establish and utilize transgenic cells or organisms. The invention provides a non-naturally occurring or engineered composition, or one or more polynucleotides encoding components of said composition, or vector or delivery systems comprising one or more polynucleotides encoding components of said composition for use in modifying a target cell in vivo, ex vivo or in vitro and, may be conducted in a manner that alters the cell such that once modified the progeny or cell line of the modified cell retains the altered phenotype. The modified cells and progeny may be part of a multi-cellular organism such as a plant or animal with ex vivo or in vivo application of the IS110 system to desired cell types.

[0292] The invention may be a therapeutic method of treatment. The therapeutic method of treatment may comprise gene or genome editing, or gene therapy. A related method of the invention may be used to create an organism or cell that may be used to model and/or study genetic or epigenetic conditions of interest, such as through a model of mutations of interest or as a disease model. As used herein, “disease” refers to a disease, disorder, or indication in a subject. For example, a method of the invention may be used to create an organism or cell that comprises a modification in one or more nucleic acid sequences associated with a disease, or an organism or cell in which the expression of one or more nucleic acid sequences associated with a disease are altered. Such a nucleic acid sequence may encode a disease associated protein sequence or may be a disease associated control sequence. Accordingly, it is understood that in embodiments of the invention, a subject, patient, organism or cell can be a non-human subject, patient, organism or cell. Thus, the invention provides an organism or cell, produced by the present methods, or a progeny thereof. The progeny may be a clone of the produced organism, or may result from sexual reproduction by crossing with other individuals of the same species to introgress further desirable traits into their offspring. The cell may be in vivo or ex vivo in the cases of multicellular organisms. In the instance where the cell is in culture, a cell line may be established if appropriate culturing conditions are met and preferably if the cell is suitably adapted for this purpose (for instance a stem cell). Bacterial cell lines produced by the invention are also envisaged. Hence, cell lines are also envisaged.

[0293] In some methods, the disease model can be used to study the effects of mutations on the organism or cell and development and/or progression of the disease using measures commonly used in the study of the disease. Alternatively, such a disease model is useful for studying the effect of a pharmaceutically active compound on the disease.

[0294] In some methods, the disease model can be used to assess the efficacy of a potential gene therapy strategy. That is, a disease-associated gene or polynucleotide can be modified such that the disease development and/or progression is inhibited or reduced. In particular, the method comprises modifying a disease-associated gene or polynucleotide such that an altered protein is produced and, as a result, the animal or cell has an altered response. Accordingly, in some methods, a genetically modified organism may be compared with an organism predisposed to development of the disease such that the effect of the gene therapy event may be assessed.

[0295] In another embodiment, this invention provides a method of developing a biologically active agent that modulates a cell signaling event associated with a disease gene. The method comprises contacting a test compound with a cell comprising one or more vectors that drive expression of the IS110 system of the present invention; and detecting a change in a readout that is indicative of a reduction or an augmentation of a cell signaling event associated with, e.g., a mutation in a disease gene contained in the cell.

[0296] A cell model or animal model can be constructed in combination with the method of the invention for screening a cellular function change. Such a model may be used to study the effects of a cellular DNA sequence modified by the IS110 system of the invention on a cellular function of interest. For example, a cellular function model may be used to study the effect of a modified cellular DNA sequence on intracellular signaling or extracellular signaling. Alternatively, a cellular function model may be used to study the effects of a modified cellular DNA sequence on sensory perception. In some such models, one or more cellular DNA sequences associated with a signaling biochemical pathway in the model are modified.

[0297] A transgenic cell in which one or more nucleic acids encoding one or more of the components of the present invention are provided or introduced operably connected in the cell with a regulatory element comprising a promoter of one or more genes of interest. As used herein, the term “IS110 transgenic cell” refers to a cell, such as a eukaryotic cell, in which an IS110 element or components thereof (IS110 transposase, donor site sequence, bridgeRNA, target site sequence for the IS110 element, or any combination thereof) has been genomically integrated. The nature, type, or origin of the cell are not particularly limiting according to the present invention. Also, the way in which the IS110 transgene is introduced in the cell may vary and can be any method as is known in the art. In certain embodiments, the IS110 transgenic cell is obtained by introducing the IS110 transgene in an isolated cell. In certain other embodiments, the IS110 transgenic cell is obtained by isolating cells from a IS110 transgenic organism. By means of example, and without limitation, the IS110 transgenic cell as referred to herein may be derived from a IS110 transgenic eukaryote, such as a IS110 knock-in eukaryote. Reference is made to WO 2014/093622 (PCT/US 13/74667), incorporated herein by reference. Methods of U.S. Pat. Nos. 8,771,985 and 9,567,573 assigned to Sangamo Biosciences, Inc. directed to targeting the Rosa locus may be modified to utilize the IS110 system of the present invention. Methods of US Patent Publication No. 20130236946 assigned to Cellectis directed to targeting the Rosa locus may also be modified to utilize the IS110 system of the present invention. By means of further example reference is made to Platt et. al. (Cell; 159(2):440-455 (2014)), describing a Cas9 knock-in mouse, which is incorporated herein by reference. The IS110 transgene can further comprise a Lox-Stop-polyA-Lox(LSL) cassette thereby rendering IS110 expression inducible by Cre recombinase. Alternatively, the IS110 transgenic cell may be obtained by introducing the IS110 transgene in an isolated cell. Delivery systems for transgenes are well known in the art. By means of example, the IS110 system may be delivered in for instance a eukaryotic cell by means of a vector (e.g., AAV, adenovirus, lentivirus) and/or particle and/or nanoparticle delivery, as also described herein elsewhere.

[0298] In one embodiment, the present invention contemplates a method for controlling gene expression via utilizing an IS110 transposase, bridgeRNA, donor site sequence, target site sequence or any combination thereof. The IS110 transposase may be expressed as a fusion protein with known epigenetic modifiers, including activator, repressor, or other DNA modifying domains such as but not limited to VPR, VP64, p65, PRDM9, LSD1, SMYD3, BAF, HP1, G9A, KRAB, EZH2, FOX1, DOTIL, p300, HDAC3, DNMT3A, M.SSI, TET1, DNMT3L. The IS110 transposase may also be expressed as a fusion protein encoding recruitment domains including but not limited to Suntag, FKBP/FRB and derivatives, CRY2/CIB1, SpyTag, SnoopTag/SnoopCatcher for recruitment of partner-domain fused epigenetic modifiers. The bridgeRNA may also be modified to encode RNA aptamers, including but not limited to, MS2, PP7, com, PUF, for the recruitment of epigenetic modifiers fused to the appropriate aptamer binding domain. In any of these described embodiments, IS110 transposases, including the RuvC-like DEDD domain, a linker domain, and Tnp domains, may be modified to be catalytically inactive. See Nakamura et al. 2021; “The CRISPR/Cas System: Emerging Technology and Application” n.d.; Tak et al. 2017; Zhai et al. 2022; Lebar et al. 2020.

[0299] In one embodiment, the present invention contemplates the use of IS110 transposases as DNA targeting domains for cellular DNA engineering tools. The IS110 transposase may be catalytically inactivated such that it does not mediate recombination and is fused to cellular DNA engineering protein domains. The IS110 transposase may still associate with its bridgeRNA and utilize it to bind to DNA sites of interest and position the fusion protein at or close to the DNA site(s) of interest that may be edited by the fused DNA engineering protein domains. In some embodiments, the non-transposase polypeptide domain of such a fusion provides an additional function, such as, but not limited to, nucleic acid modification, transcriptional activation, transcriptional repression, and epigenetic modification. IS110 base editors are contemplated as fusions of IS110 transposases to domains including, but not limited to, rAPOBEC1, hAID, pmCDA1 UGI, TadA, ADAR, UNG. IS110 prime editors are contemplated as fusions of IS110 transposases to domains including, but not limited to, MMLV RT, Marathon RT, GsI-IIC. In an embodiment of an IS110 prime editor, the bridgeRNA would be engineered to include a primer binding site and RT template containing a desired nucleic acid modification. In another embodiment, the present invention contemplates the use of IS110s solely as targeting domains for large cargo insertion systems. The IS110 transposases may be fused to integrases, including, but not limited to, Bxb1, PhiC31, Pa01, Kp03, Dn29, Si74. IS110 transposases fused to integrases may also be fused to protein domains including, but not limited to, those found in prime editors, such as MMLV RT. In an embodiment of an IS110 integrase prime editor, a bridgeRNA would be engineered to include a primer binding site and RT template with edit. See Gaudelli et al. 2017; Komor et al. 2016; Anzalone et al. 2019; Grunewald et al. 2022; Durrant et al. 2022; Anzalone et al. 2021. IS110 transposases may also be tethered to domains which can recruit proteins tethered to binding partners, such as an IS110 tethered to a FKBP domain and a DNA engineering domain tethered to a FBP domain.

[0300] Embodiments of the invention also comprehend use of nucleic acid constructs, fusion proteins, vectors, amplicons, expression vectors, cells, eukaryotic cells, mammalian cells, expression plasmids, mRNAs, viral vectors, adenovirus vectors, lentivirus vectors, or adeno-associated virus vectors, or methods for altering, modifying, or modulating transcription in a cell, or for integrating a desired nucleotide sequence into DNA or cellular DNA in such a way obvious by those skilled in the art according to previously demonstrated approaches for engineering and repurposing similar systems to the invention.

[0301] For example, in prime editing, such as described in WO2020191153, U.S. Pat. No. 11,447,770, or US20220054239 one would use the IS110 system of the invention combined with a polymerase (e.g. a reverse transcriptase) for template gene edits instead of a Cas9 system. For another example, in twin prime editing, such as described in WO2021226558, one would use the IS110 system of the invention instead of the first, second, third, fourth, etc. prime editor complexes. In another example, in PASTE, such as described in Ioannidi et al., 2021, US20220154224, or Tou et al., 2022, one would use the IS110 system of the invention instead of the Cas9-based prime editing system. In another example, in Gene Writer™ gene editor systems, such as described in WO2020047124, one would use the IS110 system instead of the retrotransposon-derived DNA binding domain of the Gene Writer™ gene editor system. In another example, in base editing, such as described in Anzalone et al., 2020 or Chen et al., 2021, one would use the IS110 system of the invention instead of the base editor system. In examples of editing systems with a targeting domain and integrase domain, such as PASTE, TwinPrime, or Gene Writer, an IS110 system can be used as an integrase paired with the Cas9 or retrotransposon-derived DNA binding domain.

[0302] In one embodiment, the present invention contemplates the use of IS110s as RNA targeting and RNA modifying systems. C/D box RNAs and other snoRNAs are involved in ribosomal RNA processing and RNA methylation in archaea and eukaryotes. C/D box RNAs have structural homology to the bridgeRNA structure. C/D box RNA binding proteins have homology to IS110 transposases, such as NOP58, NOP56, and SNU13 (15.5K) in humans, Nop58p, Nop56p, and Snu13p in yeast, and Nop5 and L7Ae in archaea. IS110 transposases may be engineered to harbor C/D box motif binding domains from these homologous systems, enabling complexation of IS110 transposases with naturally occurring C/D box RNAs. IS110 transposases may also be engineered to include a fibrillarin binding domain for the purposes of RNA methylation. An IS110 transposase modified to bind fibrillarin may be used in combination with a bridgeRNA to target endogenous RNA transcripts for methylation, similar to the function of NOP58/NOP56/SNU13p/Fibrillarin C/D box RNA complexes in human cells. In another embodiment, IS110 transposases may be fused to fibrillarin or other RNA methylation domains for the targeted methylation of endogenous transcripts. IS110 systems used for RNA methylation encode specificity for RNAs within the donor binding or target binding loops of the bridgeRNA. IS110 transposase mediated RNA binding may also be used for RNA knockdown, similar to approaches used with anti-sense oligonucleotides (ASOs), RNA interference, and Cas13-mediated RNA targeting and cleavage.

[0303] In one embodiment, the present invention contemplates a method for performing genetic screens utilizing IS110 systems. Screens may be performed by massively parallel programmable genomic or episomal insertions, excisions or inversions. A sequence including, but not limited to, an encoded epitope tag, stop codon, fluorescent protein, or some other protein of interest may be inserted into the genome, advantageously within a protein coding sequence, for the determination of phenotypic change as a result of the insertion. Insertions, excisions and inversions may be made in a targeted fashion for the study of individual chromosomes, loci, or genes or in such a way as to study a set of chromosomes, loci, genes and the proteins they encode. Insertions, excisions and inversions may be done in such a way to generate pooled, targeted knockouts to study monogenic and polygenic phenotypes, including those relevant to human disease.

[0304] The present invention contemplates a method for engineering genomes for the study of genome topology, epigenomics, gene regulation, and for the treatment of disease. In one embodiment, polynucleotide sequences, advantageously sequences encoding one or more donor site sequences or target site sequences, may be inserted with IS110 transposases into gene clusters, gene regulatory regions, topologically associated domains, chromosomes, and other genomic regions in such a fashion as to disrupt, modify, or replicate these sequences in any location in the genome. In another embodiment, polynucleotide sequences, both naturally existing and engineered, may be recognized by IS110 transposases in such a way that sequences within gene clusters, gene regulatory regions, topologically associated domains (TADs), chromosomes, and other genomic regions are precisely excised from the genome or inverted. In another embodiment, polynucleotide sequences, both naturally existing and engineered, may be recognized by IS110 transposases in such a way that sequences within gene clusters, gene regulatory regions, topologically associated domains, chromosomes, and other genomic regions are precisely integrated into another sequence, producing rearrangements of aforementioned sequences. Advantageously, such an approach may be used to produce and study chromosomal translocations, especially in the context of diseases involving chromosomal translocations such as many leukemias, Ewing's sarcoma, Down's syndrome, and other diseases. In another embodiment, aforementioned approaches may be advantageously performed in a massively parallel fashion using the programmable bridgeRNA to screen for phenotypic effects relating to rearrangement, insertion, and deletion of sequences from the genome.

[0305] In some embodiments, the IS110 system may be utilized for large excisions or deletions or chromosomal translocations. The IS110 system may be utilized to integrate enhancer sequences into new genomic contexts. The IS110 system may be utilized to integrate or destroy a binding site for proteins that dictate genome structure, such as CTCF. The IS110 system may be utilized in chromosomal fusions, such as those often found in cancers and heritable diseases.

### I. Delivery Methods

[0306] In some embodiments, methods for introducing an IS110 transposase-bridgeRNA ribonucleoprotein complex into a cell (e.g., a hematopoietic cell or hematopoietic stem cell, including, e.g., such cells from humans) include forming a reaction mixture containing the protein or ribonucleoprotein complex and introducing transient holes in the extracellular membrane of the cell. Such transient holes can be introduced by a variety of methods, including, but not limited to, electroporation, cell squeezing, or contacting with nanowires or nanotubes. Generally, the transient holes are introduced in the presence of the protein or ribonucleoprotein complex and the protein or ribonucleoprotein complex is allowed to diffuse into the cell.

[0307] Methods, compositions, and devices for electroporating cells to introduce a protein or ribonucleoprotein complex can include those described in the examples herein. Additional or alternative methods, compositions, and devices for electroporating cells to introduce a protein or ribonucleoprotein complex can include those described in WO/2006/001614 or Kim, J. A. et al. Biosens. Bioelectron. 23, 1353-1360 (2008). Additional or alternative methods, compositions, and devices for electroporating cells to introduce a protein or ribonucleoprotein complex can include those described in U.S. Patent Appl. Pub. Nos. 2006/0094095; 2005/0064596; or 2006/0087522. Additional or alternative methods, compositions, and devices for electroporating cells to introduce a protein or ribonucleoprotein complex can include those described in Li, L. H. et al. Cancer Res. Treat. 1, 341-350 (2002); U.S. Pat. Nos. 6,773,669; 7,186,559; 7,771,984; 7,991,559; 6,485,961; 7,029,916; and U.S. Patent Appl. Pub. Nos: 2014/0017213; and 2012/0088842. Additional or alternative methods, compositions, and devices for electroporating cells to introduce a protein or ribonucleoprotein complex can include those described in Geng, T. et al. J. Control Release 144, 91-100 (2010); and Wang, J., et al. Lab. Chip 10, 2057-2061 (2010).

[0308] In some cases, the methods or compositions described in the patents or publications cited herein are modified for protein or ribonucleoprotein delivery. Such modification can include increasing or decreasing voltage, pulse length, or the number of pulses. Such modification can further include modification of buffers, media, electrolytic solutions, or components thereof. Electroporation can be performed using devices known in the art, such as a Bio-Rad Gene Pulser Electroporation device, an Invitrogen Neon transfection system, a MaxCyte transfection system, a Lonza Nucleofection device, a NEPA Gene NEPA21 transfection device, a flow though electroporation system containing a pump and a constant voltage supply, or other electroporation devices or systems known in the art.

[0309] Methods, compositions, and devices for squeezing or deforming a cell to introduce a protein or ribonucleoprotein complex can include those described herein. Additional or alternative methods, compositions, and devices can include those described in Nano Lett. 2012 Dec. 12; 12(12):6322-7; Proc Natl Acad Sci USA. 2013 Feb. 5; 110(6):2082-7; J Vis Exp. 2013 Nov. 7; (81):e50980; and Integr Biol (Camb). 2014 April; 6(4):470-5. Additional or alternative methods, compositions, and devices can include those described in U.S. Patent Appl. Publ. No. 2014/0287509. Generally, the protein or ribonucleoprotein complex is provided in a reaction mixture containing the cell and the reaction mixture is forced through a cell deforming orifice or constriction. In some cases, the constriction is smaller than the diameter of the cell. In some cases, the constriction contains cell-deforming components such as regions of strong electrostatic charge, regions of hydrophobicity, or regions containing nanowires or nanotubes. The forcing can introduce transient pores into a cell membrane of the cell allowing the protein or ribonucleoprotein complex to enter the cell through the transient pores. In some cases, squeezing or deforming a cell to introduce the protein or ribonucleoprotein can be effective even when the cell is in a non-dividing state.

[0310] Methods for introducing a protein or ribonucleoprotein complex into a cell include forming a reaction mixture containing the protein or ribonucleoprotein complex and contacting the cell with the protein or ribonucleoprotein complex to induce receptor-mediated internalization. Compositions and methods for receptor mediated internalization are described, e.g., in Wu et al., J. Biol. Chem. 262, 4429-4432 (1987); and Wagner et al., Proc. Natl. Acad. Sci. USA 87, 3410-3414 (1990). Generally, the receptor-mediated internalization is mediated by interaction between a cell surface receptor and a ligand fused to the protein or fused to the ribonucleoprotein complex (e.g., covalently attached or fused to an RNA in the ribonucleoprotein complex). The ligand can be any protein, small molecule, polymer, or fragment thereof that binds to, or is recognized by, a receptor on the surface of the cell. An exemplary ligand is an antibody or an antibody fragment (e.g., scFv).

[0311] In some embodiments, the reaction mixture for introducing the protein or ribonucleoprotein complex into the cell can contain a nucleic acid for directing binding to the target genomic region.

[0312] In some embodiments, delivery is via a nucleic acid (e.g., plasmid(s)) transfected into a cell. The transfected nucleic acids (e.g., plasmid(s)) can comprise an expression vector for an IS110 transposase, a nucleic acid (e.g., plasmid) comprising a donor molecule comprising a donor site sequence for recombination with the cell's genome at a target site sequence or a donor molecule comprising a target site sequence for recombination with the cell's genome at a donor site sequence, and an expression vector for bridgeRNA.

[0313] The nucleic acids may be delivered using adeno associated virus (AAV), lentivirus, adenovirus or other viral vector types, or combinations thereof. The nucleic acids can be packaged into one or more viral vectors. The nucleic acids can be packaged into virions using appropriate packaging cells lines as known in the art. In some embodiments, the viral vector is delivered to the tissue of interest by, for example, an intramuscular injection, while other times the viral delivery is via intravenous, transdermal, intranasal, oral, mucosal, or other delivery methods. Such delivery may be either via a single dose, or multiple doses. One skilled in the art understands that the actual dosage to be delivered herein may vary greatly depending upon a variety of factors, such as the vector chosen, the target cell, organism, or tissue, the general condition of the subject to be treated, the degree of transformation/modification sought, the administration route, the administration mode, the type of transformation/modification sought, etc.

[0314] Such a dosage may further contain, for example, a carrier (water, saline, ethanol, glycerol, lactose, sucrose, calcium phosphate, gelatin, dextran, agar, pectin, peanut oil, sesame oil, etc.), a diluent, a pharmaceutically-acceptable carrier (e.g., phosphate-buffered saline), a pharmaceutically-acceptable excipient, and/or other compounds known in the art. Such a dosage formulation is readily ascertainable by one skilled in the art. The dosage may further contain one or more pharmaceutically acceptable salts such as, for example, a mineral acid salt such as a hydrochloride, a hydrobromide, a phosphate, a sulfate, etc.; and the salts of organic acids such as acetates, propionates, malonates, benzoates, etc. Additionally, auxiliary substances, such as wetting or emulsifying agents, pH buffering substances, gels or gelling materials, flavorings, colorants, microspheres, polymers, suspension agents, etc. may also be present herein. In addition, one or more other conventional pharmaceutical ingredients, such as preservatives, humectants, suspending agents, surfactants, antioxidants, anticaking agents, fillers, chelating agents, coating agents, chemical stabilizers, etc. may also be present, especially if the dosage form is a reconstitutable form. Suitable exemplary ingredients include microcrystalline cellulose, carboxymethylcellulose sodium, polysorbate 80, phenylethyl alcohol, chlorobutanol, potassium sorbate, sorbic acid, sulfur dioxide, propyl gallate, the parabens, ethyl vanillin, glycerin, phenol, parachlorophenol, gelatin, albumin and a combination thereof. A thorough discussion of pharmaceutically acceptable excipients is available in REMINGTON'S PHARMACEUTICAL SCIENCES (Mack Pub. Co., N.J. 2020) which is incorporated by reference herein.

[0315] In an embodiment herein the delivery is via an adenovirus, which may be at a single booster dose containing at least 1×10⁵ particles (also referred to as particle units, pu) of adenoviral vector. In an embodiment herein, the dose is at least about 1×10⁶ particles (e.g., about 1×10⁶-1×10¹² particles), at least about 1×10⁷ particles (e.g, about 1×10⁷-1×10⁹ particles or about 1×10⁷-1×10¹² particles), at least about 1×10⁸ particles (e.g., about 1×10⁸-1×10¹¹ particles or about 1×10⁸-1×10¹² particles), and at least about 1×10⁹ particles (e.g., about 1×10⁹-1×10¹⁰ particles or about 1×10⁹-1×10¹² particles), or at least about 1×10¹⁰ particles (e.g., about 1×10¹⁰-1×10¹² particles) of the adenoviral vector. Alternatively, the dose comprises no more than about 1×10¹⁴ particles. Thus, the dose may contain a single dose of adenoviral vector with, for example, about 1×10⁶ particle units (pu), about 2×10⁶ pu, about 4×10⁶ pu, about 1×10⁷ pu, about 2×10⁷ pu, about 4×10⁷ pu, about 1×10⁸ pu, about 2×10⁸ pu, about 4×10⁸ pu, about 1×10⁹ pu, about 2×10⁹ pu, about 4×10⁹ pu, about 1×10¹⁰ pu, about 2×10¹⁰ pu, about 4×10¹⁰ pu, about 1×10¹¹ pu, about 2×10¹¹ pu, about 4×10¹¹ pu, about 1×10¹² pu, about 2×10¹² pu, or about 4×10¹² pu of adenoviral vector. See, for example, the adenoviral vectors in U.S. Pat. No. 8,454,972 B2 to Nabel, et. al., granted on Jun. 4, 2013; incorporated by reference herein, and the dosages at col 29, lines 36-58 thereof. In an embodiment herein, the adenovirus is delivered via multiple doses.

[0316] In an embodiment herein, the delivery is via an AAV. A therapeutically effective dosage for in vivo delivery of the AAV to a human is believed to be in the range of from about 20 to about 50 ml of saline solution containing about 1×10¹⁰ to about 1×10¹² functional AAV/ml solution. The dosage may be adjusted to balance therapeutic benefit against any side effects. In an embodiment herein, the AAV dose is generally in the range of concentrations of from about 1×10⁵ to 1×10⁵⁰ genomes AAV, from about 1×10⁸ to 1×10²⁰ genomes AAV, from about 1×10¹⁰ to about 1×10¹⁶ genomes, or about 1×10¹¹ to about 1×10¹⁶ genomes AAV. A human dosage may be about 1×10¹³ genomes AAV. Such concentrations may be delivered in from about 0.001 ml to about 100 ml, about 0.05 to about 50 ml, or about 10 to about 25 ml of a carrier solution. Other effective dosages can be readily established by one of ordinary skill in the art through routine trials establishing dose response curves. See, for example, U.S. Pat. No. 8,404,658 B2 to Hajjar, et al., granted on Mar. 26, 2013, at col. 27, lines 45-60.

[0317] In an embodiment herein the delivery is via a plasmid(s). In such plasmid compositions, the dosage should be a sufficient amount of plasmid to elicit a response. For instance, suitable quantities of plasmid DNA in plasmid compositions can be from about 0.1 to about 2 mg, or from about 1 g to about 10 g.

[0318] The doses herein are based on an average 70 kg individual. The frequency of administration is within the ambit of the medical or veterinary practitioner (e.g., physician, veterinarian), or scientist skilled in the art. Mice used in experiments are about 20 g. From that which is administered to a 20 g mouse, one can extrapolate to a 70 kg individual.

[0319] Lentiviruses are complex retroviruses that have the ability to infect and express their genes in both mitotic and post-mitotic cells. The most commonly known lentivirus is the human immunodeficiency virus (HIV), which uses the envelope glycoproteins of other viruses to target a broad range of cell types.

[0320] Lentivirus may be purified as follows. Viral supernatants were harvested after 48 hours. Supernatants were first cleared of debris and filtered through a 0.45 um low protein binding (PVDF) filter. They were then spun in a ultracentrifuge for 2 hours at 24,000 rpm. Viral pellets were resuspended in 50 ul of DMEM overnight at 4 C. They were then aliquotted and immediately frozen at −80 C.

[0321] In another embodiment, minimal non-primate lentiviral vectors based on the equine infectious anemia virus (EIAV) are also contemplated, especially for ocular gene therapy (see, e.g., Balagaan, J Gene Med 2006; 8: 275-285, Published online 21 Nov. 2005 in Wiley InterScienc; available at the website: interscience.wiley.com. DOI: 10.1002/jgm.845). In another embodiment, RetinoStat®, an equine infectious anemia virus-based lentiviral gene therapy vector that expresses angiostatic proteins endostain and angiostatin that is delivered via a subretinal injection for the treatment of the web form of age-related macular degeneration is also contemplated (see, e.g., Binley et al., HUMAN GENE THERAPY 23:980-991 (September 2012)) may be modified for the system of the present invention.

[0322] In another embodiment, self-inactivating lentiviral vectors with an siRNA targeting a common exon shared by HIV tat/rev, a nucleolar-localizing TAR decoy, and an anti-CCR5-specific hammerhead ribozyme (see, e.g., DiGiusto et al. (2010) Sci Transl Med 2:36ra43) may be used/and or adapted to the IS110 transposase system of the present invention. A minimum of 2.5×10⁶ CD34+ cells per kilogram patient weight may be collected and prestimulated for 16 to 20 hours in X-VIVO 15 medium (Lonza) containing 2 micro mol/L-glutamine, stem cell factor (100 ng/ml), Flt-3 ligand (Flt-3L) (100 ng/ml), and thrombopoietin (10 ng/ml) (CellGenix) at a density of 2×10⁶ cells/ml. Prestimulated cells may be transduced with lentiviral at a multiplicity of infection of 5 for 16 to 24 hours in 75-cm² tissue culture flasks coated with fibronectin (25 mg/cm²) (RetroNectin, Takara Bio Inc.).

[0323] Lentiviral vectors have been disclosed as in the treatment for Parkinson's Disease, see, e.g., US Patent Publication No. 20120295960 and U.S. Pat. Nos. 7,303,910 and 7,351,585. Lentiviral vectors have also been disclosed for the treatment of ocular diseases, see e.g., US Patent Publication Nos. 20060281180, 20090007284, 20110117189; 20090017543; 20070054961, and 20100317109. Lentiviral vectors have also been disclosed for delivery to the brain, see, e.g., US Patent Publication Nos. 20110293571; 20110293571, 20070025970, and 20090111106 and U.S. Pat. No. 7,259,015.

[0324] Several types of particle delivery systems and/or formulations are known to be useful in a diverse spectrum of biomedical applications. In general, a particle is defined as a small object that behaves as a whole unit with respect to its transport and properties. Particles are further classified according to diameter. Coarse particles cover a range between 2,500 and 10,000 nanometers. Fine particles are sized between 100 and 2,500 nanometers. Ultrafine particles, or nanoparticles, are generally between 1 and 100 nanometers in size. The basis of the 100-nm limit is the fact that novel properties that differentiate particles from the bulk material typically develop at a critical length scale of under 100 nm.

[0325] As used herein, a particle delivery system/formulation is defined as any biological delivery system/formulation which includes a particle in accordance with the present invention. A particle in accordance with the present invention is any entity having a greatest dimension (e.g. diameter) of less than 100 microns (m). In some embodiments, inventive particles have a greatest dimension of less than 10 microns. In some embodiments, inventive particles have a greatest dimension of less than 2000 nanometers (nm). In some embodiments, inventive particles have a greatest dimension of less than 1000 nanometers (nm). In some embodiments, inventive particles have a greatest dimension of less than 900 nm, 800 nm, 700 nm, 600 nm, 500 nm, 400 nm, 300 nm, 200 nm, or 100 nm. Typically, inventive particles have a greatest dimension (e.g., diameter) of 500 nm or less. In some embodiments, inventive particles have a greatest dimension (e.g., diameter) of 250 nm or less. In some embodiments, inventive particles have a greatest dimension (e.g., diameter) of 200 nm or less. In some embodiments, inventive particles have a greatest dimension (e.g., diameter) of 150 nm or less.

[0326] In some embodiments, inventive particles have a greatest dimension (e.g., diameter) of 100 nm or less. Smaller particles, e.g., having a greatest dimension of 50 nm or less are used in some embodiments of the invention. In some embodiments, inventive particles have a greatest dimension ranging between 25 nm and 200 nm.

[0327] Particle characterization (including e.g., characterizing morphology, dimension, etc.) is done using a variety of different techniques. Common techniques are electron microscopy (TEM, SEM), atomic force microscopy (AFM), dynamic light scattering (DLS), X-ray photoelectron spectroscopy (XPS), powder X-ray diffraction (XRD), Fourier transform infrared spectroscopy (FTIR), matrix-assisted laser desorption/ionization time-of-flight mass spectrometry (MALDI-TOF), ultraviolet-visible spectroscopy, dual polarisation interferometry and nuclear magnetic resonance (NMR). Characterization (dimension measurements) may be made as to native particles (i.e., preloading) or after loading of the cargo (herein cargo refers to one or more nucleic acids and/or vectors encoding the same, and may include additional components, carriers and/or excipients) to provide particles of an optimal size for delivery for any in vitro, ex vivo and/or in vivo application of the present invention. In certain preferred embodiments, particle dimension (e.g., diameter) characterization is based on measurements using dynamic laser scattering (DLS).

[0328] Particles delivery systems within the scope of the present invention may be provided in any form, including but not limited to solid, semi-solid, emulsion, or colloidal particles. As such any of the delivery systems described herein, including but not limited to, e.g., lipid-based systems, liposomes, micelles, microvesicles, exosomes, or gene gun may be provided as particle delivery systems within the scope of the present invention.

[0329] In terms of this invention, it is preferred to have one or more components of the system delivered using nanoparticles or lipid envelopes. Nucleic acid sequences encoding the IS110 elements described herein, IS110 transposases or nucleic acid sequences encoding IS110 transposases described herein, bridgeRNAs described herein, donor site sequences described herein, and/or target site sequences described herein may be delivered simultaneously using nanoparticles or lipid envelopes. Other delivery systems or vectors may be used in conjunction with the nanoparticle aspects of the invention.

[0330] In general, a “nanoparticle” refers to any particle having a diameter of less than 1000 nm. In certain preferred embodiments, nanoparticles of the invention have a greatest dimension (e.g., diameter) of 500 nm or less. In other preferred embodiments, nanoparticles of the invention have a greatest dimension ranging between 25 nm and 200 nm. In other preferred embodiments, nanoparticles of the invention have a greatest dimension of 100 nm or less. In other preferred embodiments, nanoparticles of the invention have a greatest dimension ranging between 35 nm and 60 nm.

[0331] Nanoparticles encompassed in the present invention may be provided in different forms, e.g., as solid nanoparticles (e.g., metal such as silver, gold, iron, titanium), non-metal, lipid-based solids, polymers), suspensions of nanoparticles, or combinations thereof. Metal, dielectric, and semiconductor nanoparticles may be prepared, as well as hybrid structures (e.g., core-shell nanoparticles). Nanoparticles made of semiconducting material may also be labeled quantum dots if they are small enough (typically sub 10 nm) that quantization of electronic energy levels occurs. Such nanoscale particles are used in biomedical applications as drug carriers or imaging agents and may be adapted for similar purposes in the present invention.

[0332] Semi-solid and soft nanoparticles have been manufactured, and are within the scope of the present invention. A prototype nanoparticle of semi-solid nature is the liposome. Various types of liposome nanoparticles are currently used clinically as delivery systems for anticancer drugs and vaccines. Nanoparticles with one half hydrophilic and the other half hydrophobic are termed Janus particles and are particularly effective for stabilizing emulsions. They can self-assemble at water/oil interfaces and act as solid surfactants.

[0333] For example, Su X, Fricke J, Kavanagh D G, Irvine D J (“In vitro and in vivo mRNA delivery using lipid-enveloped pH-responsive polymer nanoparticles” Mol Pharm. 2011 Jun. 6; 8(3):774-87. doi: 10.1021/mp100390w. Epub 2011 Apr. 1) describes biodegradable core-shell structured nanoparticles with a poly(β-amino ester) (PBAE) core enveloped by a phospholipid bilayer shell. These were developed for in vivo mRNA delivery. The pH-responsive PBAE component was chosen to promote endosome disruption, while the lipid surface layer was selected to minimize toxicity of the polycation core.

[0334] In one embodiment, nanoparticles based on self assembling bioadhesive polymers are contemplated, which may be applied to oral delivery of peptides, intravenous delivery of peptides and nasal delivery of peptides, all to the brain. Other embodiments, such as oral absorption and ocular delivery of hydrophobic drugs are also contemplated. The molecular envelope technology involves an engineered polymer envelope which is protected and delivered to the site of the disease (see, e.g., Mazza, M. et al. ACSNano, 2013. 7(2): 1016-1026; Siew, A., et al. Mol Pharm, 2012. 9(1):14-28; Lalatsa, A., et al. J Contr Rel, 2012. 161(2):523-36; Lalatsa, A., et al., Mol Pharm, 2012. 9(6):1665-80; Lalatsa, A., et al. Mol Pharm, 2012. 9(6):1764-74; Garrett, N. L., et al. J Biophotonics, 2012. 5(5-6):458-68; Garrett, N. L., et al. J Raman Spect, 2012. 43(5):681-688; Ahmad, S., et al. J Royal Soc Interface 2010. 7:S423-33; Uchegbu, I. F. Expert Opin Drug Deliv, 2006. 3(5):629-40; Qu, X., et al. Biomacromolecules, 2006. 7(12):3452-9 and Uchegbu, I. F., et al. Int J Pharm, 2001. 224:185-199). Doses of about 5 mg/kg are contemplated, with single or multiple doses, depending on the target tissue.

[0335] In one embodiment, nanoparticles that can deliver nucleic acids to a cancer cell to stop tumor may be used/and or adapted to the IS110 transposase system of the present invention. In particular, fully automated, combinatorial systems for the synthesis, purification, characterization, and formulation of new biomaterials and nanoformulations. See, e.g., Alabi et al., Proc Natl Acad Sci USA. 2013 Aug. 6; 110(32):12881-6; Zhang et al., Adv Mater. 2013 Sep. 6; 25(33):4641-5; Jiang et al., Nano Lett. 2013 Mar. 13; 13(3):1059-64; Karagiannis et al., ACS Nano. 2012 Oct. 23; 6(10):8484-7; Whitehead et al., ACS Nano. 2012 Aug. 28; 6(8):6922-9 and Lee et al., Nat Nanotechnol. 2012 Jun. 3; 7(6):389-93.

[0336] U.S. Pat. No. 8,969,353 relates to lipidoid compounds that are also particularly useful in the administration of polynucleotides, which may be applied to deliver the IS110 transposase system of the present invention. In one aspect, the aminoalcohol lipidoid compounds are combined with an agent to be delivered to a cell or a subject to form microparticles, nanoparticles, liposomes, or micelles. The agent to be delivered by the particles, liposomes, or micelles may be in the form of a gas, liquid, or solid, and the agent may be a polynucleotide, protein, peptide, or small molecule. The aminoalcohol lipidoid compounds may be combined with other aminoalcohol lipidoid compounds, polymers (synthetic or natural), surfactants, cholesterol, carbohydrates, proteins, lipids, etc. to form the particles. These particles may then optionally be combined with a pharmaceutical excipient to form a pharmaceutical composition.

[0337] U.S. Pat. No. 8,969,353 also provides methods of preparing the aminoalcohol lipidoid compounds. One or more equivalents of an amine are allowed to react with one or more equivalents of an epoxide-terminated compound under suitable conditions to form an aminoalcohol lipidoid compound of the present invention. In certain embodiments, all the amino groups of the amine are fully reacted with the epoxide-terminated compound to form tertiary amines. In other embodiments, all the amino groups of the amine are not fully reacted with the epoxide-terminated compound to form tertiary amines thereby resulting in primary or secondary amines in the aminoalcohol lipidoid compound. These primary or secondary amines are left as is or may be reacted with another electrophile such as a different epoxide-terminated compound. As will be appreciated by one skilled in the art, reacting an amine with less than excess of epoxide-terminated compound will result in a plurality of different aminoalcohol lipidoid compounds with various numbers of tails. Certain amines may be fully functionalized with two epoxide-derived compound tails while other molecules will not be completely functionalized with epoxide-derived compound tails. For example, a diamine or polyamine may include one, two, three, or four epoxide-derived compound tails off the various amino moieties of the molecule resulting in primary, secondary, and tertiary amines. In certain embodiments, all the amino groups are not fully functionalized. In certain embodiments, two of the same types of epoxide-terminated compounds are used. In other embodiments, two or more different epoxide-terminated compounds are used. The synthesis of the aminoalcohol lipidoid compounds is performed with or without solvent, and the synthesis may be performed at higher temperatures ranging from 30-100 C. The prepared aminoalcohol lipidoid compounds may be optionally purified. For example, the mixture of aminoalcohol lipidoid compounds may be purified to yield an aminoalcohol lipidoid compound with a particular number of epoxide-derived compound tails. Or the mixture may be purified to yield a particular stereo- or regioisomer. The aminoalcohol lipidoid compounds may also be alkylated using an alkyl halide (e.g., methyl iodide) or other alkylating agent, and/or they may be acylated.

[0338] U.S. Pat. No. 8,969,353 also provides libraries of aminoalcohol lipidoid compounds prepared by the inventive methods. These aminoalcohol lipidoid compounds may be prepared and/or screened using high-throughput techniques involving liquid handlers, robots, microtiter plates, computers, etc. In certain embodiments, the aminoalcohol lipidoid compounds are screened for their ability to transfect polynucleotides or other agents (e.g., proteins, peptides, small molecules) into the cell.

[0339] U.S. Pat. No. 9,193,827 relates to a class of poly(beta-amino alcohols) (PBAAs) has been prepared using combinatorial polymerization. The inventive PBAAs may be used in biotechnology and biomedical applications as coatings (such as coatings of films or multilayer films for medical devices or implants), additives, materials, excipients, non-biofouling agents, micropatterning agents, and cellular encapsulation agents. When used as surface coatings, these PBAAs elicited different levels of inflammation, both in vitro and in vivo, depending on their chemical structures. The large chemical diversity of this class of materials allowed the identification of polymer coatings that inhibit macrophage activation in vitro. Furthermore, these coatings reduce the recruitment of inflammatory cells, and reduce fibrosis, following the subcutaneous implantation of carboxylated polystyrene microparticles. These polymers may be used to form polyelectrolyte complex capsules for cell encapsulation. The invention may also have many other biological applications such as antimicrobial coatings, DNA or siRNA delivery, and stem cell tissue engineering. The teachings of U.S. Pat. No. 9,193,827 may be applied to the system of the present invention.

[0340] In another embodiment, lipid nanoparticles (LNPs) are contemplated. Doses of about 0.01 to about 1 mg per kg of body weight administered intravenously are contemplated. Medications to reduce the risk of infusion-related reactions are contemplated, such as dexamethasone, acetampinophen, diphenhydramine or cetirizine, and ranitidine are contemplated. Multiple doses of about 0.3 mg per kilogram every 4 weeks for five doses are also contemplated. Lipids include, but are not limited to, DLin-KC2-DMA4, C12-200 and colipids disteroylphosphatidyl choline, cholesterol, and PEG-DMG may be formulated RNA instead of siRNA (see, e.g., Novobrantseva, Molecular Therapy-Nucleic Acids (2012) 1, e4; doi:10.1038/mtna.2011.3) using a spontaneous vesicle formation procedure. The component molar ratio may be about 50/10/38.5/1.5 (DLin-KC2-DMA or C12-200/disteroylphosphatidyl choline/cholesterol/PEG-DMG). The final lipid:siRNA weight ratio may be ˜12:1 and 9:1 in the case of DLin-KC2-DMA and C12-200 lipid nanoparticles (LNPs), respectively. The formulations may have mean particle diameters of ˜80 nm with >90% entrapment efficiency. A 3 mg/kg dose may be contemplated.

[0341] LNPs have been shown to be highly effective in delivering siRNAs to the liver (see, e.g., Tabernero et al., Cancer Discovery, April 2013, Vol. 3, No. 4, pages 363-470) and are therefore contemplated for delivering components of the IS110 transposases system to the liver, such as the bridgeRNA. A dosage of about four doses of 6 mg/kg of the LNP (or bridgeRNA) every two weeks may be contemplated. Tabernero et al. demonstrated that tumor regression was observed after the first 2 cycles of LNPs dosed at 0.7 mg/kg, and by the end of 6 cycles the patient had achieved a partial response with complete regression of the lymph node metastasis and substantial shrinkage of the liver tumors. A complete response was obtained after 40 doses in this patient, who has remained in remission and completed treatment after receiving doses over 26 months. Two patients with RCC and extrahepatic sites of disease including kidney, lung, and lymph nodes that were progressing following prior therapy with VEGF pathway inhibitors had stable disease at all sites for approximately 8 to 12 months, and a patient with PNET and liver metastases continued on the extension study for 18 months (36 doses) with stable disease.

[0342] However, the charge of the LNP must be taken into consideration. Cationic lipids are combined with negatively charged lipids to induce nonbilayer structures that facilitate intracellular delivery. Because charged LNPs are rapidly cleared from circulation following intravenous injection, ionizable cationic lipids with pKa values below 7 were developed (see, e.g., Rosin et al, Molecular Therapy, vol. 19, no. 12, pages 1286-2200, December 2011). Negatively charged polymers such as siRNA oligonucleotides may be loaded into LNPs at low pH values (e.g., pH 4) where the ionizable lipids display a positive charge. However, at physiological pH values, the LNPs exhibit a low surface charge compatible with longer circulation times. Four species of ionizable cationic lipids have been focused upon, namely 1,2-dilineoyl-3-dimethylammonium-propane (DLinDAP), 1,2-dilinoleyloxy-3-N,N-dimethylaminopropane (DLinDMA), 1,2-dilinoleyloxy-keto-N,N-dimethyl-3-aminopropane (DLinKDMA), and 1,2-dilinoleyl-4-(2-dimethylaminoethyl)-[1,3]-dioxolane (DLinKC2-DMA). It has been shown that LNP siRNA systems containing these lipids exhibit remarkably different gene silencing properties in hepatocytes in vivo, with potencies varying according to the series DLinKC2-DMA>DLinKDMA>DLinDMA>>DLinDAP employing a Factor VII gene silencing model (see, e.g., Rosin et al, Molecular Therapy, vol. 19, no. 12, pages 1286-2200, December 2011). A dosage of 1 g/ml levels may be contemplated, especially for a formulation containing DLinKC2-DMA. Preparation of LNPs and IS110 encapsulation may be used/and or adapted from Rosin et al, Molecular Therapy, vol. 19, no. 12, pages 1286-2200, December 2011). The cationic lipids 1,2-dilineoyl-3-dimethylammonium-propane (DLinDAP), 1,2-dilinoleyloxy-3-N,N-dimethylaminopropane (DLinDMA), 1,2-dilinoleyloxyketo-N,N-dimethyl-3-aminopropane (DLinK-DMA), 1,2-dilinoleyl-4-(2-dimethylaminoethyl)-[1,3]-dioxolane (DLinKC2-DMA), (3-o-[2″-(methoxypolyethyleneglycol 2000) succinoyl]-1,2-dimyristoyl-sn-glycol (PEG-S-DMG), and R-3-[(w-methoxy-poly(ethylene glycol)2000) carbamoyl]-1,2-dimyristyloxlpropyl-3-amine (PEG-C-DOMG) may be provided by Tekmira Pharmaceuticals (Vancouver, Canada) or synthesized. The specific IS110 RNA may be encapsulated in LNPs containing DLinDAP, DLinDMA, DLinK-DMA, and DLinKC2-DMA (cationic lipid:DSPC:CHOL: PEGS-DMG or PEG-C-DOMG at 40:10:40:10 molar ratios). When required, 0.2% SP-DiOC18 (Invitrogen, Burlington, Canada) may be incorporated to assess cellular uptake, intracellular delivery, and biodistribution. Encapsulation may be performed by dissolving lipid mixtures comprising a cationic lipid:DSPC:cholesterol:PEG-c-DOMG (40:10:40:10 molar ratio) in ethanol to a final lipid concentration of 10 mmol/l. This ethanol solution of lipid may be added drop-wise to 50 mmol/l citrate, pH 4.0 to form multilamellar vesicles to produce a final concentration of 30% ethanol vol/vol. Large unilamellar vesicles may be formed following extrusion of multilamellar vesicles through two stacked 80 nm Nuclepore polycarbonate filters using the Extruder (Northern Lipids, Vancouver, Canada). Encapsulation may be achieved by adding RNA dissolved at 2 mg/ml in 50 mmol/l citrate, pH 4.0 containing 30% ethanol vol/vol drop-wise to extruded preformed large unilamellar vesicles and incubation at 31° C. for 30 minutes with constant mixing to a final RNA/lipid weight ratio of 0.06/1 wt/wt. Removal of ethanol and neutralization of formulation buffer were performed by dialysis against phosphate-buffered saline (PBS), pH 7.4 for 16 hours using Spectra/Por 2 regenerated cellulose dialysis membranes. Nanoparticle size distribution may be determined by dynamic light scattering using a NICOMP 370 particle sizer, the vesicle/intensity modes, and Gaussian fitting (Nicomp Particle Sizing, Santa Barbara, Calif.). The particle size for all three LNP systems may be ˜70 nm in diameter. siRNA encapsulation efficiency may be determined by removal of free siRNA using VivaPureD MiniH columns (Sartorius Stedim Biotech) from samples collected before and after dialysis. The encapsulated RNA may be extracted from the eluted nanoparticles and quantified at 260 nm. The siRNA to lipid ratio was determined by measurement of cholesterol content in vesicles using the Cholesterol E enzymatic assay from Wako Chemicals USA (Richmond, Va.). PEGylated liposomes (or LNPs) can also be used for delivery.

[0343] Preparation of large LNPs may be used/and or adapted from Rosin et al, Molecular Therapy, vol. 19, no. 12, pages 1286-2200, December 2011. A lipid premix solution (20.4 mg/ml total lipid concentration) may be prepared in ethanol containing DLinKC2-DMA, DSPC, and cholesterol at 50:10:38.5 molar ratios. Sodium acetate may be added to the lipid premix at a molar ratio of 0.75:1 (sodium acetate:DLinKC2-DMA). The lipids may be subsequently hydrated by combining the mixture with 1.85 volumes of citrate buffer (10 mmol/l, pH 3.0) with vigorous stirring, resulting in spontaneous liposome formation in aqueous buffer containing 35% ethanol. The liposome solution may be incubated at 37° C. to allow for time-dependent increase in particle size. Aliquots may be removed at various times during incubation to investigate changes in liposome size by dynamic light scattering (Zetasizer Nano ZS, Malvern Instruments, Worcestershire, UK). Once the desired particle size is achieved, an aqueous PEG lipid solution (stock=10 mg/ml PEG-DMG in 35% (vol/vol) ethanol) may be added to the liposome mixture to yield a final PEG molar concentration of 3.5% of total lipid. Upon addition of PEG-lipids, the liposomes should their size, effectively quenching further growth. RNA may then be added to the empty liposomes at an siRNA to total lipid ratio of approximately 1:10 (wt:wt), followed by incubation for 30 minutes at 37° C. to form loaded LNPs. The mixture may be subsequently dialyzed overnight in PBS and filtered with a 0.45-μm syringe filter.

[0344] Spherical Nucleic Acid (SNA™) constructs and other nanoparticles (particularly gold nanoparticles) are also contemplated as a means to deliver components of the IS110 transposase system to intended targets. Significant data show that Spherical Nucleic Acid (SNA™) constructs, based upon nucleic acid-functionalized gold nanoparticles, are superior to alternative platforms based on multiple key success factors, such as:

[0345] High in vivo stability. Due to their dense loading, a majority of cargo (DNA or siRNA) remains bound to the constructs inside cells, conferring nucleic acid stability and resistance to enzymatic degradation.

[0346] Deliverability. For all cell types studied (e.g., neurons, tumor cell lines, etc.) the constructs demonstrate a transfection efficiency of 99% with no need for carriers or transfection agents.

[0347] Therapeutic targeting. The unique target binding affinity and specificity of the constructs allow exquisite specificity for matched target sequences (i.e., limited off-target effects).

[0348] Superior efficacy. The constructs significantly outperform leading conventional transfection reagents (Lipofectamine 2000 and Cytofectin).

[0349] Low toxicity. The constructs can enter a variety of cultured cells, primary cells, and tissues with no apparent toxicity.

[0350] No significant immune response. The constructs elicit minimal changes in global gene expression as measured by whole-genome microarray studies and cytokine-specific protein assays.

[0351] Chemical tailorability. Any number of single or combinatorial agents (e.g., proteins, peptides, small molecules) can be used to tailor the surface of the constructs.

[0352] This platform for nucleic acid-based therapeutics may be applicable to numerous disease states, including inflammation and infectious disease, cancer, skin disorders and cardiovascular disease.

[0353] Citable literature includes: Cutler et al., J. Am. Chem. Soc. 2011 133:9254-9257, Hao et al., Small. 2011 7:3158-3162, Zhang et al., ACS Nano. 2011 5:6962-6970, Cutler et al., J. Am. Chem. Soc. 2012 134:1376-1391, Young et al., Nano Lett. 2012 12:3867-71, Zheng et al., Proc. Natl. Acad. Sci. USA. 2012 109:11975-80, Mirkin, Nanomedicine 2012 7:635-638 Zhang et al., J. Am. Chem. Soc. 2012 134:16488-1691, Weintraub, Nature 2013 495:S14-S16, Choi et al., Proc. Natl. Acad. Sci. USA. 2013 110(19):7625-7630, Jensen et al., Sci. Transl. Med. 5, 209ra152 (2013) and Mirkin, et al., Small, doi.org/10.1002/smll.201302143.

[0354] Self-assembling nanoparticles may be constructed with polyethyleneimine (PEI) that is PEGylated with an Arg-Gly-Asp (RGD) peptide ligand attached at the distal end of the polyethylene glycol (PEG), for example, as a means to target tumor neovasculature expressing integrins. Nanoplexes may be prepared by mixing equal volumes of aqueous solutions of cationic polymer and nucleic acid to give a net molar excess of ionizable nitrogen (polymer) to phosphate (nucleic acid) over the range of 2 to 6. The electrostatic interactions between cationic polymers and nucleic acid resulted in the formation of polyplexes with average particle size distribution of about 100 nm, hence referred to here as nanoplexes. A dosage of about 50 to 500 mg of IS110 is envisioned for delivery in the self-assembling nanoparticles of Schiffelers et al.

[0355] The nanoplexes of Bartlett et al. (PNAS, Sep. 25, 2007, vol. 104, no. 39) may also be applied to the present invention. The nanoplexes of Bartlett et al. are prepared by mixing equal volumes of aqueous solutions of cationic polymer and nucleic acid to give a net molar excess of ionizable nitrogen (polymer) to phosphate (nucleic acid) over the range of 2 to 6. The electrostatic interactions between cationic polymers and nucleic acid resulted in the formation of polyplexes with average particle size distribution of about 100 nm, hence referred to here as nanoplexes. The DOTA-siRNA of Bartlett et al. was synthesized as follows: 1,4,7,10-tetraazacyclododecane-1,4,7,10-tetraacetic acid mono(N-hydroxysuccinimide ester) (DOTA-NHSester) was ordered from Macrocyclics (Dallas, Tex.). The amine modified RNA sense strand with a 100-fold molar excess of DOTA-NHS-ester in carbonate buffer (pH 9) was added to a microcentrifuge tube. The contents were reacted by stirring for 4 h at room temperature. The DOTA-RNAsense conjugate was ethanol-precipitated, resuspended in water, and annealed to the unmodified antisense strand to yield DOTA-siRNA. All liquids were pretreated with Chelex-100 (Bio-Rad, Hercules, Calif.) to remove trace metal contaminants. Tf-targeted and nontargeted siRNA nanoparticles may be formed by using cyclodextrin-containing polycations. Typically, nanoparticles were formed in water at a charge ratio of 3 (+/−) and an siRNA concentration of 0.5 g/liter. One percent of the adamantane-PEG molecules on the surface of the targeted nanoparticles were modified with Tf (adamantane-PEG-Tf). The nanoparticles were suspended in a 5% (wt/vol) glucose carrier solution for injection.

[0356] Davis et al. (Nature, Vol 464, 15 Apr. 2010) conducts a siRNA clinical trial that uses a targeted nanoparticle-delivery system (clinical trial registration number NCT00689065). Patients with solid cancers refractory to standard-of-care therapies are administered doses of targeted nanoparticles on days 1, 3, 8 and 10 of a 21-day cycle by a 30-min intravenous infusion. The nanoparticles consist of a synthetic delivery system containing: (1) a linear, cyclodextrin-based polymer (CDP), (2) a human transferrin protein (TF) targeting ligand displayed on the exterior of the nanoparticle to engage TF receptors (TFR) on the surface of the cancer cells, (3) a hydrophilic polymer (polyethylene glycol (PEG) used to promote nanoparticle stability in biological fluids), and (4) siRNA designed to reduce the expression of the RRM2 (sequence used in the clinic was previously denoted siR2B+5). The TFR has long been known to be upregulated in malignant cells, and RRM2 is an established anti-cancer target. These nanoparticles (clinical version denoted as CALAA-01) have been shown to be well tolerated in multi-dosing studies in non-human primates. Although a single patient with chronic myeloid leukemia has been administered siRNA by liposomal delivery, Davis et al.'s clinical trial is the initial human trial to systemically deliver siRNA with a targeted delivery system and to treat patients with solid cancer. To ascertain whether the targeted delivery system can provide effective delivery of functional siRNA to human tumours, Davis et al. investigated biopsies from three patients from three different dosing cohorts; patients A, B and C, all of whom had metastatic melanoma and received CALAA-01 doses of 18, 24 and 30 mg m⁻² siRNA, respectively. Similar doses may also be contemplated for the IS110 system of the present invention. The delivery of the invention may be achieved with nanoparticles containing a linear, cyclodextrin-based polymer (CDP), a human transferrin protein (TF) targeting ligand displayed on the exterior of the nanoparticle to engage TF receptors (TFR) on the surface of the cancer cells and/or a hydrophilic polymer (for example, polyethylene glycol (PEG) used to promote nanoparticle stability in biological fluids).

[0357] Delivery or administration according to the invention can be performed with liposomes. Liposomes are spherical vesicle structures composed of a uni- or multilamellar lipid bilayer surrounding internal aqueous compartments and a relatively impermeable outer lipophilic phospholipid bilayer. Liposomes have gained considerable attention as drug delivery carriers because they are biocompatible, nontoxic, can deliver both hydrophilic and lipophilic drug molecules, protect their cargo from degradation by plasma enzymes, and transport their load across biological membranes and the blood brain barrier (BBB) (see, e.g., Spuch and Navarro, Journal of Drug Delivery, vol. 2011, Article ID 469679, 12 pages, 2011. doi:10.1155/2011/469679 for review).

[0358] Liposomes can be made from several different types of lipids; however, phospholipids are most commonly used to generate liposomes as drug carriers. Although liposome formation is spontaneous when a lipid film is mixed with an aqueous solution, it can also be expedited by applying force in the form of shaking by using a homogenizer, sonicator, or an extrusion apparatus (see, e.g., Spuch and Navarro, Journal of Drug Delivery, vol. 2011, Article ID 469679, 12 pages, 2011. doi:10.1155/2011/469679 for review).

[0359] Several other additives may be added to liposomes in order to modify their structure and properties. For instance, either cholesterol or sphingomyelin may be added to the liposomal mixture in order to help stabilize the liposomal structure and to prevent the leakage of the liposomal inner cargo. Further, liposomes are prepared from hydrogenated egg phosphatidylcholine or egg phosphatidylcholine, cholesterol, and dicetyl phosphate, and their mean vesicle sizes were adjusted to about 50 and 100 nm. (see, e.g., Spuch and Navarro, Journal of Drug Delivery, vol. 2011, Article ID 469679, 12 pages, 2011. doi:10.1155/2011/469679 for review).

[0360] Conventional liposome formulation mainly comprises natural phospholipids and lipids such as 1,2-distearoryl-sn-glycero-3-phosphatidyl choline (DSPC), sphingomyelin, egg phosphatidylcholines and monosialoganglioside. Since this formulation is made up of phospholipids only, liposomal formulations have encountered many challenges, one of the ones being the instability in plasma. Several attempts to overcome these challenges have been made, specifically in the manipulation of the lipid membrane. One of these attempts focused on the manipulation of cholesterol. Addition of cholesterol to conventional formulations reduces rapid release of the encapsulated bioactive compound into the plasma or 1,2-dioleoyl-sn-glycero-3-phosphoethanolamine (DOPE) increases the stability (see, e.g., Spuch and Navarro, Journal of Drug Delivery, vol. 2011, Article ID 469679, 12 pages, 2011. doi:10.1155/2011/469679 for review).

[0361] In a particularly advantageous embodiment, Trojan Horse liposomes (also known as Molecular Trojan Horses) are desirable and protocols may be found at cshprotocols.cshlp.org/content/2010/4/pdb.prot5407.long. These particles allow delivery of a transgene to the entire brain after an intravascular injection. Without being bound by limitation, it is believed that neutral lipid particles with specific antibodies conjugated to surface allow crossing of the blood brain barrier via endocytosis. Applicant postulates utilizing Trojan Horse Liposomes to deliver components of the IS110 transposase system to the brain via an intravascular injection, which would allow whole brain transgenic animals without the need for embryonic manipulation. About 1-5 g of nucleic acid molecule, e.g., DNA, RNA, may be contemplated for in vivo administration in liposomes.

[0362] In another embodiment, the components of the IS110 transposase system may be administered in liposomes, such as a stable nucleic-acid-lipid particle (SNALP) (see, e.g., Morrissey et al., Nature Biotechnology, Vol. 23, No. 8, August 2005). Daily intravenous injections of about 1, 3 or 5 mg/kg/day of a specific IS110 element targeted in a SNALP are contemplated. The daily treatment may be over about three days and then weekly for about five weeks. In another embodiment, a specific IS110 encapsulated SNALP) administered by intravenous injection to at doses of abpit 1 or 2.5 mg/kg are also contemplated (see, e.g., Zimmerman et al., Nature Letters, Vol. 441, 4 May 2006). The SNALP formulation may contain the lipids 3-N-[(wmethoxypoly(ethylene glycol) 2000) carbamoyl]-1,2-dimyristyloxy-propylamine (PEG-C-DMA), 1,2-dilinoleyloxy-N,N-dimethyl-3-aminopropane (DLinDMA), 1,2-distearoyl-sn-glycero-3-phosphocholine (DSPC) and cholesterol, in a 2:40:10:48 molar percent ratio (see, e.g., Zimmerman et al., Nature Letters, Vol. 441, 4 May 2006).

[0363] In another embodiment, stable nucleic-acid-lipid particles (SNALPs) have proven to be effective delivery molecules to highly vascularized HepG2-derived liver tumors but not in poorly vascularized HCT-116 derived liver tumors (see, e.g., Li, Gene Therapy (2012) 19, 775-780). The SNALP liposomes may be prepared by formulating D-Lin-DMA and PEG-C—DMA with distearoylphosphatidylcholine (DSPC), Cholesterol and siRNA using a 25:1 lipid/siRNA ratio and a 48/40/10/2 molar ratio of Cholesterol/D-Lin-DMA/DSPC/PEG-C-DMA. The resulted SNALP liposomes are about 80-100 nm in size.

[0364] In yet another embodiment, a SNALP may comprise synthetic cholesterol (Sigma-Aldrich, St Louis, Mo., USA), dipalmitoylphosphatidylcholine (Avanti Polar Lipids, Alabaster, Ala., USA), 3-N-[(w-methoxy poly(ethylene glycol)2000)carbamoyl]-1,2-dimyrestyloxypropylamine, and cationic 1,2-dilinoleyloxy-3-N,Ndimethylaminopropane (see, e.g., Geisbert et al., Lancet 2010; 375: 1896-905). A dosage of about 2 mg/kg total IS110 element per dose administered as, for example, a bolus intravenous infusion may be contemplated.

[0365] In yet another embodiment, a SNALP may comprise synthetic cholesterol (Sigma-Aldrich), 1,2-distearoyl-sn-glycero-3-phosphocholine (DSPC; Avanti Polar Lipids Inc.), PEG-cDMA, and 1,2-dilinoleyloxy-3-(N;N-dimethyl)aminopropane (DLinDMA) (see, e.g., Judge, J. Clin. Invest. 119:661-673 (2009)). Formulations used for in vivo studies may comprise a final lipid/RNA mass ratio of about 9:1.

[0366] Other cationic lipids, such as amino lipid 2,2-dilinoleyl-4-dimethylaminoethyl-[1,3]-dioxolane (DLin-KC2-DMA) may be utilized to encapsulate components of the IS110 transposase similar to siRNA (see, e.g., Jayaraman, Angew. Chem. Int. Ed. 2012, 51, 8529-8533). A preformed vesicle with the following lipid composition may be contemplated: amino lipid, di stearoylphosphatidylcholine (DSPC), cholesterol and (R)-2,3-bis(octadecyloxy) propyl-1-(methoxy poly(ethylene glycol)2000)propylcarbamate (PEG-lipid) in the molar ratio 40/10/40/10, respectively, and a nucleic acid/total lipid ratio of approximately 0.05 (w/w). To ensure a narrow particle size distribution in the range of 70-90 nm and a low polydispersity index of 0.11_0.04 (n=56), the particles may be extruded up to three times through 80 nm membranes prior to adding nucleic acid (e.g. bridgeRNA). Particles containing the highly potent amino lipid 16 may be used, in which the molar ratio of the four lipid components 16, DSPC, cholesterol and PEG-lipid (50/10/38.5/1.5) which may be further optimized to enhance in vivo activity.

[0367] In some embodiments of the present disclosure, the system may be loaded into naturally occurring, engineered (e.g., rationally engineered), or adaptively evolved bacteriophage for delivery to microbial cell populations, e.g., endogenous microbial cells. Bacteriophages replicate within bacteria following the injection of their genome into the cytoplasm and do so using either a lytic cycle, which results in bacterial cell lysis, or a lysogenic (non-lytic) cycle, which leaves the bacterial cell intact. The bacteriophages of the present disclosure are, in some embodiments, non-lytic (also referred to as lysogenic or temperate). Non-lytic phage may also include those that are actively secreted from infected cells in the absence of lysis, including, without limitation, filamentous phage such as, for example, M13, fd, IKe, CTX-φ, Pf1, Pf2 and Pf3. Thus, after phage delivery to a bacterial cell, the bacterial cell may remain viable and able to stably maintain expression. In some embodiments, lytic bacteriophage may be used as delivery vehicles. When used with the system, naturally lytic phage serve as cargo shuttles and do not inherently lyse target cells.

[0368] Examples of non-lytic bacteriophage for use in accordance with the present disclosure include, without limitation, Myoviridae (P1-like viruses; P2-like viruses; Mu-like viruses; SPO1-like viruses; phiH-like viruses); Siphoviridae (λ-like viruses, γ-like viruses, T1-like viruses; T5-like viruses; c2-like viruses; L5-like viruses; psiM1-like viruses; phiC31-like viruses; N15-like viruses); Podoviridae (phi29-like viruses; P22-like viruses; N4-like viruses); Tectiviridae (Tectivirus); Corticoviridae (Corticovirus); Lipothrixviridae (Alphalipothrixvirus, Betalipothrixvirus, Gammalipothrixvirus, Deltalipothrixvirus); Plasmaviridae (Plasmavirus); Rudiviridae (Rudivirus); Fuselloviridae (Fusellovirus); Inoviridae (Inovirus, Plectrovirus, M13-like viruses, fd-like viruses); Microviridae (Microvirus, Spiromicrovirus, Bdellomicrovirus, Chlamydiamicrovirus); Leviviridae (Levivirus, Allolevivirus) and Cystoviridae (Cystovirus). Such phages may be naturally occurring or engineered phages. In some embodiments, the bacteriophage is a coliphage (e.g., infects Escherichia coli). In some embodiments, the bacteriophage of the present disclosure target bacteria other than Escherichia coli, including, without limitation, Bacteroides thetaiotamicron (e.g., B1), B. fragilis (e.g., ATCC 51477-B1, B40-8, Bf-1), B. caccae (e.g., phiHSC01), B. ovatus (e.g., phiHSC02), Clostridium difficile (e.g., phiC2, phiC5, phiC6, phiC8, phiCD 119, phiCD27), Klebsiella pneumoniae (e.g., KPO1K2, K11, Kpn5, KP34, JD001), Staphylococcus aureus (e.g., phiNMI, 80alpha), Enterococcus faecalis (e.g., IME-EF1), Enterococcus faecium (e.g., ENB6, C33), and Pseudomonas aeruginosa (e.g., phiKMV, PAK-P1, LKD16, LKA1, delta, sigma-1, J-1). Other bacteriophage maybe used in accordance with the present disclosure.

### H. Methods of Predicting Target and Donor Efficiency

[0369] Described herein is a method of predicting target and donor efficiency for any given IS110 transposase. In some embodiments, the method is used to predict the efficiency of target and donor site sequences in a genome of interest. In some embodiments, the genome is a eukaryotic genome. In some embodiments, the genome is the human genome. In some embodiments, the method is used to predict the efficiency of target and donor site sequences for orthologs of a given IS110 transposase.

[0370] In some embodiments, the method comprises training a neural network model with target and donor sequences and measured efficiency data for a given IS110 transposase to generate a trained neural network model. In some embodiments, the efficiency data is from a screen performed in a first species. In some embodiments, the first species is E. coli. In some embodiments, the target and donor input sequences are about 9 bases in length. In some embodiments, the target and donor input sequences do not include a core sequence.

[0371] In some embodiments, the method further comprises applying the trained neural network model to a genome sequence of a second species to generate efficiency predictions for target and donor sequences of the genome. In some embodiments the second species is a eukaryote. In some embodiments, the second species is a human. In some embodiments, disclosed herein is a nucleic acid editing system as described throughout wherein the bridgeRNA targets a donor and target sequence with the best predicted efficiency for the given IS110 transposase.

[0372] The invention is further described by the following non-limiting Examples.

### EXAMPLES

[0373] Examples are provided below to facilitate a more complete understanding of the invention. The following examples serve to illustrate the exemplary modes of making and practicing the invention. However, the scope of the invention is not to be construed as limited to specific embodiments disclosed in these Examples, which are illustrative only.

### Example 1: Materials and Methods

[0374] This example describes the materials and methods used by the applicants to obtain the results shown in subsequent examples.

[0375] Analysis of LE and RE lengths across IS110 elements. Sequence coordinate information about individual IS elements was collected through the ISfinder web portal (Siguier et al. 2006). This included information about the total length of each IS element, as well as the start and end coordinates of the transposase CDS. The LE non-coding length was calculated from the CDS coordinates for each IS110 element as the distance between the 5′ terminus and start of the CDS, and the RE non-coding length was calculated as the distance between the end of the CDS and the 3′ terminus.

[0376] Metagenomic and genomic sequence database. A database was constructed from publicly-available metagenomic and isolated sequencing data, as described previously (Wei et al., n.d.). Briefly, a custom sequence database of bacterial isolate and metagenomic sequences was constructed by aggregating publicly available sequence database, including NCBI, UHGG (Almeida et al. 2021), JGI IMG (Chen et al. 2021), the Gut Phage Database (Camarillo-Guerrero et al. 2021), the Human Gastrointestinal Bacteria Genome Collection (Forster et al. 2019), MGnify (Mitchell et al. 2020), Youngblut et al animal gut metagenomes (Youngblut et al. 2020), MGRAST (Meyer et al. 2008), and Tara Oceans samples (Sunagawa et al. 2015). The final sequence database included 37,067 metagenomic samples, 274,880 bacterial and archaeal metagenome-assembled genomes (MAGs), 855,228 bacterial and archaeal isolate genome samples, and 185,140 predicted viral genome samples.

[0377] Annotating IS110 transposase coding sequences. Genomic sequences were annotated using Prodigal (Hyatt et al. 2010) to identify coding sequences (CDS). All unique protein sequences were then combined into a single FASTA file and clustered at 30% sequence identity using mmseqs2 (Steinegger and Soding 2017). Two Pfam domains found in IS110 transposases—DEDD_Tnp_IS110 (PF01548) and Transposase_20 (PF02371)—were used to search against these clustered representative proteins using the hmmsearch tool in the hmmer package (Finn, Clements, and Eddy 2011). Candidates between 250 and 500 aa in length were retained for further analysis. All members of the retained 30% identity clusters were then extracted, and the same IS110 Pfam domain significance thresholds were applied to these candidates to generate a final list of candidate IS110 transposases.

[0378] Phylogenetic analysis of IS110 transposases. Given this set of transposase protein sequences, we further curated it for phylogenetic analysis. First, all protein sequences with ambiguous residues were removed. Next, hmmsearch was rerun with the parameters -Z 1000000-E 1e−3 using hmmsearch and the Pfam domains DEDD_Tnp_IS110 (PF01548) and Transposase_20 (PF02371). Next, only protein sequences that contained one match to both domains, and where the DEDD_Tnp_IS110 domain preceded the Transposase_20, were retained. Next, this filtered set of protein sequences was clustered at 90% identity across 85% of the aligned sequence using the mmseqs2 easy-cluster algorithm. Next, protein sequences were filtered such that only proteins that contained a DEDD_Tnp_IS110 RuvC-like domain that was between 130 and 170 amino acids in length, and a Transposase_20 Tnp domain that was between 75 and 103 amino acids in length, were retained. Next, using the identified 90% protein sequence clusters, a representative from each cluster was selected that was closest to the 80th percentile in total length. This resulted in a curated set of 90% identity cluster representatives. Next, 90% identity cluster representatives were clustered at 40% identity across 70% of the aligned sequences using the mmseqs2 easy-cluster algorithm. These clusters were then used to select 40% identity cluster representatives, of which there were 1,323. Next, an initial protein sequence alignment was performed on these cluster representatives using mafft command with --maxiterate 2. Next, representative RuvC, coiled-coil, and Tnp domains were identified from the initial alignments to determine the boundaries of these domains within the alignment, with the coiled-coil being defined as the intervening sequence between the two Pfam domains. These three domains were then extracted from each sequence in the alignment as separate sequence files and individually aligned using the mafft-linsi --maxiterate 1000 --reorder command. These alignments were then concatenated according to protein sequence of origin, and filtered to exclude columns with over 75% gaps. Pairwise percent identity was calculated for all of the members of the resulting alignment, and a graph network was constructed of all members using 50% identity as a minimum cutoff for each undirected edge between proteins. All connected components were then identified, and only one member per component was retained, prioritized members with the fewest overall gaps. This resulted in a final alignment with 1,250 protein sequences. A phylogenetic tree was then constructed using iqtree2 v2.1.4-beta, with all default parameters except -T 32 (Minh et al. 2020). Additional metadata about each sequence was mapped onto the tree, including host kingdom and phylum, ISfinder group, and notable orthologs.

[0379] Predicting IS110 element boundaries. To identify the boundaries of each element, an initial search was conducted using comparative genomics to identify putative pre-insertion and post-insertion examples within the custom sequence database. IS110 protein candidates were clustered at 30% identity using mmseqs2 (Steinegger and Soding 2017), and within each cluster all relevant genomic loci were identified. Nucleotide sequences were then extracted from the database by adding 1,000 base pairs to the 5′ and 3′ ends of the IS110 CDS, and extracting the complete intervening sequence. If examples did not contain enough flanking sequence, they were excluded. These extracted sequences were then referred to as a “locus” in the singular and “loci” in the plural. IS110 loci were then separated into “batches” based on 90% identity protein clusters. These batches were then searched against up to 40 metagenomic or isolate samples in the custom database, prioritizing samples that already contained related transposases. Putative pre-insertion sites were identified if the distal ends of the loci aligned by BLAST to a contiguous sequence (Altschul et al. 1990), but the IS110 CDS did not. Precise boundaries of the IS110 element were then predicted using a modified method similar to what was implemented by the previously published tool MGEfinder (Durrant et al. 2020). Core sequences were identified as repeated sequences near the end of the predicted element. This search resulted in thousands of diverse loci with predicted IS110 element boundaries.

[0380] Next, an iterative BLAST search was used to extend IS110 element boundary predictions beyond those that could be detected by identifying pre-insertion sites. IS110 elements were searched using BLAST against all IS110 loci. Hits were retained only if both ends of the element aligned, and if the core was concordant between query and target. This then generated a new set of IS110 elements and their boundaries, which were recycled as query sequences, and the search was repeated for another iteration. This repeated for 36 iterations before convergence (no new IS110 elements were found). The combined set of IS110 boundaries were kept for further analysis.

[0381] Structural alignment to identify bridgeRNA consensus structure. A pipeline was developed to identify conserved RNA structures in the sequences immediately flanking the transposase CDS. First, the IS621 protein sequence was searched against the complete IS110 database for orthologs using blastp and the parameters -max target_seqs 1000000-evalue 1e−6. Only hits that were at least 30% identical at the amino acid level with 80% of both sequences covered by the alignment were retained. Up to 2000 unique proteins were then selected in order of descending percent amino acid identity. Flanking sequences for the corresponding proteins were then retrieved from the database, with flanking sequences defined as a 5′ flank of up to 255 bp (including 50 bp of 5′ CDS) and a 3′ flank of up to 170 bp (including 50 bp of the 3′ CDS). These flanks were then further filtered to exclude sequences that were more than 35 bases shorter than the target flank lengths. Sequences were filtered to exclude those with ambiguous nucleotides. Protein sequences were then clustered using mmseqs2 easy-linclust with a minimum percent nucleotide identity cutoff of 95% across 80% of the aligned sequences, and one set of flanks for each representative was retained. Flanking sequences were then clustered at 90% nucleotide identity across 80% of the aligned sequences, and only one representative flanking sequence pair per cluster was retained. Then, up to 200 sequences were selected in order of decreasing percent identity shared between the IS621 protein sequence and their corresponding ortholog protein sequence. The remaining sequences were then individually analyzed for secondary RNA structures using linearfold (Huang et al. 2019). Sequences were then aligned to each other using the mafft-qinsi alignment algorithm and parameter --maxiterate 1000. Alignment columns with over 50% gaps were removed. Conserved RNA secondary structure was then projected onto the alignment, and manually inspected to nominate bridgeRNA boundaries. This region was exported as a separate sequence alignment file, and a consensus RNA secondary structure was predicted using ConsAlifold (Tagashira and Asai 2022). This structure was then visualized using R2R (Weinberg and Breaker 2011). This same pipeline was used to analyze hundreds of other IS110 elements, resulting in diverse secondary structures such as those displayed in FIG. 13. These consensus structures were converted into covariance models using infernal, and these were then searched across thousands of sequences to nominate bridgeRNA boundaries (Nawrocki and Eddy 2013).

[0382] Nucleotide covariation analysis to identify bridgeRNA guide sequences. To identify programmable guide sequences in the bridgeRNA of the IS621 element, the following approach was taken. First, the IS621 protein sequence was searched against our collection of IS110 transposase proteins with predicted element boundaries using blastp. Next, only alignments that met a cutoff of 20% amino acid identity across 90% of both sequences were retained. Next, a covariance model (CM) of the bridgeRNA secondary and primary sequence was used to identify homologs of the bridgeRNA sequence in the non-coding ends of these orthologous sequences (Nawrocki and Eddy 2013). 50 nucleotide target and donor sequences were extracted centered around the core. For elements with multiple predicted boundaries, boundaries with a CT dinucleotide core were prioritized. Next, elements that were identified at earlier iterations in our boundary search were prioritized. Next, elements that were similar in length to the known IS621 sequence element were prioritized. Only 1 element per unique locus was retained. Predicted bridgeRNA sequences were then aligned using the cmalign tool in the Infernal package (Nawrocki and Eddy 2013). FASTA sequence files were generated that contained concatenated target and bridgeRNA sequences, and concatenated donor and bridgeRNA sequences. This alignment was then further filtered to remove all columns that contained gaps in the IS621 bridgeRNA sequence. These alignments were then analyzed using CCMpred to identify co-varying nucleotides between target/donor and bridgeRNA sequences (Ekeberg et al. 2013). These covariation scores were visualized as a heatmap, and inspected for patterns of linear covariation within the predicted bridgeRNA sequences. Possible base-pairing interactions were identified within the two internal loops of the bridgeRNA, leading to the proposed model for bridgeRNA target/donor recognition. The same covariation analysis was performed on the donor alone, leading to a theory for possible non-programmable STIR sequences.

[0383] This covariation analysis was combined with a base-pairing analysis to better identify the DNA strand that was being bound by the bridgeRNA, if any. This was accomplished using a permutation test based on the same alignment that was used as input into the covariation analysis. First, for each pair of columns in the target/donor alignment and the bridgeRNA alignment, the observed base-pairing concordance was calculated by taking the sum of non-gap rows in one column that matched the non-gap rows in the second column. To determine a null distribution for this estimate, 1,000 random permutations of these columns were performed and the base-pairing concordance was re-calculated. The mean score and the standard deviation of this permuted score distribution was calculated. This was then used to calculate a Z-score for the observed base-pairing concordance. This same procedure was repeated, but for the complement of the ncRNA nucleotides. The maximum score of the two base-pairing concordance Z-scores was used, with complement base-pairing scores being then assigned a negative value. This sign of this final score was then multiplied by the covariation score to better visualize possible base-pairing patterns.

[0384] Small RNA sequencing of IS110 bridgeRNAs. RNA was isolated from cells encoding plasmids bearing a RE-core-LE or RE-LE sequence after growth overnight on a LB agar plate with appropriate antibiotics to retain the plasmid bearing the RE-core-LE. RNA isolation was performed using Direct-zol RNA Miniprep Kit (Zymo). RNA was prepared for small RNA sequencing according to the following protocol. Briefly, no more than 5 pg total RNA was treated with DNase I (NEB) for 30 minutes at 37° C. then purified using RNA Clean & Concentrator -5 Kit. Ribosomal RNA was depleted from samples using Ribo-Zero Plus rRNA Depletion Kit (Illumina) and purified using RNA Clean & Concentrator—5 Kit. Depleted RNA was treated with T4 PNK for six hours at 37° C., supplementing with T4 PNK and ATP after six hours for one additional hour. RNA was purified using RNA Clean & Concentrator—5 kit and subsequently treated with RNA 5′ Polyphosphatase (Lucigen) for 30 minutes at 37° C. RNA was purified with RNA Clean & Concentrator—5 Kit and concentration was measured via nanodrop. Next-generation sequencing libraries were prepared using NEBNext Multiplex Small RNA Library Prep Kit (NEB) according to the manufacturer's protocol. Resultant libraries were sequenced on an Illumina MiSeq using a 2×150 Reagent Kit v2.

[0385] Analysis of small RNA sequencing data. Demultiplexed fastq files were cleaned and merged using bbduk and bbmerge, respectively (Bushnell, Rood, and Singer 2017). Merged fastq files were aligned to the RE-Core-LE bearing plasmid using bwa mem (Li and Durbin 2009). Signal to noise ratio was represented as the percentage of all reads aligned to the RE-Core-LE plasmid that were mapped to the RE-Core-LE donor sequence.

[0386] IS110 plasmid transposition assay in E. coli. BL21 DE3 cells (NEB) were co-transformed with one plasmid encoding a target site and the IS110 IS621 transposase and a second plasmid encoding a bridgeRNA, a donor site sequence, and a GFP upstream of the donor site sequence such that upon recombination with the target site GFP expression would be activated by a synthetic promoter adjacent to the target site. In some cases, the bridgeRNA is encoded within an RE-core-LE. In some cases, the bridgeRNA is expressed from a synthetic promoter. In some cases, the bridgeRNA encodes specificity for the WT target site sequence and WT donor site sequence. In some cases, the bridgeRNA encodes specificity for sequences other than the WT sequence for both the target site sequence and donor site sequence via reprogramming of the target binding loop and donor binding loop of the bridgeRNA. In some cases, the bridgeRNA and transposase are expressed from one plasmid, while the donor site sequence and target site sequence are oriented appropriately to a GFP coding sequence on a second plasmid such that excisive recombination or inversion mediated by the transposase and bridgeRNA results in GFP expression. Co-transformed cells were plated on LB agar containing kanamycin, chloramphenicol, and 0.07 mM IPTG. Plates were incubated at 37° C. for 16 hours and subsequently incubated at room temperature for 8 hours. Several colonies that appeared to express GFP under blue light were seeded in TB containing kanamycin and chloramphenicol and incubated for 16 hours at 37° C. shaking at 200 rpm. Plasmid-plasmid integration product plasmids were purified using QIAprep Spin Miniprep Kit and sent for whole plasmid sequencing to confirm integration product sequence (Primordium Labs). Hundreds of colonies were subsequently scraped from the plate, resuspended in TB, and diluted to an appropriate concentration for flow cytometry. 50000 cells were analyzed on a Novocyte Quanteon Flow Cytometer to assess the percentage of GFP expressing cells.

[0387] IS110 pooled target screen design. A pooled screen was designed to test target loop mismatch tolerance and relative efficiency across diverse guide sequences. Several categories of oligos were designed to answer different questions. First, 10,656 oligos were designed to test hundreds of different target guides with single mismatch pairs. That is, for a given target, one position in the guide and the corresponding position in the target to generate all 4×4=16 combinations of nucleotides. Target guides were selected to reduce genomic off-targets. Next, 3,600 oligos were designed to test different combinations of double mismatches between target loop and target. Next, 2,135 oligos were designed to test the boundaries and programmability of the guide outside of the known programmable sequences, to determine if increased specificity is possible. Next, 2,000 oligos were designed as an internal set of negative controls by ensuring that none of the 9 programmable positions (excluding the CT core) matched in the target loop and target. Next, another 1,800 oligos were designed to test more single mismatch combinations, but did not include all 4×4 combinations in target and target loop. Next, 1,610 oligos were designed to test how mismatches in the dinucleotide core of the bridgeRNA sequences affected recombination efficiency. Finally, the GO1 positive control was included for comparison. One unique barcode per amplicon was assigned at random, ensuring that no 2 barcodes were within 2 mismatches of each other. Each oligo encoded a target site sequence, a promoter to activate expression of a reporter molecule after recombination of a donor site sequence with the target, a barcode to identify the target-target loop pair, a promoter to express a bridgeRNA, and a target loop of a bridgeRNA. The oligo was flanked on both ends with sequences suitable for golden gate cloning into a desired plasmid backbone. All oligos were ordered as a single pooled library from Twist.

[0388] IS110 pooled target screen experimental protocol. The library of target-bridgeRNA pairs was cloned into a plasmid encoding a T7-inducible IS110 transposase such that a full length bridgeRNA was reconstituted in the plasmid. The bridgeRNA donor loop was encoded to bind to the WT donor site sequence. The library of plasmids encoding the target-bridgeRNA pairs was co-electroporated into BL21 DE3 cells with a second plasmid encoding a WT donor site sequence adjacent to a kanamycin resistance gene such the kanamycin gene would be transcribed upon recombination between the two plasmids. After co-electroporation and recovery, cells were plated on bioassay dishes with LB agar. One plating condition, serving as the control, was LB agar with chloramphenicol and ampicillin, which maintain the plasmids but do not induce or require recombination. A second condition was LB agar with chloramphenicol, ampicillin, kanamycin, and 0.1 mM IPTG; IPTG induces transposase expression, prompting recombination, while kanamycin selects for cells that have induced recombination between the donor and target plasmid. Both conditions were performed in two replicates. Recombination indicates a compatible target-target loop pair within the library.

[0389] IS110 pooled target screen sequencing preparation. Hundreds of thousands of colonies were scraped from the bioassay dishes and had plasmid DNA extracted using Nucleobond Xtra Midiprep Kit (Macherey Nagel). After plasmid DNA isolation, samples were prepared for next generation sequencing. For DNA isolated from the control conditions, a PCR was used to amplify the barcodes specifying target and bridgeRNA pairs to measure the distribution of barcodes without selecting conditions. For DNA isolated from selection conditions, a PCR was used to amplify the barcodes specifying target and bridgeRNA pairs, with one primer priming from the donor plasmid and the other priming from the target plasmid such that only barcodes from recombinant plasmids were measured. The distributions of barcodes from recombinant plasmids was subsequently compared to the distribution of barcodes under control conditions.

[0390] IS110 pooled target screen analysis. Amplicon sequences were processed using the bbduk tool (Bushnell, Rood, and Singer 2017). Amplicon sequencing data was then aligned to their respective wildtypes using bwa mem, with ambiguous nucleotides at all variable positions. Barcodes were then extracted from the amplicons using custom python scripts. Barcodes were mapped to the designed barcode library, tolerating single mismatches when making assignments. This resulted in a table of barcode counts per biological replicate. Using custom R scripts, the counts were normalized within each replicate using counts per million (CPM), which converts raw barcode counts into barcode counts per million barcodes. CPM values were then averaged across the two biological replicates in each condition. For the recombinant barcodes, CPM values were then corrected by the control barcode CPM values using a simple correction factor for each barcode, calculated by dividing the expected barcode CPM (under a uniform distribution) by the observed barcode CPM. These corrected CPM values were subsequently used in many of the individual analyses. Mismatch tolerance was assessed by limiting the analysis to the top quintile of most efficient 4×4 single mismatch sets, and then averaging the percentage of total CPM within each set at each position. The motif of enriched nucleotides at each position was generated by determining the nucleotide composition of the top quintile of most efficient target loop/target pairs (without mismatches), and comparing this to the nucleotide composition of the entire set. All oligos were ordered as a single pooled library from Twist.

[0391] IS110 pooled donor screen design. A pooled screen was designed to test donor loop programmability, mismatch tolerance, and relative efficiency across diverse guide sequences. Several categories of oligos were designed to answer different questions. Donor sequences were selected to reduce predicted genomic off-targets. First, 13,593 oligos were designed that included complete single mismatch scans across 100 distinct donors, including all position 4×4=16 mismatches with the donor at the corresponding position. Next, 5000 completely random donor guides were selected and paired with a perfect match donor for the analysis of a high number of diverse donor sequences. Next, 2,297 oligos to test single mismatch and double mismatch scans of the WT donor sequence and 4 other functional donors were included. Next, 50 negative control oligos were included that ensured that none of the 9 programmable positions (excluding the CT core) matched in the donor loop and donor. Finally, 30 oligos included mutations where the WT donor bridgeRNA promoter box sequences were mutated to determine their effect on efficiency. Each oligo encoded a partial RE, a donor site sequence, and full length LE encoding a bridgeRNA as found in the WT system such that expression of the bridgeRNA would be mediated by the natural system promoter. The donor site sequence and donor loop sequence of the bridgeRNA were modified in each member according to the description supra, while the target loop of the bridgeRNA was constant and programmed to recognize a target site sequence not found in the BL21 DE3 E. coli genome. The oligo was flanked on both ends with sequences suitable for golden gate cloning into a desired plasmid backbone. All oligos were ordered as a single pooled library from Twist.

[0392] IS110 pooled donor screen experimental protocol. The library of donor-bridgeRNA pairs was cloned into a library of backbone plasmids encoding a partial RE adjacent to a kanamycin gene such that the full length RE was reconstituted, such that the kanamycin gene would be transcribed upon recombination between the donor plasmid and a second plasmid encoding a target, and such that a unique molecular identifier (UMI) within the library of backbone plasmids was adjacent to the donor-bridgeRNA pair. The library of plasmids encoding the donor-bridgeRNA pairs was co-electroporated into BL21 DE3 cells with a second plasmid encoding a E. coli genome orthogonal target sequence adjacent to a constitutive promoter and encoding a T7-inducible IS110 transposase. After co-electroporation and recovery, cells were plated on bioassay dishes with LB agar. One plating condition, serving as the control, was LB agar with chloramphenicol and ampicillin, which maintain the plasmids but do not induce or require recombination. A second condition was LB agar with chloramphenicol, ampicillin, kanamycin, and 0.07 mM IPTG; IPTG induces transposase expression, prompting recombination, while kanamycin selects for cells that have induced recombination between the donor and target plasmid. Both conditions were performed in two replicates. Recombination indicates a compatible donor-donor loop pair within the library.

[0393] IS110 pooled donor screen sequencing preparation. Hundreds of thousands of colonies were scraped from the bioassay dishes and had plasmid DNA extracted using Nucleobond Xtra Midiprep Kit (Macherey Nagel). After plasmid DNA isolation, samples were prepared for next generation sequencing. For DNA isolated from the control conditions, a PCR was used to amplify the UMI specifying donor and bridgeRNA pairs to measure the distribution of UMIs without selecting conditions. For DNA isolated from selection conditions, a PCR was used to amplify the UMIs specifying donor and bridgeRNA pairs, with one primer priming from the donor plasmid and the other priming from the target plasmid such that only UMIs from recombinant plasmids were measured. The distributions of UMIs from recombinant plasmids was subsequently compared to the distribution of UMIs under control conditions. UMIs were initially mapped to donor-bridgeRNA pairs by amplifying a region of the input donor library such that the information of all variable sites within the full length of the RE-LE were captured in addition to the adjacent UMI.

[0394] IS110 pooled donor screen analysis. First, All amplicon sequence data was pre-processed using bbduk to remove adapters. Next, unique molecular identifiers (UMIs) were mapped to their respective oligos. This was done by aligning to the expected amplicon sequence with ambiguous N nucleotides in all the variable positions using bwa mem. UMIs were then determined from the alignments, and combined with the variable LDG and RDG to guarantee the uniqueness of each UMI to each oligo. Next, control and recombinant samples were analyzed in much the same way as the previously described target screen, but UMIs were counted rather than assigned barcodes. Next, UMI counts were converted to CPM, averaged across two biological replicates, and normalized according to the correction factors calculated in the control condition. These CPM values were then analyzed across different oligo categories to assess mismatch tolerance, how distance from the wild-type donor affects efficiency, and what nucleotide sequences were favored/disfavored at each position in the donor.

[0395] Analysis of conserved residues and regions in IS110 family transposase domains. Applicants took the following approach to identify regions of functional significance within IS110 transposase protein sequences. Pre-defined IS110 profile HIM4M models DEDD_Tnp_IS110 (PF01548) and Transposase_20 (PF02371) were searched against a collection of 1,453,592 putative IS110 transposases using hmmsearch (Finn, Clements, and Eddy 2011). Regions that were identified by the DEDD_Tnp_IS110 model were extracted from each sequence as predicted RuvC domains, and filtered by the Applicants according to an E-value cutoff of 1e−3 and a length cutoff of greater than 124 and less than 176 amino acids. Regions that were identified by the Transposase_20 model were extracted from each sequence as predicted Tnp domains, and filtered by the Applicants according to an E-value cutoff of 1e−3 and a length cutoff of greater than 59 and less than 111 amino acids. Applicants aligned extracted domains using the hmmalign tool (Finn, Clements, and Eddy 2011) clustered extracted domains using mmseqs2 (Steinegger and Soding 2017) at 90% sequence identity. One domain representative of each 90% identity cluster was then used to identify conserved residues and regions, with preference given to residues with known catalytic activity. Applicants further analyzed these conserved residues and regions to identify the domain motifs presented in FIGS. 21-24. Applicants also visualized the conserved residues and regions in FIGS. 12A-12B.

[0396] IS110 genomic insertion assay with long-read nanopore sequencing. A plasmid was prepared encoding a donor site sequence adjacent to a constitutively expressed kanamycin resistance gene and a temperature sensitive Rep101 protein. Plasmid replication of this donor plasmid was eliminated in cells upon growth at 37° C., ensuring that cells encode a single copy of the donor plasmid. A cell line was prepared encoding this donor plasmid by transforming BL21 DE3 and making the resultant cell line chemically competent using Mix & Go preparation kit (Zymo). The temperature sensitive donor plasmid was then transformed with a pHelper plasmid encoding a T7-inducible transposase and a constitutively expressed bridgeRNA. The donor loop of the bridgeRNA was programmed to recognize the donor site sequence within the donor plasmid and the target loop of the bridgeRNA was programmed to recognize a target site sequence in the BL21 DE3 E. coli genome. After transformation, cells were recovered and plated on 10 cm LB agar plates with chloramphenicol to retain the pHelper plasmid and kanamycin to require integration of the donor plasmid into the genome for cell survival. The 1000s of resultant colonies, each with an integration of the donor plasmid into the genome, were scraped from the plate. Genomic DNA was extracted from the pool of cells using Quick DNA Miniprep plus kit (Zymo). Genomic DNA was then cleaned up using AMpure XP (Beckman Coulter) and sequenced using Oxford Nanopore Technologies nanopore sequencing to at least 100× genome coverage.

[0397] Analysis of IS110 genomic insertion nanopore sequencing data. To identify long reads containing potential insertion junctions between plasmid donor and E. coli genome, we first scanned all individual reads for the presence of the terminal 20 nucleotides of the donor sequence, excluding the core. If a 20 base-pair sub-sequence of a read matched the 5′ terminus or 3′ terminus (allowing for up to 2 mismatches), then the read was split and the flanking sequences were written to separate files. These flanking sequences were then mapped back to the plasmid sequences and the E. coli genome using minimap2 (Li 2018), and assigned as originating from the plasmid or the E. coli genome according to whichever had the higher alignment score. Reads were then assigned to specific insertion junctions in the human genome to identify precise insertion sites. Insertion sites that were within 5 base-pairs of each other were merged together using bedtools merge (Quinlan and Hall 2010) and a representative insertion site was selected. The total number of unique reads per insertion site was selected, and the relative ratios of these read abundances were calculated to analyze genomic insertion specificity.

[0398] Analysis of IS110 transposase tertiary structure. AlphaFold models for thousands of IS110 transposase sequences are publicly available through the AlphaFold Protein Structure Database (AFDB; alphafold.ebi.ac.uk). This database was searched to identify all protein sequences that had the terms “IS110” or “IS1111” in their UniProt descriptions. 40,512 such sequences were identified and downloaded from AFDB. The IS110 domain pHMMs (DEDD_Tnp_IS110 and Transposase_20) were searched against the primary sequences of this collection of structures using hmmsearch and the parameters “—Z 1000000-E 10.” Only pHMM matches with an e-value less than 1e−3 were retained. The DEDD_Tnp_IS110 was required to be between 125 and 175 amino acids in length, and the Transposase_20 was required to be between 60 and 110 amino acids in length. Only proteins that had both of the domains after applying these filters were retained, resulting in 24,043 predicted IS110 protein structures. Protein sequences were then clustered using MMseqs2 command “easy-cluster -c 0.8 --threads 8 --cluster-reassign”, first with the “--min-seq-id 0.90” parameter on the unique sequences, and then with the “--min-seq-id 0.50” parameter on the 90% identity clusters. The TM-align software (v20220412; Zhang and Skolnick 2005) was used to determine the TM-scores of all the protein structures with respect to the IS621 AlphaFold protein structure. Substructures were extracted for comparison using the biopython python package. Distances between conserved nucleotides were calculated using the biopython package. This process was repeated for IS630 transposase to determine the specificity of TM-score as a cutoff for identifying related orthologs.

[0399] In vitro transcription of bridgeRNAs. In vitro transcription was carried out on a linear DNA template using the HighScribe T7 High Yield RNA Synthesis Kit (New England Biolabs) as per the manufacturer's instructions. DNA template was prepared by cloning into a pUC19 backbone and plasmid was linearized using SapI restriction enzyme (NEB) and purified using DNA Clean & Concentrate (Zymogen). After IVT, RNA was purified using the Monarch RNA Cleanup Kit. Where necessary, bridgeRNA was further purified denaturing polyacrylamide gel electrophoresis, extracted from the gel using UV shadowing and recovered by ethanol precipitation.

[0400] Microscale Thermophoresis. Microscale thermophoresis (MST) was carried out using a Monolith NT.1 I5pico Series instrument (NanoTemper technologies). IS621 recombinase was labeled for MST using the RED-MALEIMIDE 2nd Generation cysteine reactive kit (NanoTemper technologies) as per the manufacturer's instructions. Labeled protein was eluted in a buffer containing 20 mM Tris-HCl, 500 mM NaCl, 5 mM MgCl2, 1 mM DTT, 0.01% Tween20, pH 7.5. In order to determine affinity of recombinase for RNA, 20 nM recombinase were incubated with a dilution series (2500-0.076 nM) of purified LE encoded ncRNA or a scrambled RNA of equivalent length. MST was performed at 37° C. using premium capillaries (NanoTemper) at 30% LED excitation and medium MST power. Data were analyzed using the NanoTemper MO. affinity analysis software package and raw data were plotted on Prism for visualization. The binding affinity of IS621 RNP for donor and target DNA, as well as donor and target DNA containing scrambled LD-RD and LT-RT regions were determined using the MST tertiary binding function. Single-strand DNA was purchased from IDT (Coralville, USA) and annealed in buffer containing 10 mM Tris pH 8.0, 5 mM MgCl2 and 5 mM KCl. For MST, 20 nM RNP consisting of labeled IS621 recombinase and LE encoded ncRNA were incubated with a dilution series of duplexed donor or target DNA oligonucleotides (10 μM to 0.076 nM). MST was performed at 37° C. using premium capillaries (NanoTemper) at medium MST power with the LED excitation-power set to automatic (excitation ranged from 20-50%).

[0401] Predicting target and donor efficiency. Using target and donor screen data efficiency data, neural net models were constructed to predict the efficiency of unseen targets and donors. The variable 9 nt target and donor sequences (excluding the 2 nt core) were used as input into the models. Efficiency was measured as log 10(CPM+1). The efficiency data was split into training and test datasets, with 10% of the data used as a test dataset. Fully connected neural net models were constructed and tested using the Keras python package (Chollet and Others 2015). A range of random hyperparameter permutations were tested using KerasTuner (O'Malley et al. 2019), including different numbers of layers (1, 2, or 3), and nodes (256, 512, 1024, and 2,048), and different loss function (mean squared error and mean absolute error) and final layer activation functions (ReLU and linear). The model that performed best on a validation dataset (20% of the training dataset) across 40 random hyperparameter permutations was selected for both target and donor efficiency prediction. This model was then retrained for 100 epochs, and the epoch that minimized the validation loss was selected as the final model. Efficiency predictions were made for all 262,144 target and donor sequences and stored in a single file. The best performing models were then run on the held-out test dataset, and correlations between predicted efficiency and observed experimental efficiency were quite high (r=0.828 for target screen, r=0.847 for donor screen, P<2.2e−16 for both correlation tests).

### Example 2: Description of General Features of IS110 Elements

[0402] Based on literature examples, applicants identified that IS110 elements are split into two groups, an IS110 and IS1111 group. Applicants noted that both groups comprise an LE, transposase, and RE; they also noted that IS110s also encode a core sequence found at either end of the element (FIG. 1A). Members of the IS110 group were known to encode sub-terminal inverted repeats (STIRs) previously, while applicants identified that members of the I110 group also encode short STIRs (FIG. 10B). I110 transposases encode protein domains that are RuvC-like with a canonical DEDD catalytic motif, they also encode a transposase domain with a catalytic serine (FIG. 1). IS110 elements were previously known to undergo cut-and-paste recombination, excising from an integration site to form a circular form where the RE and LE are concatenated (FIG. 1C). Formation of a promoter at the RE-LE junction was also a known phenomenon of IS110s. To further characterize IS110s, applicants identified thousands of IS110 transposases and built a phylogenetic tree from their primary sequences; applicants mapped known IS110 elements onto this phylogeny and noted the host kingdom and phylum of the element, indicating broad distribution (FIG. 1D). Applicants analyzed the non-coding end length of IS110 and IS1111 groups of IS110s listed in the public ISFinder database, identifying that IS110s typically have longer LEs and IS111 s have longer REs (FIG. 1E).

### Example 3: Identification of the bridgeRNA

[0403] Using IS621 and closely related orthologs, applicants performed RNAseq on cells expressing an RNA from the LE via the natural promoter. RNAseq analysis indicated that transcription of an RNA corresponds with the transcription start site of the known sigma70 promoter motif, and that the resultant RNA spans the remainder of the length of the LE of the IS110 (FIG. 2A). This RNA was named the bridgeRNA. Using microscale thermophoresis, applicants demonstrated that purified IS621 transposase specifically binds the bridgeRNA; an accessory structure at the 5′ end of the bridgeRNAwas not found to be required for binding but did increase affinity for the bridgeRNA when present (FIG. 2B). An alignment of LEs across many orthologs was subsequently analyzed for patterns in RNA secondary structure, assuming the presence of bridgeRNAs within LEs of distant orthologs of IS621 (FIG. 2C). A consensus RNA structure indicated the presence of a 5′ stem-loop followed by two additional stem-loops with internal loop regions (FIG. 2D).

### Example 4: Prediction and Verification of the Mechanism of bridgeRNA Recognition of Donor and Target Site Sequences

[0404] Using comparative genomics and other computational techniques, the target site sequences, predicted bridgeRNA boundaries, and donor site sequences of thousands of IS110 elements were identified and extracted for subsequent alignment to identify covarying bases between the bridgeRNA sequence and both the donor and target (FIG. 3A). Applicants identified two primary regions of the bridgeRNA that covary with the target and two primary regions of the bridgeRNA that covary with the donor across diverse IS110 orthologs (FIG. 3B). Upon inspection, there was evidence of potential base-pairing between these covarying regions of the bridgeRNA and the target and donor (FIG. 3B). Using the consensus bridgeRNA structure identified in FIG. 2D, Applicant's identified the location of these potential base-pairing sites within the two loops of the bridgeRNA, named the target binding loop and donor binding loop (FIG. 3C). Using purified IS621 transposase and bridgeRNA, applicants measured binding affinity of the purified RNP to the predicted donor and target site sequences using microscale thermophoresis, indicating that the RNP binds the WT target and donor sequences in a base-pairing specific manner (FIG. 3D).

### Example 5: Method for Reprogramming bridgeRNAs Using IS621 as an Example

[0405] For a given target and donor site sequence, the LTG, RTG, LDG, and RDG can be reprogrammed to specifically base pair with subsequences of the target site sequence and donor site sequence. The bases in the target and donor can be any base; examples where the cores match are shown but matching cores may not be required between the target and donor. Additionally, the STIR is not strictly required for donor site sequences (FIG. 4A).

### Example 6: Demonstration of Transposition in Cellulo Using Components of the IS110 System

[0406] Applicants designed an assay to measure transposition by encoding the RE-LE donor junction, target site sequence, and transposase on plasmids with a GFP reporter (FIG. 5A, see EXAMPLE 1). To demonstrate the effectiveness of this system, Applicants measured GFP expression when using a WT IS621 transposase and compared it with a catalytically inactivated IS621 transposase by mutating the RuvC domain or the Tnp domain, showing that GFP expression was only observed when the WT transposase was provided (FIG. 5B). Using bridgeRNA reprogramming strategies previously described, the bridgeRNA was reprogrammed within the LE to encode a target loop specific for a new target. Pairing this new target loop with a target site sequence with which it could base pair resulted in transposition, while pairing with the IS621 WT target site sequence resulted in no observed transposition (FIG. 5C). Applicants further demonstrated that the bridgeRNA can be expressed from a synthetic promoter by truncating the RE-LE and measuring transposition efficiency (FIG. 5D). Applicants note that in this case provision of the 11 bp donor site sequence reduced transposition efficiency near the background, yet some transposition events were confirmed by sequencing of transposition products.

### Example 7: IS621 bridgeRNA Target/Target Loop High-Throughput Screen

[0407] To explore the characteristics of bridgeRNA target loop reprogramming, Applicants designed a selection and next-generation sequencing based high-throughput screen (FIG. 6A-6B, see EXAMPLE 1). Applicants identified that the target loop is sensitive to single mismatches with the target, and very sensitive to double mismatches with the target, with a similar distribution of barcode counts per million (CPM) to target/target loop pairs that have 9 mismatches (FIG. 6C). From the screen data, applicants identified a motif for the top 20% most efficient target/target loop pairs (FIG. 6D). Applicants also observed the effect of mismatches at each position of the target/target loop pair, noting that most positions strongly prefer matches over mismatches (FIG. 6E).

### Example 8: IS621 bridgeRNA Donor/Donor Loop High-Throughput Screen

[0408] To explore the characteristics of bridgeRNA donor loop reprogramming, Applicants designed a selection and next-generation sequencing based high-throughput screen (FIG. 7A-7B, see EXAMPLE 1). Applicants compared the WT donor site sequence to donors with 1 or 2 nucleotide differences from the WT donor, noting that the WT donor is not the most efficient donor sequence tested (FIG. 7C-7D). Applicants also noted that single mismatches between the donor and donor loop were sometimes tolerated, while double mismatches between the donor and donor loop were largely not tolerated (FIG. 7C-7D). Across all donor and donor loop pairs tested, Applicants measured the relative efficiency of donors differing by up to 9 bases from the WT donor; efficient donors were identified with any number of differences from the WT, indicating complete reprogrammability (FIG. 7E). Applicants also observed the effect of mismatches at each position of the donor/donor loop (FIG. 7F). From the screen data, Applicants identified a motif for the top 20% most efficient donor/donor loop pairs (FIG. 7G). Using the GFP reporter assay depicted in FIG. 5D, Applicants measured transposition efficiency of reprogrammed donors with a varying number of differences from WT, indicating broad reprogrammability (FIG. 7H).

### Example 9: Comparison of Recombination Efficiency Using Reporters for Insertion, Excisive Recombination, and Inversion

[0409] Applicants designed GFP reporter assays to assess and compare recombination efficiency for insertion, excisive recombination, and inversion, finding similar recombination efficiency across reaction types (FIG. 8A-8C, see EXAMPLE 1).

### Example 10: Integration of Large Cargoes into E. coli Genomes Using Reprogrammed bridgeRNAs

[0410] Applicants developed an approach for integrating single donor molecules into the E. coli genome using a bridgeRNA and the IS621 transposase (FIG. 9A, see EXAMPLE 1). Using this approach, applicants evaluated 4 bridgeRNAs programmed to direct integration of the donor plasmid into specific target site sequences in the E. coli genome. After analysis with nanopore whole genome sequencing, applicants demonstrate that the donor is primarily integrated into the programmed site, with some additional off-target integration sites that could be explained by high similarity with the intended target. (FIG. 9B).

### Example 11: Identification of Sub-Terminal Inverted Repeat Sequences in IS110s Using Covariation Analysis

[0411] Applicants used a covariation analysis approach to interrogate covarying bases between the RE and LE over the RE-LE or RE-core-LE (FIG. 10A, see EXAMPLE 1). Covariation analysis revealed the presence of sub-terminal inverted repeats across diverse orthologs (FIG. 10B).

### Example 12: Prediction and Verification of a bridgeRNA from an IS1111 Element

[0412] Applicants used analysis of conserved structures within the RE of an IS1111 to identify a putative bridgeRNA structure (FIG. 11A). Applicants subsequently built a consensus structure model of the bridgeRNA using ConsAliFold and R2R, and detected expression of the bridgeRNA from the RE in cellulo (FIG. 111B-11C, see EXAMPLE 1).

### Example 13: Alignment of RuvC-Like and Tnp Domains of Diverse IS110 Transposases

[0413] Applicants identified three conserved regions that consist of the known catalytic residues and other conserved residues within the RuvC domain of IS110 transposases (FIG. 12A). Applicants identified two conserved regions in addition to several other conserved residues within the Tnp domain of IS110 transposases, including a catalytic serine residue (FIG. 12B).

### Example 14: Diverse bridgeRNA Structures Associated with Diverse IS110 Transposases

[0414] Applicants identified clusters of bridgeRNA structures across diverse IS110 elements (see EXAMPLE 1). Applicants depicted some of these structures using R2R, and indicated the name of a representative IS110 element associated with each bridgeRNA structure (FIG. 13).

### Example 15: IS110 Protein Structure Analysis

[0415] Recent advances in the prediction of tertiary protein structures from primary sequences enable new techniques for identifying homologous protein sequences. The previous state-of-the-art in homology detection included protein sequence alignment or profile hidden markov models (pHMM) of known protein domains. Previously, scientists have chosen some sequence similarity cutoff, such as a percent amino acid identity above 90%, to assign proteins to the same functional family. Here, we used the AlphaFold deep learning model to predict protein structure and thereby to identify proteins that are homologous at the level of their 3-dimensional structure, which can be more sensitive for detecting more distant evolutionary relationships (van Kempen et al. 2023). This Example demonstrates that a TM-score cutoff of greater than 0.5 is very sensitive and specific when it comes to identifying members of the IS110 family, and it can be used to identify related transposases of similar molecular function. This Example also demonstrates that conserved residues in IS110 structures consistently appear within protein structures at similar distances to each other, again providing evidence for conserved function.

### Protein Tertiary Structure Similarity

[0416] Rather than percent amino acid identity, a different metric is needed to assess the similarity of two protein structures. A widely used and robust similarity metric for this purpose is called the Template modeling score (TM-score), defined as the formula shown in FIG. 14A.

### IS110 Protein Structure Analysis

[0417] Since the introduction of AlphaFold, protein structure prediction has dramatically accelerated. Large collections of predicted structures have been made publicly available, including the AlphaFold Protein Structure Database (AFDB; alphafold.ebi.ac.uk). This database contains over 200 million predicted protein structures spanning a wide diversity of protein families.

[0418] This database was searched to identify all protein sequences that had the terms “IS110” or “IS1111” in their UniProt descriptions. 40,512 such sequences were identified and downloaded from AFDB. The IS110 domain pHEMMs (DEDD_Tnp_IS110 and Transposase_20) were searched against the primary sequences of this collection of structures using hmmsearch and the parameters “—Z 1000000-E 10.” Only pHEMM matches with an e-value less than 1e−3 were retained. We required that the DEDD_Tnp_IS110 were between 125 and 175 amino acids in length, and that the Transposase_20 matches were between 60 and 110 amino acids in length. Only proteins that had both of the domains after applying these filters were retained, resulting in 24,043 predicted IS110 protein structures. The TM-align software (v20220412) was used to determine the TM-scores of all the protein structures with respect to the IS621 transposase AlphaFold protein structure. The distribution of TM-scores is shown in FIG. 14B.

[0419] The vast majority of predicted IS110 protein structures have a high TM-score when compared with the predicted IS621 structure. When using scores that are normalized by the average length of the query protein sequence and the IS621 protein sequence, 99.7% exceed a TM-score cutoff of 0.5, 99.4% exceed a TM-score cutoff of 0.6, 88.1% exceed a TM-score cutoff of 0.7, and 18% exceed a TM-score cutoff of 0.8.

[0420] As an example, we show the structural alignment of two IS110 transposases that are distantly related at the level of amino acid percent identity, but have high structural similarity as measured by TM-score (FIG. 14C). These two proteins are 18.1% identical at the amino acid level when aligned using MAFFT G-INS-i algorithm, but have a TM-score of 0.805. This demonstrates that IS110 structures are largely conserved across diverse members, and that the TM-score is a robust metric for detecting these similarities.

[0421] When the analysis was restricted to only diverse sequences, TM-scores remained high. We took cluster representatives at 90% amino acid identity and 50% amino acid identity and compared their TM-score distributions (FIG. 14D). We found that the distributions remained roughly the same, suggesting that these TM-scores remain high even when only considering sequences that are highly diverse at the level of primary protein sequence.

[0422] We next extracted only the substructures of each protein structure that corresponded with the predicted IS110 Pfam domains. There are many ways that these domains could be defined, and we chose to use the Pfam pHMM domains due to their widespread availability and ease of use. These protein domains were extracted from the tertiary structures using the biopython python package. These extracted domains were then aligned to the IS621 extracted domains using TM-align software (v20220412) as before. Results demonstrate that these protein domain substructures are also highly conserved at TM-score >0.5, with the Tnp domain being especially well conserved (FIG. 14E).

[0423] To demonstrate that the TM-score is both sensitive and specific when it comes to identifying IS110 homologs, we compared how the TM-score distribution appeared when aligning the IS621 structure to the structure of IS630 family transposases, which are a completely separate family of transposases that have a transposition mechanism that is completely distinct from that of IS110 family transposases. After downloading these structures and preparing them for analysis, 262 IS630 structures remained. Comparing the TM-score distribution of these protein structures to IS110 structures shows a clear separation between the two (FIG. 14F). All IS630 structures had a TM-score less than 0.50, and 99.7% of IS110 structures had a TM-score above 0.5, demonstrating the utility of the TM-align software and the TM-score metric for identifying structural homologs.

[0424] Having determined that these protein structures are highly conserved across diverse primary sequences, we next sought to determine if the distances between highly conserved residues was also conserved within these structures. We identified 5 highly conserved residues in both the RuvC domain and Tnp domains by primary sequence alignment. We extracted these 3-dimensional positions from all of the IS110 AlphaFold structures. For the 5 conserved residues in the RuvC domain, identified as P1-P5, we calculated 3 distances in all structures (FIG. 14G). These distances include D1, which is the distance between P1 and P2; D2, which is taken as the average of the distances between P1 and P3, P1 and P4, and P1 and P5; and D3, which is taken as the average of the distances between P2 and P3, P2 and P4, and P2 and P5. For the 5 conserved residues in the Tnp domain, identified as P1-P5, we calculated 3 distances in all structures. These distances include D1, taken as the average of the distances between P1 and P2, and P1 and P5; D2, taken as the average of the distances between P2 and P3, P2 and P4, P5 and P3, and P5 and P4; and D3, which is the distance between P2 and P5.

[0425] Our analysis indicates that the distances between these residues are highly conserved across diverse IS110 protein structures (FIG. 14H). For the RuvC domain, the average D1 distance is 6.57 Å with a standard deviation of 0.809 Å; the average D2 distance is 8.31 Å with a standard deviation of 0.87 Å; and the average D3 distance is 12.2 Å with a standard deviation of 1.01 Å. For the Tnp domain, the average D1 distance is 19.8 Å with a standard deviation of 1.41 Å; the average D2 distance is 23.4 Å with a standard deviation of 0.52 Å; and the average D3 distance is 8.43 Å with a standard deviation of 1.08 Å. Low standard deviations imply that these distances are highly consistent across structures, and that these conserved residues also likely have a conserved structural or enzymatic function.

### Example 16: Assessment of Donor Boundaries of an IS110

[0426] An oligonucleotide encoding the WT donor sequence was purchased with varied N nucleotides incorporated either upstream or downstream of the core sequence as depicted in FIGS. 37A-D. This oligonucleotide was amplified using flanking PCR primers and the resultant library of sequences cloned into a donor backbone which also encodes the bridgeRNA and a kanamycin resistance gene using Golden Gate Assembly. Libraries were then electroporated in Endura DUO electrocompetent cells (Biosearch Technologies). Hundreds of thousands of colonies were isolated for sufficient coverage of the oligo library, and plasmids bearing library members were purified using Nucleobond Xtra Midiprep Kit (Macherey Nagel).

[0427] The plasmid libraries encoding thousands of donor boundary sequences were co-electroporated into E. cloni EXPRESS electrocompetent cells (Biosearch Technologies) along with a plasmid encoding the target and the recombinase. A target adjacent promoter results in expression of the kanamycin resistance gene following recombination of the two plasmids, allowing cell survival. After co-electroporation and recovery, cells were plated on bioassay dishes with LB agar. One plating condition, serving as the control, was LB agar with chloramphenicol and ampicillin, which maintain the plasmids but do not induce or require recombination. A second condition was LB agar with chloramphenicol, ampicillin, kanamycin, and 0.07 mM IPTG; IPTG induces recombinase expression, prompting recombination, while kanamycin selects for cells that have induced recombination between the donor and target plasmid. Both conditions were performed in two replicates.

[0428] Hundreds of thousands of colonies were scraped from the bioassay dishes and had plasmid DNA extracted using Nucleobond Xtra Midiprep Kit (Macherey Nagel). After plasmid DNA isolation, samples were prepared for next generation sequencing. For DNA isolated from the control conditions, a PCR was used to amplify the barcodes specifying target and bridgeRNA pairs to measure the distribution of barcodes without selecting conditions. For DNA isolated from selection conditions, a PCR was used to amplify the donor-target junction such that the variable donor sequence was captured.

[0429] Sequenced amplicons were analyzed using a custom snakemake workflow. First, reads were trimmed using the BBTools package (Bushnell, Rood, and Singer 2017). Reads were aligned to the expected amplicons using BWA-MEM (Li 2013). Only reads that aligned within 5 bp of the expected amplicon were retained. Sequences were extracted from the variable regions on the 5′ and 3′ side of the donor sequence, and the frequency of each sequence was calculated. The preference for each nucleotide at each sequence position was calculated in R, normalizing for the frequency of each nucleotide at each position in the unselected control condition.

### Example 17: Selecting Human Genome Insertion, Inversion, and Excision Candidates

[0430] All 14 nt sequences that appeared only one time in the human genome (hg38) were identified using the KMC kmer-counting tool (Kokot, Dlugosz, and Deorowicz 2017). Only sequences with CT or GT cores were retained, resulting in 3,563,893 such sequences. For insertion candidates, sequences were ranked by predicted and observed efficiencies in the target/donor screens. For excision and inversion candidates, all sequences that were within 5 kbp of each other were identified. Pairs of sequences that shared the same core (CT or GT) were retained. These pairs of sequences were then ranked by their predicted efficiencies using the target/donor screen neural net models. Sequences that existed on the same strand were considered to be excision candidates, while sequences on opposite strands were inversion candidates.

### Example 18: Assessing Plasmid-Plasmid Recombination in Human Cells

[0431] HEK293T cells were seeded at 18k cells/well in 96-well PDL treated flat bottom plates. Cells were transfected using Lipofectamine 2000 with 100 ng of a 5.8 kb plasmid bearing the recombinase and bridgeRNA (pEffector), 203 ng of 2.9 kb plasmid encoding the donor sequence recognized by the bridgeRNA (pDonor), and 219 ng of a 3.2 kb plasmid encoding the target sequence recognized by the bridgeRNA (pTarget). After 72 hours at 37° C. total DNA was extracted from cells using QuickExtract DNA Extraction Solution (Biosearch Technologies) according to the manufacturer's instructions. Recombination was assessed by performing a PCR across the newly formed LT-RD junction followed by running an agarose gel and performing Sanger sequencing on purified PCR product to verify recombination.

[0432] pEffector encodes a bridgeRNA driven by the U6 promoter and the recombinase driven by the Ef1a promoter. In some cases, pEffector lacked a bridgeRNA to serve as a negative control. In some conditions, the recombinase was fused to a N-terminal or C-terminal SV40 NLS repeated 3 times (3×NLS).

### Example 19: Assessing Recombination Activity of Diverse Orthologs in Human Cells

[0433] HEK293T cells were seeded at 18k cells/well in 96-well TC-treated flat bottom plates. Cells were transfected using Lipofectamine 2000 with 100 ng of a 5.8 kb plasmid bearing the recombinase and bridgeRNA (pEffector) and 292 ng of a 4.2 kb plasmid encoding an inversion reporter (pReporter). pReporter encodes the Ef1a promoter followed by a donor sequence, an inverted mCherry coding sequence, and a target sequence on the opposite strand of the donor sequence such that recombination between target and donor will result in inversion. The distance between the donor and target in pReporter is 1 kb. pEffector encodes a bridgeRNA driven by the U6 promoter and the recombinase driven by the Ef1a promoter. In some cases, pEffector lacked a bridgeRNA to serve as a negative control. In some conditions, the recombinase was fused to a N-terminal or C-terminal SV40 NLS repeated 3 times (3×NLS). In all cases, the recombinase fusion protein is followed by a P2 Å self-cleaving peptide sequence and a GFP coding sequence.

[0434] Efficiency of inversion was measured using flow cytometry. After 72 hours at 37° C., cells were lifted from the plate using TrypLE Express (ThermoFisher), spun down at 200×g for 2 min, refreshed in 100 pL Stain Buffer BSA (BD Pharmingen), and measured using a NovoCyte Quanteon (Agilent). Samples were analyzed by gating for fluorescence against cells transfected with a pEffector lacking a bridgeRNA or encoding an orthogonal effector and lacking a bridgeRNA. The percentage of cells positive for recombination was determined by measuring the percentage of cells expressing EGFP as a proxy for recombinase (and bridgeRNA) expression within the cell. The percentage of cells within the GFP+ population expressing mCherry is reported.

### Example 20: Engineering bridgeRNAs for Increased Efficiency and Specificity

[0435] To increase efficiency of bridgeRNAs, additional sequence from the coding sequence of the recombinase found in the natural element was added to the 3′ end of the bridgeRNA determined via either RNA sequencing or computational prediction. Specificity of bridgeRNAs was increased by encoding the LTG to base pair with bases prior to the core only, rather than the bases within the LT and the core.

### Example 21: Delivery and Integration of Large Cargoes into the Human Genome

[0436] HEK293T cells were seeded at 18k cells/well in 96-well PDL treated flat bottom plates. Cells were transfected using Lipofectamine 2000 with 137 ng of a 5.8 kb plasmid bearing the recombinase and bridgeRNA and 574 ng of a 4.8 kb plasmid encoding the donor sequence recognized by the bridgeRNA (pDonor). The bridgeRNA target binding loop recognizes a sequence within the human genome. After 72 hours at 37° C. total DNA was extracted from cells using QuickExtract DNA Extraction Solution (Biosearch Technologies) according to the manufacturer's instructions. Recombination was assessed by performing a PCR across the newly formed LT-RD junction followed by running an agarose gel and performing Sanger sequencing on purified PCR product to verify recombination. Off-targets can be assessed using methods known in the art (see e.g., Durrant, Fanton, Tycko NBT 2023).

### Example 22: Inversion of Genomic Loci Using Transient Expression of a Bridge Editor

[0437] HEK293T cells were seeded at 18k cells/well in 96-well PDL treated flat bottom plates. Cells were transfected using Lipofectamine 2000 with 600 ng of a 5.8 kb plasmid bearing the recombinase and bridgeRNA. The bridgeRNA was reprogrammed to recognize a donor and target pair within the genome. The intervening sequence length between the recognized target and donor ranges from 0.4-2.6 kb. After 72 hours at 37° C. total DNA was extracted from cells using QuickExtract DNA Extraction Solution (Biosearch Technologies) according to the manufacturer's instructions. Inversion of genomic loci was detected by performing a PCR across the RD-LT and LD-RT junctions, extracting expected PCR products from an agarose gel, and confirming inversion of the locus using Sanger sequencing.

### Example 23: Engineering Split bridgeRNA Systems

[0438] Engineering of a split bridgeRNA system for recombination is shown and described in FIGS. 43A-F.

### Example 24: Mismatch Tolerance

[0439] A summary of mismatch tolerance between an IS110 bridgeRNA target binding loop and its target is shown and described in FIGS. 44A-B.

### REFERENCES

[0440] U.S. Pat. No. 11,447,770
[0441] US20220054239
[0442] US20220154224
[0443] WO2020191153
[0444] WO2021226558
[0445] Almeida, Alexandre, Stephen Nayfach, Miguel Boland, Francesco Strozzi, Martin Beracochea, Zhou Jason Shi, Katherine S. Pollard, et al. 2021. “A Unified Catalog of 204,938 Reference Genomes from the Human Gut Microbiome.” Nature Biotechnology 39 (1): 105-14.
[0446] Alonso-Lerma, Borja, Ylenia Jabalera, Matias Morin, Almudena Fernandez, Sara Samperio, Ane Quesada, Antonio Reifs, et al. 2022. “Evolution of CRISPR-Associated Endonucleases as Inferred from Resurrected Proteins.” bioRxiv. doi.org/10.1101/2022.03.30.485982.
[0447] Altae-Tran, Han, Soumya Kannan, F. Esra Demircioglu, Rachel Oshiro, Suchita P. Nety, Luke J. McKay, Mensur Dlakid, et al. 2021. “The Widespread IS200/IS605 Transposon Family Encodes Diverse Programmable RNA-Guided Endonucleases.” Science 374 (6563): 57-65.
[0448] Altschul, S. F., W. Gish, W. Miller, E. W. Myers, and D. J. Lipman. 1990. “Basic Local Alignment Search Tool.” Journal of Molecular Biology 215 (3): 403-10.
[0449] Anderson, Rachelle P., Eugenia Voziyanova, and Yuri Voziyanov. 2012. “Flp and Cre Expressed from Flp-2A-Cre and Flp-IRES-Cre Transcription Units Mediate the Highest Level of Dual Recombinase-Mediated Cassette Exchange.” Nucleic Acids Research 40 (8): e62.
[0450] Anzalone, Andrew V., Xin D. Gao, Christopher J. Podracky, Andrew T. Nelson, Luke W. Koblan, Aditya Raguram, Jonathan M. Levy, Jaron A. M. Mercer, and David R. Liu. 2021. “Programmable Deletion, Replacement, Integration and Inversion of Large DNA Sequences with Twin Prime Editing.” Nature Biotechnology 40 (5): 731-40.
[0451] Anzalone, Andrew V., Peyton B. Randolph, Jessie R. Davis, Alexander A. Sousa, Luke W. Koblan, Jonathan M. Levy, Peter J. Chen, et al. 2019. “Search-and-Replace Genome Editing without Double-Strand Breaks or Donor DNA.” Nature 576 (7785): 149-57.
[0452] Anzalone, A. V., Koblan, L. W. & Liu, D. R. Genome editing with CRISPR-Cas nucleases, base editors, transposases and prime editors. Nat Biotechnol 38, 824-844 (2020).
[0453] Araki, K., M. Araki, and K. Yamamura. 1997. “Targeted Integration of DNA Using Mutant Lox Sites in Embryonic Stem Cells.” Nucleic Acids Research 25 (4): 868-72.
[0454] Berrios, K. N., Evitt, N. H., DeWeerd, R. A. et al. Controllable genome editing with split-engineered base editors. Nat Chem Biol 17, 1262-1270 (2021).
[0455] Breuer R., Gomes-Filho, J-V., Randau, L., “Conservation of Archaeal C/D Box sRNA-Guided RNA modifications.” Frontiers in Microbiology (12): (2021).
[0456] Bushnell, Brian, Jonathan Rood, and Esther Singer. 2017. “BBMerge -Accurate Paired Shotgun Read Merging via Overlap.” PloS One 12 (10): e0185056.
[0457] Camarillo-Guerrero, Luis F., Alexandre Almeida, Guillermo Rangel-Pineros, Robert D. Finn, and Trevor D. Lawley. 2021. “Massive Expansion of Human Gut Bacteriophage Diversity.” Cell 184 (4): 1098-1109.e9.
[0458] Chandler, Michael, Olivier Fayet, Philippe Rousseau, Bao Ton Hoang, and Guy Duval-Valentin. 2015. “Copy-out-Paste-in Transposition of IS911: A Major Transposition Pathway.” Microbiology Spectrum 3 (4). doi.org/10.1128/microbiolspec.MDNA3-0031-2014.
[0459] Chen, I-Min A., Ken Chu, Krishnaveni Palaniappan, Anna Ratner, Jinghua Huang, Marcel Huntemann, Patrick Hajek, et al. 2021. “The IMG/M Data Management and Analysis System v.6.0: New Tools and Advanced Capabilities.” Nucleic Acids Research 49 (D1): D751-63.
[0460] Chen, L., Park, J. E., Paa, P. et al. Programmable C:G to G:C genome editing with CRISPR-Cas9-directed base excision repair proteins. Nat Commun 12, 1384 (2021).
[0461] Choi, Sunju, Shinya Ohta, and Eiichi Ohtsubo. 2003. “A Novel IS Element, IS621, of the IS110/IS492 Family Transposes to a Specific Site in Repetitive Extragenic Palindromic Sequences in Escherichia Coli.” Journal of Bacteriology 185 (16): 4891-4900.
[0462] Chollet, Frangois, and Others. 2015. “Keras.” 2015. keras.io
[0463] Durrant, Matthew G., Alison Fanton, Josh Tycko, Michaela Hinks, Sita S. Chandrasekaran, Nicholas T. Perry, Julia Schaepe. 2022. “Systematic Discovery of Recombinases for Efficient Integration of Large DNA Sequences into the Human Genome.” Nature Biotechnology, October. doi.org/10.1038/s41587-022-01494-w.
[0464] Durrant, Matthew G., Michelle M. Li, Benjamin A. Siranosian, Stephen B. Montgomery, and Ami S. Bhatt. 2020. “A Bioinformatic Analysis of Integrative Mobile Genetic Elements Highlights Their Role in Bacterial Adaptation.” Cell Host & Microbe 28 (5): 767.
[0465] Edgar, Robert C. 2004. “MUSCLE: A Multiple Sequence Alignment Method with Reduced Time and Space Complexity.” BMC Bioinformatics 5 (August): 113.
[0466] Ekeberg, Magnus, Cecilia Lovkvist, Yueheng Lan, Martin Weigt, and Erik Aurell. 2013. “Improved Contact Prediction in Proteins: Using Pseudolikelihoods to Infer Potts Models.” Physical Review. E, Statistical, Nonlinear, and Soft Matter Physics 87 (1): 012707.
[0467] Farruggio, A. P., & Calos, M. P. (2014). Serine integrase chimeras with activity in E. coli and HeLa cells. Biology open, 3(10), 895-903.
[0468] Finn, Robert D., Jody Clements, and Sean R. Eddy. 2011. “HMMER Web Server: Interactive Sequence Similarity Searching.” Nucleic Acids Research 39 (Web Server issue): W29-37.
[0469] Forster, Samuel C., Nitin Kumar, Blessing O. Anonye, Alexandre Almeida, Elisa Viciani, Mark D. Stares, Matthew Dunn, et al. 2019. “A Human Gut Bacterial Genome and Culture Collection for Improved Metagenomic Analyses.” Nature Biotechnology 37 (2): 186-92.
[0470] Gaudelli, Nicole M., Alexis C. Komor, Holly A. Rees, Michael S. Packer, Ahmed H. Badran, David I. Bryson, and David R. Liu. 2017. “Programmable Base Editing of A⋅T to G⋅C in Genomic DNA without DNA Cleavage.” Nature 551 (7681): 464-71.
[0471] Gómez-Garcia, Guillermo, Angel Ruiz-Enamorado, Luis Yuste, Fernando Rojo, and Renata Moreno. 2021. “Expression of the ISPpu9 Transposase of Pseudomonas Putida KT2440 Is Regulated by Two Small RNAs and the Secondary Structure of the mRNA 5′-Untranslated Region.” Nucleic Acids Research 49 (16): 9211-28.
[0472] Grunewald, Julian, Bret R. Miller, Regan N. Szalay, Peter K. Cabeceiras, Christopher J. Woodilla, Eliza Jane B. Holtz, Karl Petri, and J. Keith Joung. 2022. “Engineered CRISPR Prime Editors with Compact, Untethered Reverse Transcriptases.” Nature Biotechnology, September. doi.org/10.1038/s41587-022-01473-1.
[0473] Higgins, Brian P., Chandra D. Carpenter, and Anna C. Karls. 2007. “Chromosomal context directs high-frequency precise excision of IS492 in Pseudoalteromonas atlantica.” Proceedings of the National Academy of Sciences 104 (6): 1901-6.
[0474] Higgins, Brian P., Adam C. Popkowski, Peter R. Caruana, and Anna C. Karls. 2009. “Site-Specific Insertion of IS 492 in Pseudoalteromonas atlantica.” Journal of Bacteriology 191 (20): 6408-14.
[0475] Huang, Liang, He Zhang, Dezhong Deng, Kai Zhao, Kaibo Liu, David A. Hendrix, and David H. Mathews. 2019. “LinearFold: Linear-Time Approximate RNA Folding by 5′-to-3′ Dynamic Programming and Beam Search.” Bioinformatics 35 (14): i295-304.
[0476] Hyatt, Doug, Gwo-Liang Chen, Philip F. Locascio, Miriam L. Land, Frank W. Larimer, and Loren J. Hauser. 2010. “Prodigal: Prokaryotic Gene Recognition and Translation Initiation Site Identification.” BMC Bioinformatics 11 (March): 119.
[0477] Ioannidi, Eleonora I., Matthew T. N. Yarnall, Cian Schmitt-Ulms, Rohan N. Krajeski, Justin Lim, Lukas Villiger, Wenyuan Zhou, et al. 2021. “Drag-and-Drop Genome Insertion without DNA Cleavage with CRISPR-Directed Integrases.” bioRxiv. doi.org/10.1101/2021.11.01.466786.
[0478] Karvelis, Tautvydas, Gytis Druteika, Greta Bigelyte, Karolina Budre, Rimante Zedaveinyte, Arunas Silanskas, Darius Kazlauskas, Ceslovas Venclovas, and Virginijus Siksnys. 2021. “Transposon-Associated TnpB Is a Programmable RNA-Guided DNA Endonuclease.” Nature 599 (7886): 692-96.
[0479] Katoh, Kazutaka, Kazuharu Misawa, Kei-Ichi Kuma, and Takashi Miyata. 2002. “MAFFT: A Novel Method for Rapid Multiple Sequence Alignment Based on Fast Fourier Transform.” Nucleic Acids Research 30 (14): 3059-66.
[0480] Kempen, Michel van, Stephanie S. Kim, Charlotte Tumescheit, Milot Mirdita, Jeongjae Lee, Cameron L. M. Gilchrist, Johannes Soding, and Martin Steinegger. 2023. “Fast and Accurate Protein Structure Search with Foldseek.” Nature Biotechnology, May. doi.org/10.1038/s41587-023-01773-0.
[0481] Klompe, Sanne E., Phuc L. H. Vo, Tyler S. Halpin-Healy, and Samuel H. Sternberg. 2019. “Transposon-Encoded CRISPR-Cas Systems Direct RNA-Guided DNA Integration.” Nature 571 (7764): 219-25.
[0482] Kokot, Marek, Maciej Dlugosz, and Sebastian Deorowicz. 2017. “KMC 3: Counting and Manipulating K-Mer Statistics.” Bioinformatics 33 (17): 2759-61.
[0483] Komor, Alexis C., Yongjoo B. Kim, Michael S. Packer, John A. Zuris, and David R. Liu. 2016. “Programmable Editing of a Target Base in Genomic DNA without Double-Stranded DNA Cleavage.” Nature 533 (7603): 420-24.
[0484] Lebar, Tina, Dusko Lainscek, Estera Merljak, Jana Aupic, and Roman Jerala. 2020. “A Tunable Orthogonal Coiled-Coil Interaction Toolbox for Engineering Mammalian Cells.” Nature Chemical Biology 16 (5): 513-19.
[0485] Li, Heng. 2018. “Minimap2: Pairwise Alignment for Nucleotide Sequences.” Bioinformatics 34 (18): 3094-3100.
[0486] Li, Heng, and Richard Durbin. 2009. “Fast and Accurate Short Read Alignment with Burrows-Wheeler Transform.” Bioinformatics 25 (14): 1754-60.
[0487] Li, Heng. 2013. “Aligning Sequence Reads, Clone Sequences and Assembly Contigs with BWA-MEM.” arXiv [q-bio.GN]. arXiv. arxiv.org/abs/1303.3997.
[0488] Makarova, Kira S., Yuri I. Wolf, Jaime Iranzo, Sergey A. Shmakov, Omer S. Alkhnbashi, Stan J. J. Brouns, Emmanuelle Charpentier, et al. 2020. “Evolutionary Classification of CRISPR-Cas Systems: A Burst of Class 2 and Derived Variants.” Nature Reviews. Microbiology 18 (2): 67-83.
[0489] Meyer, F., D. Paarmann, M. D'Souza, R. Olson, E. M. Glass, M. Kubal, T. Paczian, et al. 2008. “The Metagenomics RAST Server—a Public Resource for the Automatic Phylogenetic and Functional Analysis of Metagenomes.” BMC Bioinformatics 9 (September): 386.
[0490] Minh, Bui Quang, Heiko A. Schmidt, Olga Chernomor, Dominik Schrempf, Michael D. Woodhams, Arndt von Haeseler, and Robert Lanfear. 2020. “IQ-TREE 2: New Models and Efficient Methods for Phylogenetic Inference in the Genomic Era.” Molecular Biology and Evolution 37 (5): 1530-34.
[0491] Mitchell, Alex L., Alexandre Almeida, Martin Beracochea, Miguel Boland, Josephine Burgin, Guy Cochrane, Michael R. Crusoe, et al. 2020. “MGnify: The Microbiome Analysis Resource in 2020.” Nucleic Acids Research 48 (D1): D570-78.
[0492] Nakamura, Muneaki, Yuchen Gao, Antonia A. Dominguez, and Lei S. Qi. 2021. “CRISPR Technologies for Precise Epigenome Editing.” Nature Cell Biology 23 (1): 11-22.
[0493] Nawrocki, Eric P., and Sean R. Eddy. 2013. “Infernal 1.1: 100-Fold Faster RNA Homology Searches.” Bioinformatics 29 (22): 2933-35.
[0494] O'Malley, Tom, Elie Bursztein, James Long, Frangois Chollet, Haifeng Jin, Luca Invernizzi, and Others. 2019. “KerasTuner.” 2019. github.com/keras-team/keras-tuner.
[0495] Pallarès-Masmitjà, Maria, Dimitrije Ivancid, Jnlia Mir-Pedrol, Jessica Jaraba-Wallace, Tommaso Tagliani, Baldomero Oliva, Amal Rahmeh, Avencia Sanchez-Mejias, and Marc Guell. 2021. “Find and Cut-and-Transfer (FiCAT) Mammalian Genome Engineering.” Nature Communications 12 (1): 1-9.
[0496] Paradis, Emmanuel, and Klaus Schliep. 2019. “Ape 5.0: An Environment for Modem Phylogenetics and Evolutionary Analyses in R.” Bioinformatics 35 (3): 526-28.
[0497] Partridge, Sally R., and Ruth M. Hall. 2003. “The IS1111 Family Members IS4321 and IS5075 Have Subterminal Inverted Repeats and Target the Terminal Inverted Repeats of Tn21 Family Transposons.” Journal of Bacteriology 185 (21): 6371-84.
[0498] Perkins-Balding, Donna, Guy Duval-Valentin, and Anna C. Glasgow. 1999. “Excision of IS492 Requires Flanking Target Sequences and Results in Circle Formation in Pseudoalteromonas atlantica.” Journal of Bacteriology 181 (16): 4937-48.
[0499] Quinlan, Aaron R., and Ira M. Hall. 2010. “BEDTools: A Flexible Suite of Utilities for Comparing Genomic Features.” Bioinformatics 26 (6): 841-42.
[0500] Revell, Liam J. 2012. “Phytools: An R Package for Phylogenetic Comparative Biology (and Other Things).” Methods in Ecology and Evolution. doi.org/10.1111/j.2041-210x.2011.00169.x.
[0501] Ross, Karen, Alessandro M. Varani, Erik Snesrud, Hongzhan Huang, Danillo Oliveira Alvarenga, Jian Zhang, Cathy Wu, Patrick McGann, and Mick Chandler. 2021.
[0502] “TnCentral: A Prokaryotic Transposable Element Database and Web Portal for Transposon Analysis.” mBio 12 (5): e0206021.
[0503] Rubin, Benjamin E., Spencer Diamond, Brady F. Cress, Alexander Crits-Christoph, Yue Clare Lou, Adair L. Borges, Haridha Shivram, et al. 2022. “Species- and Site-Specific Genome Editing in Complex Bacterial Communities.” Nature Microbiology 7 (1): 34-47.
[0504] Siguier, P., E. Gourbeyre, A. Varani, B. Ton-Hoang, and M. Chandler. 2015. “Everyman's Guide to Bacterial Insertion Sequences. Microbiol Spectr 3.” MDNA3-0030-2014.
[0505] Siguier, P., J. Perochon, L. Lestrade, J. Mahillon, and M. Chandler. 2006. “ISfinder: The Reference Centre for Bacterial Insertion Sequences.” Nucleic Acids Research 34 (Database issue): D32-36.
[0506] Steinegger, Martin, and Johannes Soding. 2017. “MMseqs2 Enables Sensitive Protein Sequence Searching for the Analysis of Massive Data Sets.” Nature Biotechnology 35 (11): 1026-28.
[0507] Strecker, Jonathan, Alim Ladha, Zachary Gardner, Jonathan L. Schmid-Burgk, Kira S. Makarova, Eugene V. Koonin, and Feng Zhang. 2019. “RNA-Guided DNA Insertion with CRISPR-Associated Transposases.” Science 365 (6448): 48-53.
[0508] Sunagawa, Shinichi, Luis Pedro Coelho, Samuel Chaffron, Jens Roat Kultima, Karine Labadie, Guillem Salazar, Bardya Djahanschiri, et al. 2015. “Ocean Plankton. Structure and Function of the Global Ocean Microbiome.” Science 348 (6237): 1261359.
[0509] Tagashira, Masaki, and Kiyoshi Asai. 2022. “ConsAlifold: Considering RNA Structural Alignments Improves Prediction Accuracy of RNA Consensus Secondary Structures.” Bioinformatics 38 (3): 710-19.
[0510] Tak, Y. Esther, Benjamin P. Kleinstiver, James K. Nunez, Jonathan Y. Hsu, Joy E. Horng, Jingyi Gong, Jonathan S. Weissman, and J. Keith Joung. 2017. “Inducible and Multiplex Gene Regulation Using CRISPR-Cpf1-Based Transcription Factors.” Nature Methods 14 (12): 1163-66.
[0511] “The CRISPR/Cas System: Emerging Technology and Application.” n.d. Accessed Nov. 1, 2022. www.caister.com/crispr.
[0512] Thomson, James G., Edmund B. Rucker 3rd, and Jorge A. Piedrahita. 2003. “Mutational Analysis of loxP Sites for Efficient Cre-Mediated Insertion into Genomic DNA.” Genesis 36 (3): 162-67.
[0513] Ton-Hoang, B., M. Betermier, P. Polard, and M. Chandler. 1997. “Assembly of a Strong Promoter Following IS911 Circularization and the Role of Circles in Transposition.” The EMBO Journal 16 (11): 3357-71.
[0514] Tou, C. J., Klienstiver, B. P., Recent advances in double-strand break-free kilobase-scale genome editing technologies. Biochem (2022).
[0515] Vo, P. L. H., Ronda, C., Klompe, S. E. et al. CRISPR RNA-guided integrases for high-efficiency, multiplexed bacterial genome engineering. Nat Biotechnol 39, 480-489 (2021).
[0516] Wei, Jingyi, Peter Lotfy, Kian Faizi, Eleanor Wang, Hannah Slabodkin, Emily Kinnaman, Sita Chandrasekaran, et al. n.d. “Deep Learning and CRISPR-Cas13d Ortholog Discovery for Optimized RNA Targeting.” doi.org/10.1101/2021.09.14.460134.
[0517] Weinberg, Zasha, and Ronald R. Breaker. 2011. “R2R—Software to Speed the Depiction of Aesthetic Consensus RNA Secondary Structures.” BMC Bioinformatics 12 (January): 3.
[0518] Xu, X., Chemparathy, A., Zeng, L., Shang, S., Nakamura, M., et al., “Engineered miniature CRISPR-Cas system for mammalian genome regulation and editing.” Mol Cell 81(20): 4333-4345. (2021).
[0519] Yang, Lei, Alec A. K. Nielsen, Jesus Fernandez-Rodriguez, Conor J. McClune, Michael T. Laub, Timothy K. Lu, and Christopher A. Voigt. 2014. “Permanent Genetic Memory with >1-Byte Capacity.” Nature Methods 11 (12): 1261-66.
[0520] Youngblut, Nicholas D., Jacobo de la Cuesta-Zuluaga, Georg H. Reischer, Silke Dauser, Nathalie Schuster, Chris Walzer, Gabrielle Stalder, Andreas H. Farnleitner, and Ruth E. Ley. 2020. “Large-Scale Metagenome Assembly Reveals Novel Animal-Associated Microbial Genomes, Biosynthetic Gene Clusters, and Other Genetic Diversity.” mSystems 5 (6). doi.org/10.1128/mSystems.01045-20.
[0521] Yu G, Zhao Y, Li H. The multistructural forms of box C/D ribonucleoprotein particles. RNA. 2018 December; 24(12):1625-1633. doi: 10.1261/rna.068312.118. Epub 2018 Sep. 25
[0522] Yu, Guangchuang. 2020. “Using Ggtree to Visualize Data on Tree-Like Structures.” Current Protocols in Bioinformatics/Editoral Board, Andreas D. Baxevanis . . . [et Al.]69 (1): e96.
[0523] Zhai, Haotian, Li Cui, Zhen Xiong, Qingsheng Qi, and Jin Hou. 2022. “CRISPR—Mediated Protein-Tagging Signal Amplification Systems for Efficient Transcriptional Activation and Repression in Saccharomyces Cerevisiae.” Nucleic Acids Research 50 (10): 5988-6000
[0524] Zhang, Yang, and Jeffrey Skolnick. 2004. “Scoring Function for Automated Assessment of Protein Structure Template Quality.” Proteins 57 (4): 702-10.
[0525] Zhang, Yang, and Jeffrey Skolnick. 2005. “TM-Align: A Protein Structure Alignment Algorithm Based on the TM-Score.” Nucleic Acids Research 33 (7): 2302-9.

The application's sequence listing, which the Patent Office published only in electronic form, follows.

SEQUENCE LISTING (798559 sequences)

SEQ ID NO: 1 - DNA, 1279 bp, unidentified
  source 1..1279: mol_type = unassigned DNA; note = element_IS621
cttgtattatccctccagtgcagagaaaatcggccagttttctctgcctgcagtccgcatgccgtatcgggccttgggttctaacctgttgcgtagatttatgcagcggactgcctttctcccaaagtgataaaccggacagtatcatggaccggttttcccggtaatccgtatttgcaaggttggtttcactatggaacatgaacttcattatatcggtatcgacaccgctaaagagaaactggatgtcgatgtgttgcgtcctgatggtcgtcatcgcaccaaaaaattcgctaacaccactaaagggcacgatgagctggtgagctggctgaaaggtcacaagattgaccatgcgcatatctgcatcgaagcgaccggcacctatatggaacctgtcgctgagtgcctttacgatgctggctacatagtgtcagtcattaatcctgcgctgggtaaagctttcgctcagagtgaaggactgcgtaacaagactgataccgtggatgcgcgcatgctggcagagttctgtcgtcagaagcgccctgcagcctgggaagcgcctcacccgcttgaacgcgcgttgcgtgccctggtagtccgccaccaggcgctgacagatatgcacacgcaggaactgaatcgcactgaaacggcgcgggaagtccagagaccgagcattgatgctcaccttctgtggcttgaagcagagctgaagcgtcttgagaagcagataaaagacctgacagacgatgatccggatatgaaacaccgcaggaaactgctggaaagcatcccgggtatcggagagaaaacatctgcggtattgctggcttatatcggtctgaaggaccgcttcgcccatgccagacagttcgccgcttttgcgggtctgacaccacggcgttatgaatcaggtagcagtgtgagaggggcgagccggatgagtaaggccggacatgtgtcgcttcgcagggcgttgtatatgcccgcaatggtagccaccagtaagactgagtggggacgggcgttccgcgaccgtctggcggctaatggcaagaaaggaaaggtgattctcggcgcgatgatgcgcaagctggcacaggtggcgtatggagtgctgaagtcaggcgtgccgttcgatgcgtcacggcataatccggtagcggcgtaaaaatcgcggaagggatgaaaaaaacagcgcctgacggcgctgtgtctggcatgcctgcaatccgggaaaccggaccaggaaaaaacttgcaggccataacagtat

SEQ ID NO: 2 - DNA, 1185 bp, unidentified
  source 1..1185: mol_type = unassigned DNA; note = element_IS621_161642
cttgtattattaaaaaatccagagagaaccggccagttccctctggtggtggtccggatgccgtgtccgggctcagacttttagtctgtttggtagatcccgcaccagaccaccgttatccacaagtgataaaccgaacagtatcatggaccggttcacccggtaccccgtatttgcaaggatggttacaccatggaaaacgaaattcactttattggcattgatgttgccaaagctaaactcgatgtcaatatgttgcggcctgatggccgtcaccgcagcaagaaatttgccaacacccccggaggtcatgacgagctcgtcaactggttgcggggacatcaggtcatccatgcccatatctgcatggaagcgaccgggacgtatatggaagatgtcgccgctcatctctctgacgcagggtatcaggtctctgttatcaatccgatgctcagcaaagcgttcgtccagagtcagggaatacgcagcaaaactgatacggtggatgcccgccagctggcgtatttttgccgggagaaacgcccggcgatatgggaagcgccacatccggttgaacgtgccctgcgggcgctggttctgcggcatcaggcgctgacagagatgcatgttcaggagcagaaccggcgtgaaagcgcgcgtgatgttcagttgccgagcatagacatgcatctgctgtggctggatacggaactgaaacgtcttgaaaagcagataaaagacctgacggatgatgacccggatatgaaacaccggcgcaaactgctggacagtatcccgggcattggcccgaaaacttcagcggtgctgctggcttatgtggggctgaaagagaggttcagggaggcgaggcagttcgcggcgtatgcgggtctgacgccccggcaacatgaatcaggcagcagtatcaggcgggtaagcaggatgagtaaaatgggccatgtatcgctgcgtcgggcgttgtatatgccggcgatggtgacgctgtataaaacagaatggggcagggagttcagggaacggctggagaagaacggaaaaaatgcaaagctgataatcggggcgatgatgaggaagctggcgcaggtcgcatacggcgtcctgaaatcaggacgcccgttcgatgccacactgcattcgaaaaatgcttgcatggcataacagtat

SEQ ID NO: 3 - DNA, 1278 bp, unidentified
  source 1..1278: mol_type = unassigned DNA; note = element_IS621_127209
cttgtattatcctttctgagcagagagagccggccagttctcactgccatgcagtccgcatgccggacccggcctcaggctcaaagcctgttttgtagatctatgcagcggactgcccttctccacaggtgacaaaccggacagtatcatggaccggttttcccggtaatccgcattcacaaggttggtctcactatggaacaggaactgcattttattggtatcgatgtctctaaagcgaagctggatgttgatgtgctgcggcccgatggccgtcaccgcagtaaaaagtttgccaacaccccgaagggccacgatgagctggtccgctggctgaacagccatcaggctgcgcctgcacatatctgtatggaagccaccagtacgtatatggaagacgccgccgcgcatctcagcgatgcggggttcacggtatcggtcatcaatcccgcccgcggtaaagccttcgcacagagcgagggactgcgcagcaaaacggacgccgtcgacgcccggatgctggcagagttctgccgccagaagcggcctgctgcatggcaggcgcctcatccggttgaacgggcgctgcgggcactggtgctgcgccatcagtcgctgacggacatgcacacccaggagcttaaccggctggagacagcgcgggacgttcagatgccgagtattgacgcgcatcttctgtggcttgatgccgaactgaaacgtctggaaaaacagataaaggacctgacggatgatgacccggatatgaagcaccgcaggaagctgctggaaagtatcccgggtatcggggaaaagacgtcagcggtgctgctggcgtatatcggcctgaaaaaccggttcggcggagcgagacagttcgcggccttcgcgggactgacgccccgccatcatgaatcagggagcagcgtgcgcggcgcagggcggatgagtaaggcgggccatgtgtcgcttcgcagggcgctgtacatgccggcgatggtggcagtaagcaaaacgacctgggggcgggcgttccgtgaccgtctggcggctaacggcaaacggggaaaagtcatcatcggggcgatgatgcgtaaactggcgcaggtggcatacggtgtgctgaaatcgggcgagtcgttcgacgcgtccaggcatgtaccggtagcggcttaaccgggtcgtgaaaggaaaaaacagcgcctgacggcgctgtggttgtcatgcctgtaatccgggaaaccggaagctaaaaaaacttgcgggctataacagtat

SEQ ID NO: 4 - DNA, 1266 bp, unidentified
  source 1..1266: mol_type = unassigned DNA; note = element_IS621_55201
cttgtataattttttctgtgcagggagaaccggccagttttccctgccgggcagtcctcatgccgtatcgggccttgggcttctaacctgtgccgtagatttatgcagcggactgccgttatccacaagtgacaaaccggacagtatcatggaccggttttcccggtaacccgcattcacaaggttggtttcactatggagcaggaacttcattttatcggtattgacgtctccaaagcaaaactggatgtcgatgtgttgcggcccgatggccgtcgccgcagcaaaaaatttgccaacaccacgaagggccatgacgaactggtccgctggctcaacagccatgatgtggcgccggcacatatctgtatggaagccaccagcacgtatatggaagacgttgctgtccgtctctgtgatgccggttttactgcctccgtcatcaaccccgctctcagtaacgccttcgcacagagtgaagggctgcgcagcaaaaccgatgccgtcgatgccagaatgctggcggagttctgccgccagaagcgccctgccgcgtgggaagcgcctcatccggtggagagagccctgcgggcgctggtgttgcgtcaccagtcactgacggatatgcagacgcaggagctgaaccgccgggagacggcgcgtgaggtacagatgccgggcattgacgcccatcttctgtggcttaaagccgagctgaagcgtctggagcagcagataaaagacctgacggacgatgacccggacagaagcaccgcagaaagctgctggagagcatcccgggtatcggggaaaaaaccccggcagtacgccggactgaaaggaaggttcccgcaggcaaggcagttcgcggcctttgccggtctgacgccgcggcagcatgagtcgggcaacagcgtgagaggcgtgagccggatgagtaaggcgggtcacgtctcgctgcgcagggcgctgtacatgccggcgatggtggcgacaagtaagacggagtggggacggacattccgggaccggctgatgagtaacggtaagcggggaaaagtgataatcggcgcgatgatgcgcaagctggcccaggtggcgtacggtgtgctgaaatcggggaaaccgttcgatgcaaccctgcgcgttccggtagcgggctgagggaataagggccggagagaacagcgcctgacggcgctgtggttgtcatgcctgtaatccggcaaaacggaaaataaaaaagtttgcaggcgataacagtat

SEQ ID NO: 5 - DNA, 1281 bp, unidentified
  source 1..1281: mol_type = unassigned DNA; note = element_IS621_145219
cttgtattatccttcccgtgcagagagagccggccagctctctctgtcatgcagtccgcatgccgtatcatgccttaggttttcaacctgtgtcgtagatttatgcagcggactgccattctcccaaagtgataaaccggacagtatcatggaccggttttcccggtaatccgcattcacaaggttggtctcactatggaacagaaacttcattacattggtatcgacgtctccagagcaaagctggatgtcgatgtgctgcgccctgatggccgtcaccgctgcaaaaagtttgaaaacaccccgaaaggacacgatgcgctggtcagctggctgaacgggcaccaggtggctcccgcccatgtctgtatggaagccaccagcacgtacatggaagatgcagcaacatgtctcagcgatgccgggtttatcgtttccatcattaatcctgctctgagcaaagcctttgcgaagagtgaaggtctgcgcagtaaaacggatgccgtcgatgcccggatgctggcggagttctgccgtcagaagcgccccgccgcatgggaagcgcctcatccgcttgaacgcagactgcgggcgctggtgctgcgccaccaggcactgacagacatgcatacacaggagctgaaccgtctggagacagcccgggacgtacagatgccgagcatcaatgcccatcttcagtggcttgaggcagaactgaaacgtcttgagaagcagataaaagacctgacagatgatgatccggatatgaaacaccgcagaaaactgctggaaagtatcccgggtatcggagagaaaacatctgcggtattactggcttatattggtctgaagaaccgcttcgcccatgccagacagttagctgcttttgcgggtctgacaccacggatttatgagttgggcagcagtgtgagaggggcgagccggatgagtaaggccggacatgtgtcgcttcgcagggcgctgtatatgccggcaatggtagccaccagcaagacagagtggggacgagcgttccgcgaccgtctggcggctaatggcaagaaaggaaaagtgattctcggcgcgatgatgcgcaagctggcccaggtggcgtatggagtgctgaagtcaggcgtaccgttcgatgcgtcacggcataatccggtagaggcgtaaaaatcgcggaagggatgaaaaaaacagcgcctgacggcgctgtgtctggcatgcctgcaatcagggaaaccggaccaggaaaaaacttgcaggccataacagtat

SEQ ID NO: 6 - DNA, 1281 bp, unidentified
  source 1..1281: mol_type = unassigned DNA; note = element_IS621_23122
cttgtattatcccttcagtgcagggagaaccggccagttctctctgccatgcggtccgcatgccgtatcaggcctcaggctaataacctgtgacgtagatttatgcagcggaccgccgttctccacaagtgacaaaccggacagtatcatggaccggttttcccggtaatccgcattcacaaggctggtctcactatggaacaggaacttcattttatcggtatcgatgtctctaaagctaagctggatgtcgatgtgttgcggcctgatggccgtcaccgcagcaaaaaatttgccaacaccccgaagggccacgacgaacttctccgctggctcagcggtcatcgcgtggcaccggcacatatctgcatggaagccaccagtacgtatatggaagacgttgccgctcatctcagtgatgccggttacaccgtctccgtcatcaaccccgccctgggtaaagcctttgcacagagtgaaggtctgcgcagcaaaaccgatgcagtggatgcccgtatgctggcagagttctgtcgtcagaagcgccctccggcgtgggaagccccgcatccggttgaacgggccctgcgggctctggtgctgcgccatcagtcgctgacggacatgcacacgcaggagctgaaccgcctggagacagcgcgtgaggtgcagcgtccgagtatagacgcccatctgctgtggcttcatgccgaacttaagcgcatcgaaaagcagataaaggacctgacggatgatgacccggatatgaagcaccgcaggaagctgctggaaagtatcccgggcatcggggagaaaacgtccgcggtattactggcttataccggtctgaaggagcgcttcacccatgccaggcagttcgccgcttttgcgggtctgacgccgcggcggtatgaatcaggcagcagtgtgaacagggccagccggatgagtaaagccggacatgcgtcgcttcgcagggcgctgtatatgcctgcgatggtggcggtaagtaaaacggaatggggaagagcgttccgtgaccgtctggcagggaacggtaaaaaagggaaagtgataatcggtgcgatgatgcgcaagctggcgcaggtggcgtacggtgttctgaagtcaggcgtgccgttcgatgcgtcccggcataatccggtagcagcgtaaaatatggtggaagggatgaaaaaacagcgcctgacggcgctgtgactggtatgcctgcaatccggtaaggcggaaaataaaaaagcttgcaggcgataacagtat

SEQ ID NO: 7 - DNA, 1341 bp, unidentified
  source 1..1341: mol_type = unassigned DNA; note = element_ISAar41-192
ctctcatagtcattggctggcctggggctggctggcaggctggcaggctggcaccagcttcccgcggatgtgactctggccgtatctgtcccgttgcggcggtgacctcgtctcgacctgtccgtccgtggggggccggtgccggcccgtccgcgccggtggcttgatagaaggttgtccaacctggcggttgtgacttgtgagagatctgcctccggagcgacttcccagggccggcaccgtaacggtcccgatcctgaggaggaaccgcgatgaccatcgtcgcagaccgatgcacgcatgtcatgggtgtggacacacacgcgaagacccacacgtacgcgatcgtccaggccgccaccggcgccgtggtcgccgcggcgacgttccccgtcacgccggcgggcctggaccgtgcgctggcctgggcgcagcgtcgcgcgcccggctacgtggccgcggtcgagggcaccgcctcctacggcgcgaccctcacggcgcggctgcagcaggccggcacggtcgtgttcgaagcgcggccgcccaagcgcgcctcccgcgcgggccgcggcaagtcggatcagatcgacgcggtcgccgccgcccggtcggtgcttagcgaaccgctcgagcggctcgcgacgccgcgctcgggcgagctgcggcgggcgctgcagctgctgctgaccgctcgccggctgctcgagcggcaacgcgcgcaggaccacaacgcgctcaccgcgatcgtccgccgcatcgaactgggcatcgacgcgcgcaaggcgctcaccgacaggcaggtcgagcagatcgccgcctggcggacgcggacgacggactcgatcgcgcaggcgatcgcccgcgccgaagcgacgcgactcgcccgccagagccggctgcgcgccgccgagctgaaggacaacaaagcgatgctggagcggcacgtgcgaacgctcgcgcccgaactgctggaggaggtcggcatcggcccggtcagcgccgccgcctgcatcgcggcctactcccaccacggacgtgtccgctccgaggccgcgttcgcgtcgctcgccggagtcgcaccgatccccgcctccagcggcaacacgcagcggcaccgcctcaaccggcacggcgaccggcgcctgaacgccgcgctcgacaccatcgtccgcacccgactgcgctccgaccccaccacccgcgcataccgcgaccagcacctcgccgaaggcaagaccaacgccgacatccgccgcctgctcaagcgctacaccgcccgcagcacctaccggaccctgaagaagatcctcaacaacacttgacaccgacacatagaagggt

SEQ ID NO: 8 - DNA, 1341 bp, unidentified
  source 1..1341: mol_type = unassigned DNA; note = element_ISAar41-39
ctctaatggtttctggctggcctggggctggctggcaggctggtgccggtcttgctcggcgtgactcaccgttaatccgccccgcgtcttgtggtggcttttgtcagacccgtccgccgggtggggccggtgcccgcccgtccgttccgatggcttgatagaaggtcgtccaacccgtgggttgtgactcgttagagatctgcctcgcaacgacttctcccgggccgggcgccgtacggtcccgcttcccggaaggagagaaccgcaatgcccattgttgcggacgagtacacgcacgtcatcggtgtggatacccacgcccgaacccacacctacgcaatcgtcgagaccatcaccggcaggctggcgaccgttgccgagttcccgaccaacccggccgggctcgcccgcgcgatcacgtggataaatcgtcactccccggggcaacccctggtcgcgatcgagggcaccggctccttcggcgccggactggcagccgtgctggagaaccagggcgtccccgtggtcgaagcccggccgccacgggcggcaacacgagctggccgtgggaagaccgacgcctttgacgccgaggcagccgcccgtgccgtcatcagcaccgacaccgccaagctgggctggccccgagcgggcaagatccgctccgcactgcgggttctactcaccgctaggcgcgcgatcgacacccgccgcacctgcgaccgcaacggcctgaccgcgttgctccgcaccatcgacctcggcctggacgcacgcaagcccctaaccgacaggcaggtctcgctgatcgcagcctggcgacaccacccgaccgacgatgtcgaacaggccgtcgcccgcgaggaagcgacccgactcgctcgcaacgtgatccacgccaccatccagctcgacgccaaccaccgtgcgctcggacgccacgtcgccgaactcgctccggggctactcgcgtttcgcggtatcggcccggtcaccgcggcagtcttcctgaccgcctactcccatcccggccgggtccgcagcgaggcagcgttcgcgtccctggcaggcaccgcgccgttgccagcctcaagcggcaacaccacccggcaccgtctgaacaaccgaggagaccgccggctcaactccgcgctcgatgtcgtcgcccgggtacgcatggcccacgacgctgacacccgcgcctacgtcgaacgccgccgatccgaaggacgaacaccgaaagagatcaagcgcacactgaagcgctacatctcccgccaggtgtaccgccagctcaccgcgaccatggcctcacagacttgacttcagtcatagaagggt

SEQ ID NO: 9 - DNA, 1346 bp, unidentified
  source 1..1346: mol_type = unassigned DNA; note = element_ISAar41
ctctaatggttattggcaggtctgggacccgctggcaggataggtgccaccagccacgatgtgactcacactaattctgtccttagagtattctgagtgactttagcctgacgtgtccgtcgtagctggtgacaccagcccggccccttgacatggcttcatagaaggccgtccgcaccccaccgggtgcgtgactcattagagaatcgcctgccaagaactctttcccggaccggtgccaaccataacggctaccaaccgatgaaggaggcgaaaccgtcatgaccatcgttgcagaaacatacgactacgtcatcggaatcgacacccacgcacgaacccacacctacgccataatcaacacccgcaccgggagcagagaggcctgccaggcctttccgaccagccctgccggcatgaaccggaccttggcttggatcaccaaacgcactaccggcaccctgctggccgcagtggaaggaacccggtcttacggggccaccatcacccatgccctgaccatggctgggttccccgtggtcgaggtcaaaccaccacgtagacaggcccgtgccagggtgggcaagaccgacgagatcgacgccaccgcagcggccatgggcattctttatcaggacaccgagcgtctgcttacgccccgcgccgaaggcacgcgctcagcgttgaacgtactggttgccagccgcgaacgcatcgacgctgaacgcacccggaaccgcaatgccctgacggctctggcacgagaaatcgacctcggtgttgatgcgcgtaaagcactcactgacatgcaggtcaaacagatcagcgcctggcgtgagcaccccaccgattcggtagcgcaacgctacgcgagggctgaggccagtcgcttggccacggcggtgcttgacgccgacaagctactggccgcaaacaagacacaaatggctgaattggatgagcagatggcccccgggctggccgccgagttcgggtacgggccggtgactgttgcgtggatcctgatcgcttactcgcacacaggcagagtacattctgaagcggcattcgcgtctatggctggggtcgctccgttgcaggtatcctccgggaacacggtacggcaccggcttaatcggcatggtgacaggatgctgaatcaagcggtggacgtcattgccaaggtacggatgcagttcgatcctcagaccaaggactacgtggagaaacgcaaggctgaggggctgagctaccgggaaatcaaacgggtgctgaaacggtacatcgttcggaaagtttttcgtcggctacgcgtgctggtcccttgacagaacccatagaagggt

SEQ ID NO: 10 - DNA, 1340 bp, unidentified
  source 1..1340: mol_type = unassigned DNA; note = element_ISAar41-74
ctctaatggttgtggccggtctgggattggctggcaggctggtgcacggttctgccggatgtgactctctactggtctggctcgtttcacgacggtgcctttggtctgatctgtccgtccggcgggacctgcatcgacctggcccgttccgatggcttgatagaaggttgcccaagttccgcgtcagcggacttgtggctcgttagagacacgcctcgtagcattttcccaggtcatggctgagagagaccacttcgaggaaggatggaccacggtgactatcgtggcagacgaattcacacatgtgatcggtgtggacacccacgccaggacccacacgtacgccgctgtcgaggctcgtaccggagagatccttggcacggcagtattccccactagccctgccgggctcgcccgggcgaggagctggataaatcgacgcgctccagaatcaatgctcgtcgccatcgagggaaccggctcctatggtgcaaccctcacccgcgctctccaggccgagggcattgaggttcgggaggtgaagccaccacgacgtgctacccggtccgcgcacggaaaatctgacgagatcgacgcgatcgcggccgcgcggaccgctattgcctcgcccctgagcgaactcagcaccccacgagccgagggcatccggtcagcactgcgagtcctcctcgtcgctcgtcaggcgttggacagccgtcgaaccgccgacaacaacatgcttaccgcgctccttcgcagtttcagcctcggcgtcgacgcacgccgcccgctgaccgtgtcgcaggtgcagaccgtgggtgggtggcgtgagcgctgcacggacgactccgtcatcggaacaatccgatcggaagcgaaacgactcgccaccagtattctcgccgcaacaaggcaactcgatcagaatcatgctgctctggcccatcacgtccaggaactcgcgcccgggtttctgaacatcaaaggcgtcgggccggtcaccggggccatcatcctcgcggcctattcgcatcgagggcgcatccgatccgaagccgccttcgccagtctcgccggcgtcgccccactccaggcctccagcggcaacgtcgtccggcaccgtctcagccgccgcggcgaccgtcaactgaaccgggcgatggatattatcgcccgcacccgcatggtctccgatgctggaactcgggcctacgtcgataggcggacggcagagggtaaatcccgacgagagatccgacgctgcctcaaacgctatgtcgctcgtcaaatcttccggcaactcaacagcctcatgggttgacaacgaaccatagaaggat

SEQ ID NO: 11 - DNA, 1345 bp, unidentified
  source 1..1345: mol_type = unassigned DNA; note = element_ISAar41-12
ctctaattggatttggctggtctggcaccggctggcaggatggtgcgaatccacccggatgtgactcagccttgatctggccgttgattcgttcaatgtgcctttcggtggactcgtccatctgggtggactcgcaccgacctggcctcttgccatggcttgataaaaggttggccgctgccactggtggcgtgcctcattagagatttgcctgacgagaactcccacccagaccggtgccctgctaacggccatcaaccggaatcggaggaacgccgccatgcccttggtgacagaaaaatacgactacgtcattggtattgatacccgtgcccgcacccacacctacgccgccatcaacactggaaccggtgcacaggaaggttgtgaggccttccctgtcagtcctgccgggatgcggcgggcaatcgcctggatcgggcggagctccaccggcgaggtgctggcggcagtggaaggaacccgttcctacgggtcctcgatcaccgccgtgttgactgccaaaagcatcccggtggtcgaggcgaaaccgccgaagaggcaggcccgtgccggggtcggaaaaaccgataaaatcgatgcaagggcggccgcgatgggcgtcctgggcaaagacactgccgcgctgatctacccgcgagccgagggcgtacgcgccgcgatcagcgtgctgttggccagtcggcggcgtctcgatcaccaacgcaccgtgaatcggaacgccttgaatgcgctggtgcgcgaaatcaatctcggcctcgacgcgaggaaggccctcaaggaccgccagctcatcgacatcagtgcctggcgccagcgcacggatgacacggcagaacaacgcattgcacgggatgaagcgatccggctggccgcggcagtcctccacgccgacaaacagctgaagcggaacaaagagcagctggccgagctgggcgaggagctcgcccccggactgcagaaccagaccggcgtcggccccgtaactgccggtgccatcctcgtcgcgtactcgcatcacggcagagtccgttccgaggccgccttcgccgcgctggccggcgcggcaccgttgcaggcgtcgtcgggaaacaccgtgcgccaccggctcaaccgccatggtgaccggcaattgaacagcgccctggacgtgatcgccaaaacccgtatgcggtgcgatgagcaaaccaagcaatacgtggaacgacgcaccgcccagggcttgagctaccgggaaatcaaacgcatcctgaaacgctatattgcccgcagcatctatcgtcagctacaacatctcacggcttgactttgaacataaaagggt

SEQ ID NO: 12 - DNA, 1386 bp, unidentified
  source 1..1386: mol_type = unassigned DNA; note = element_ISAar18
ctgtgagtattgaggtggctggtctgtgactggctggcagggtaggttctggttacctcgtctcgactgtgactcaacaccccctcggcgatctggtggccttggatccgaattgtccggttgcgacgatgtgaccagcgccgatcttgtccgcttcgatggcttgataagaagattgcccaacgtaaagcgttgtggctcatcacaggaatgcctcgcgagtgaacaccgccggctcatcggcccaccgggaggcagcgggtagggctgcctaatcgagaggaactcacgatgaccacgatcgcgaacacttacgcgtttattatcggcgtcgatacccacgcgcgaacccacacctacgccgtgatcgctccaaacggcgagcagatagggacggagagttttcccaattcgcttgccggcaggaaacgtgcaatcgcgtgggtcaatcgaagaactcaaagtgaagttcgagtactttgggttatcgaaggcgtcggcagctatggagcactattagccggtgcggtgtccaatagcggctatcgtgtggtcgaagctccccgccggtatgcccctgcccggcgtggcgctggaaaaaccgatccaattgacgccgccgcgattgccgctgcggccctgccgttgattgagcaagaattgcggattccgaggcaggccgatgggattcgggcggcattgcgggttctgaccgcggcgagggaacagatgactctggagcggacgtcaaagatcaatgctctcactgcccttttgcggatcgtggatttaggtgttgacgctcggaaaccactgactgaaacacagatcgtccaggtttcttcgtggcgagagcgtgatgaaggcattgatcgtgtgtttgctcgtgctgagtcgactcgaatggcgaaacgtgtgctcgtgctcaacgttgatctcaaggacaaccaagagaagatcacggagctgatcgagtccagccctgctgctccactacttgaggttaccggtgtcggtccggtgactgcagcggtggtttatgctgcgtggtcgcatcttggccgggtgcgttccgaggcagcatttgccgcgttggctggcgttaatcctattcctgcttcatctggcaatgttgagcgccataggttgaatcgtggtggtgatcgtcggctgaacagcgctttgcatatggctactatcgtgagaacaattcacgatccagacactcgtgcttacgcagaacggagaaagtccgaaggcaagtcgtcacgtgaagtccggagaattttgaaaaggtacttagccaggcgcctgtatcgcatattaaacgcacttcattcgttgcccgacgccccgctttcgtcttgttgacagatatagaagatt

SEQ ID NO: 13 - DNA, 1333 bp, unidentified
  source 1..1333: mol_type = unassigned DNA; note = element_ISAar41-86
ctctaatggttagtagctggcctggggcttgctggcaagctggtatcggcctttcccaacgtgactcaagagccatctgtcccgcgaaagcggtggctttcacacgacctgtccgctgggctaggtcggtgccggcctgacccgtttcgatggcttcatagaaggttgtccacccacgctccggcgggggtgtgactcattagagatctgcctcgcgacaattctcccaggcccggataacgaaccatttaccggaagaagacacttcgtgagcaccgtggctgacacatacaaatacgtcatcggcgtggatacccacgccaaaacgcacacctacgcagtcgttgctgccgctactggcgcagtcattgacaccgcttcgtttcccaccaccgacgctggcaccgcccgcgcgatcgcatggattgagcgacgctcggatgggcagcagcttgccgctgtcgagggcaccggctcctacggagcaaccgtgactcgcgctctcaccaccgcggggatccgcgtctgcgaggtcaaaccacccaaacggcaggcccgggatggtcaccgtaaaaccgaccaaatcgatgccgtggctgccgcccgcaccgcgcttggcaccgatgcgaccgcgctgattctgccgcgcgccgacgggcttcgcagcgcccttcgagttctgctcgtcgcgagacacagtatcgattcccaacgcaccagcgaccgcaacgcgctcaacgcgctcctgcggataatcaacctgggcctcgacgtccgcgcacccctgaccaatactcaagtcgacatcatcgccacatggcgcgatcgctccagcgatgacactgccgctgccgtcgcccgatctgaagcccgcaggctcgcctccgcgatccaccagcgcactcgcgagttggaaacgaatcacgcggccctgtcaaagcacgtcgacgaactcgctccaggcattcaggacatccccggtgtcggaccattcacggccgctatcatcctgaccgcttattcccaccaaggcagagtgcgctcggaagccgccttcgcggcgttggctggcggtagcccaattccggcatcatcgggaaatacgacccggcatcgcctcaaccgccacggcgaccgtcaactgaaccgagcgctccacattattgcccgctgccgcatgatcaccgaccccacgacgaaaagctacgttgacagaagaaccgccgaaggcaagacccggcgagagatccaccgctgcctcaaacgattcatcgcccgcagcatctatcgctcactggcgacccttacagcttgacttcaaccatagaagggt

SEQ ID NO: 14 - DNA, 1349 bp, unidentified
  source 1..1349: mol_type = unassigned DNA; note = element_ISAar41-36
ctctaatggttagtagccgacccgaggccggctggcagactggctgccattcctgccgggcgtgactcagcgcatatctgacctgttcgctattgcagtgtcttgagactgacccgtccgcccggccggagcggcaccagtctgacccactgcgatggcttgatagaaggttgtccgtcccgcccgtgaccggccggccgtgactcgttagagatttgcctcgaagtgactcttcccccggaccggcgccgtgatggcccctaacgaaaggagacgccacagtgaccatcgtggcagagaagtacacgcacgtcatcggggtggacacccactcaagaacccacacgtatgccgtgttggccgcggcgaccggtcaggtcatcgacacctcgaccttcccggccagccaggccggcatttcccacgccatcagctggatgcagcgacgaacaacaatcggggaagtcctgattgcggttgaaggcaccggctcctacggggcaggcctgacccgcgccctccgcgacgccggccttccggtgtgtgaggccagaccgcccaagcggcaaaaccgcggcagcatcggcaagtccgatgagatcgacgcccgcgccgcggcacgggccgtactcgggaccgacatcgcagccctggcccagccacgggcagaaggcgcacgggatgccctgcgggttctgttggccgcccggcggtccatggacggtcaacgcaccgccgaccgtcatgccctgaccgcactggcccgcaccatggacctgggcatcgacgcacgcaaggccatcacggaccgacaactccacacgatcgcggcctggcgtgatcgcccaaaggacgacgtcagcacaaaagttgcccgatccgaggccacacgcctcgccaccgcggtgctccggcacaccagcgcactggagaccaaccgggccgatctggcgcaactcgtggatcagatggcccccggcctccaggatctccggggtcttggacccgtcaccggcgccatcatcctgaccgcctactcccaccccggccgcatctactccgaagccgcctttgccgccctcgccggcgtgaacccgataccggcatcctccggcaacaccacccggcatcgtctcaaccggcacggcgacaggcaactgaaccaagccctggacgtcatcgcccgcacccgcatggcatccgacgccgacacccgcgcctacctcgaccgacgcacccaggaaggcaaaacacgccgagaaatccgccgctgcctcaagaggatcatcgcccggcagatctaccgcaaactcaccacactcatggcttgacaccacccatagaagggt

SEQ ID NO: 15 - DNA, 1382 bp, unidentified
  source 1..1382: mol_type = unassigned DNA; note = element_ISAar29
ctgtgagacttggtgcagctggtctgggactggctggcaggatagggactggccgtcccgcctcgtgattgtgactcacctgacacgtgacccattggtgtctttcctacgacttgtccaaccatggggcggccggccggtacccgtccggcccacctcggtgacttgatcagaaggttgtccgcctcagggcgtggctcatcacagtgttgttccgaagtgacctctacccggactggtatcggccggcagtggccatgcccatatccgtgaagaggaaaggaacaatgaccgccatgtctatcgtcgcgcattcacatgcgtttgtcgtcggtgtcgacacccacgcccgcaaccacgtttacgccatcatcaccgccacgaccggtgaactcgtcgatacccgggacttccccacgaccggcgccggcatcaaccgagccaccgcgtgggtggcacgccgcacgggtgctgatctcgccgtgctctgggtgatcgagggcgcagcctcctacggggccatactcgccggaaccgtggttacaaagggatactcggttgtcgaggcagcacggatggacgccaaatcccaccacggcgtaggcaaatccgacgtgctcgatgcccaacgaatcgcccgggccgtgctcccgatgcaggagaagcaactgcgccggccgcggctgaatgaaggcgtccgtgctgccctgagggttttggtatctgcgcgtcattccatgaccggggagcggacacgggcggtgaacgggctgactgccttggtgcgcgtcaatgagctcggcctggacgcccgcaaggccctgaccggagcgcagattaccgaggtctcccggtggcgtgagcaggacgaggaactggcgctttccgtggcccgcaccgaagcggtccggttggccaagcggatcggtgacctcgacaaagacgtggcgggcaacacccagcagatcaccgagctggtcaaggtcagcgaggcggcaccgctcttggatgtgaagggcttcggcgccatcacggccgccacatgcctgacagtctggtcccatcagggccgggtgcattcggaagccgcatacgcctccctcgccggggtaaacccgatcccggcctcatcggggaacaccgtccgtcaccgactcaaccgcggcggcgaccggtctctgaacagcgcgcttcacatggtcgccatcacgcggatgactcacgacgaggaaacccgcgaatacgtgcagaagcgggaagcggaaggacttagcacgaaggaaatccgacgatgcatcaaacgctatctcgcccggcgcgtctaccgcattttcaactcacaagcggaggctttgatcgccggttgacagacatagaagggt

SEQ ID NO: 16 - DNA, 1380 bp, unidentified
  source 1..1380: mol_type = unassigned DNA; note = element_ISAar29-423
ctgtgagtcttggggtggctggtccgggatcggctggcagggttggtgtcggccgtcgtgtcttggtcgtgactcgtgacaaaactggctgtttgggatgccttgggtacgaagtgtccggctgggacgggcggccgacgccgacccggcccacctcggtggcttgatagaagcttgtccagtcccgccgcgcgcggcggggctgtgacccctcacagtgatgccccgaagtgactccttccggatcggcgccggccgttcggcggccggaccgtcactgtctgtcaggaaggaacaccgcccgccatgagcaccatagtcgccgacacccacccgttcgtcgtcggtgtcgacacccacgcccggacccacacgctagccgtcctggccgcgtccggacgccctgtcgccaccgggacattccccaccacccccgcgggacgacgccgggcgatcgcctgggccgcccgccgcgccgaccacgacccgaacctgttgtgggtcatcgaaggatcagcgacctacggcgccaccctggcccgcgacctggccacggccggccaccaggtcgtcgaagccgcccgcgcgaacccccgggccgcccgcggcacggcaaagaccgacgagctggacgccacccgcatcgccgccgccgtcctgcccctgccaaccgaccggctacgccgcccccgagccgacgacggcatccgcgacgccctccaaacactgctcaccgcccgcgaaacgatgacctccgaacggaccagggccgtcaacgccctgaccgcgatcctgcgcaccaccgacctgggcatcgacgcccgccgccccttgaccgcccgccacatcacccaagccgccggctggcgcgcccgcaccgaacccatcgccaccgcgaccgcacgcaccgaagccacccgcctggcccaacgcgtcaccgacctcgaccgacaactccgaaccaaccagaccaccatcaccggcctgatccggcaaagcccggccgcacccctgctggccaccctcggcatcggacccgtcaccgccgccatcgcgttcgtcacctggtcacacccaggccgcatccgcaacgaagccgccttcgccgccatcgccggagccaaccccatccccgcatcctcaggcaacaccacccgccaccgactcaaccccggcggcgaccgacgcctcaaccgcgcactcaacaccatcgccctcgtccgcatgacccacgaccccaccacccgcgcctacgtcgaaaaacgccgaacccaaggcaaaaccgacaaagaaatccgccgctgcctcaaacgctacctagcccgccacatctaccgaaccctcaacaacgccgcatcacttgacaaaacatagaagctt

SEQ ID NO: 17 - DNA, 1375 bp, unidentified
  source 1..1375: mol_type = unassigned DNA; note = element_ISAar29-364
ctgtcagtctgcgggtggctggcccggggctggctggtgcagggtggcgttggttccgggccgcggcgtgactcctgaacaaactgacccccggttgtgggtgtcttgccgtcgatccgtccgccgtggcccgggccggcgccgaccctggcccaccgtgatggcctgatcagaagcatgtccagccccggggggctgtggctcatgacagttgtgcctcgcagtgactctcttcccgggccgacgccggtaacgacgtcccgtccgatgaagaggagacatcgcagtgcccatcgttgcagagacctaccgccacgtcgtgggggtcgatacccacgccgccacccacacctacgccgtcgtgggctgccccaccggcgccctgatcgaccaggcgacctttccgaccagctcgaccgggctggcccgcgccctggcctgggtcggacgccgcaccggcggtgaccttggctccgtcctggtcgccgtcgaggggaccggctcctacggcgcggtcctcagcgaccgcctcgacgagctcggctaccgcgtcgtcgaggcacccacccccgagcggcaccgcgggcgcggcaagaccgaccagctcgacgcgctgaacgcggcccgcgccagcctggccatggacctggcctacctgcgcgaccgccgcggcggcggccccgacgcccaggtccgcgccgcgctgcaggttctgaccaccgcccgcgaccaggcaaacgccgagcggctgcgctgcctcaacgcactcaccgccctgacccgcacccacgacctcggcatcgacgcacgccgggcgctgacccgcgtccagatcgccaccatcgccggctggcgcgcccgcaacgaacccctcggcgccgccaccgcccgcgtccaggccgtccgcctcgcccgccggatcaccgagctcgaccaggacctggccgccaaccacgaccagatcgccgcgctcctacccccgcagcaggcaccccagctgctccacctgcccggggtcggagcggtcatcgccgccaccgtgctcaccgcctggtcccaccccggccggatccgcagcgaggctgccttcgcccgccttgccgggacctgcccgctcccggccagctccggcaacaccacccgacaccgcctcaaccgcggcggcgaccgccggctgaaccgcgccatcaacaccatcgtgctgacccggatgcgcatcgatccccgcacccgggcctacatcgatcgccgccgcgccgaaggcaagaccaaccgcgagatccgccgagccctcaagcggtacgtcacccgccagctctaccgcaccctcaacaaccaacccacaccccagccgcttgacgcgacatagaagcat

SEQ ID NO: 18 - DNA, 1360 bp, unidentified
  source 1..1360: mol_type = unassigned DNA; note = element_ISAar41-54
ctctaatggtcttggctggtctggtgctggctgggaggctggtgcaggcccctccggggtgtgactcatggaaattctggcccgaaccctcaagtggtttggtgcctttagcaagactcgtccaccccggaacggggcctgcgccggtccgcccgcgctgatggcctgatagaagattgtccgggacttccgatgcaggagctccgtgactcgttagagaagtgcctcaacgcagctccagccggactggcaccgcacaggtaccgactacgtgaaggagcccagccgcatgaccatggtggcggaaacctacgaattcattgtcggagtggatactcactcccgcacgcacacctacgccctgatggccgccagaactggagctatcgaggaaaccaaaacctttccggccagcgaagccggcatcaacagagctgttgcgtggatacaccttgctggcgggccagagcgttccgtcctcgtcgcgatcgaaggcaccggctcctacggcgccgccctgaccagagcactcaccagcagcggactgaacgtggttgaagcccggccgccccggcgcggctcccggggaagcaggggcaagtctgacgccatcgatgccaccgctgcagcccgcgctacgctcgcattagacaccgcccggcttgtccggccgcgagccgaaggaacccgcgaagcacttacagtactcctggccgcaaggcgacgcttggacactgcacgaaccatcaaccgcaacgcgctgaacgcattggtccggacgaccgacttgggtcttgatgcacggcgtgcactgacggacgcgcagattgaactcgttgccgcctggcggccgcgagccgcagaccccatccaagtcgcagtggcaagaaacgaagcccgccgactcgccagggaaatcctgacctcgaccgcttcgctgaaggaaaacaaagcgctcctgggcgaactggttcagcaactcgctcctggactgcaaaacgaagccggggtaggaccggtgactgcggccctggtcctcgcagcctactcacatcacggcagggtccgctccgaagccgccttcgcagccctcgccggcgcttgccccatccccgcgtcctccggaaacaccacacgacacaggctgaaccgcaacggcgaccggcagctgaatcgcgcactcgacgtcatcgcgagaacacggctgacgttcgactcgagaaccagagcctatgctgagcgccggacctccgaggggatgaaccgacgtgagatccagcgctgcctcaaacggtatgtcgcacgccagctctatcggaggctgcagacaatcatggcttgacacagaccatagaagagt

SEQ ID NO: 19 - DNA, 1400 bp, unidentified
  source 1..1400: mol_type = unassigned DNA; note = element_locus59881
tgatgaggtggaacggcccgctaccgcagcatcagagtgctaaaacgtggtcgttatttcaacgccacaaggtaggagccgttccgtgacgcatattaccaccatcgggctggatttggccaagcaggtttttcagattcacggcgctgacgccgagggttctccaatcgtcaaccggaagctccgccgcgccgaggtgttacggtttttcgagaagcagcctgcgtgtctggtcggccttgaggcctgcggcggttcgcattactgggcgcgcgagatcgcagcacttggtcacgaggtgcggctgatcccgccggcctatgtcaagccgttcgtcaagcggggcaagacggacgccgccgatgccgaggcgatcagtgaggccgtgatccgcaagacgatgcgctttgttccggtcaaaacggccgagcagcaggcggcagcgatggtgctgaagacgcgcggccttctagttcgtcagcgaactcaggtgatcaatgcgctgcgcgctcatttatcggaattgggcatcatcgccggcatcagctcggcgaaagttgcggggttgatcgatatcgtgcgcgatgagaccgatgctcgcttgccgaaagctgcccgtttggctttatcggccatcgccgatcagatcgaggcgctgatgcgacagatcgatgatctcgagcgggagattgttcgtgaggcaagacgtgacggggatatgcggcggatggctacgatacccggtgtcggagcaatcacagcggcttctatcaaggcgcttgttccagatcccggcgggttcaaatccggccgtcacttcgccgcctggttgggattgacgcccaggtcccattcgagcggaggcaaagagcggcttggaggaatatcgaagatgggcaatgcggagcttcgctccctgctggtgctcggtgcgacttctgtcctgcggcatatgcggggcaacgacaaaacgccgaaatggctgaatggtcttctgaagcggcggccctacaaggtcgtggctgtcgcgctcgccaacaagatggcccggatcatctgggcgcttctgaccaagggcgggacatatcggggtcttgaggcggcaaacagcgcagcgagcgcttgagctgaagactaccccgacgaactgaccggtgcggtagccggcagaggcgaggtgcacgaaacagacgatgattccatgggacgaaatcccgaggcgagagaggccgcgtgactcaatgcgctcacagcgcgttcgtttgatcagcccctcgcatcgcggacttcatcgaggccagcggtcctgaaccgcgctgaaaggccggacatatgaccgcaccgttcccgtgtgatgagttgtctgaagaaagcacttgcctgaagggccgttccacata

SEQ ID NO: 20 - DNA, 1396 bp, unidentified
  source 1..1396: mol_type = unassigned DNA; note = element_locus163322
gatgaggtggatggctcccgctcacggcatctgggtgccaaagtgtgaaggccatcaggcgttcacgagcaaaatgggagccatccgctatgcagattaccacggtcggcctcgacttggccaagaacgtttttcaggttcacggtgttgattcgaccggccaggttgtgctgcgcaagtcacttcggcggtcgcagatgttgccattttttgccaaattgcctccctgcctggtcggcatcgaggcatgcggtacgtcgcatcactgggcgcgcgagctgatcaatctcggtcatgaggtgcggctaatgccgccggcttacgtaaaaccttatgtgaagcgcgggaagaccgacgctgccgatgcggaagcggtttgcgaggcggtaacacgacctacgatgcggttcgtgccggtcaagtcgccggagcagcaggcggcgctggcgatgcaccggacgcgcgatttgctggtcaagcagcgtacgcagctgatcaatatgatccgcggtctactggccgaatttggcgtcgacatccccaaggggctggagcgggcgctactgatggcgcggcagatcgccgatggcagaggtcctgaggtgccgattgaagctgccaagatggtcactacgctgtcacagcaggcgctcgacatccacgtccggcttcgcgagatcgatcgcgatctggccgtttgtttacgtggcaacgatgttgcacgtcgtctcatgaccatccccggcatcgggccggtcggcgcgacggcgcttgccgcatcggttaccgatccgcatcagttccgttcagggcggcagttcgctgcctggttgggattgactccacttcagaagtcgagcggtggcaaagagcggctcggtcgtatcagcaagatgggcgacaaatacctgcgcaagctgctcattattggcatgacctcacttgtacgccgtgcaaaatacaatcctggtaagatcgatccacgtctggcggatctgctggcgcgaaagcccacacgggtcgccacggtcgcgatggcaaacaagaccgcacgggtcatctgggcgatcatggcacgtggcgaaacctatcgagcgggacaccggccggcactggaagcataaaaacggatacaggatttagctgaagaggagatcagcttcacgaggttgcgagcgcgatgcgatgtgatggcagaccggtcagaccgggaacagagacaacccaactcgtgtccaaggcgtcatagcctgaataacagaatgggaccttgttcgcggactccatcaaggccagcagtctcaatcgactgcatcaacaggccggacagaagactgcacccgaccaatgccactgcgtcaatttatctcttgcaacgcgggagccatccacagag

SEQ ID NO: 21 - DNA, 1486 bp, unidentified
  source 1..1486: mol_type = unassigned DNA; note = element_locus136201
gaatgagatgaacgcatcccacccttctcaaacggagtttaaatctccactttttcagcaagactgttcggtgctcactgtgttgcgctccgcctcagtcttgattcaaaagtgtttttgggtaggggatttgtgattgctatcggggaaatgggagtgtcaatccttacagtatcgcaaaacacccggataactgaaggatacgatcatgaaatatctacctgtaggcgttgatatcgcaaaaagtctgattcaagttcacttcatcgatgagcacacaggtgaagtggttgataagcaattacgcagcaaagattttctatcatttttcagtaatagggaaccttgcctgattggtatggaggcatgtggtggatcgcagcactgggcgcgtgagctggagaagatggtgcactcagttcggttgatgccgggacggttcgttaaagcattcgttatgggcaacaagaatgatgtgatggatgcccgagctatctgggttgcggtccagcaacccggcaaagctatagccgtaaaaacggaagagcagcagtcgatcctggtgttgcatcgttctcgccgtcaattagttaagtttcgtactgcacagattagcgccctgcatggaacgcttctggaatttggggaaatcatccacaaaggacgagcagctatggacaaagaactgccattggccctggaacgaatgaaggcgaagctgccaccatatcttattactgtgctggaagatcaatacaacaggttgaatgagttggacatgttgatagatggaatcgaaaaacaacttaacagcgttgcccggcaaaatgaaacctgtaaacggctgatggaaatccctggagtagggccactcattgccacagccgcagttgccactatgggagaagcatcggcatttaaatccgggcgagagttcgctgcttatgtcggtctcgtaccaaaacagactggttcaggaggaaaagtgcgtctgctgggtattagtaaacgcggtgatacttgtttgtgcatggtgcccgggctgcgtcattagtggcaaaagaaccggggccatggataacggaactgaaaaaaagacgtccgacaggcgtgttgatagtagcaatggcaaacaaactggcccgaacggtatgggcgatagcggcccatggccgtaagtatgacaaaaatcacatcagtatcagaccttattaatcactgataccgataaacaataactcttaacataagggtgaatgctgaaaggttgcatgggcagccgtagcgatgacaacgacaggtaagaccgtgactcaccaaacctgaatgctgcactgggttcaaaaacccgcggagcgaatgaggaatgagtcagcgaatctcatcgaggccctcagctccgactgcaataaggccgaatatagagctgcaacctaccgtcaacgtcaacaccacggaagtcttgcaaacgggacgcgttcatata

SEQ ID NO: 22 - DNA, 1186 bp, unidentified
  source 1..1186: mol_type = unassigned DNA; note = element_locus153600
cttgtattattaaaaaatccagagagaaccggccagttccctctggtggtggtccggatgccgtgtccgggctcagacttttagtctgtttggtagatccccgcaccagaccaccgttatccacaagtgataaaccgaacagtatcatggaccggttcacccggtaccccgtatttacaaggatggttacaccatggaaaacgaaattcactttattggcattgatgttgccaaagctaaactcgatgtcgatatgttgcggcctgatggccgtcaccgcagcaagaaatttgccaacacccccggaggtcatgacgagctcgtcagctggttgcagggacatcaggtcatccatgcccatatctgcatggaagcgaccgggacgtatatggaagatgtcgcctctcatctctctgacgcagggtatcaggtctctgttatcaatccgatgctcagcaaagcgttcgtccagagtcagggaatacgcagcaaaactgatacggtggatgcccgccaactggcgtatttttgccgggagaaacgcccggcgatatgggaagcgccacatccggttgagcgtgccctgcgggcgctggttctgcggcatcaggcgctgacagagatgcatgttcaggagcagaaccggcgtgaaagcgcgcgtgatgttcagttgccgagcatagacatgcatctgctgtggctggatacggaactgaaacgccttgaaaagcagataaaagacctgacggatgatgacccggatatgaaacaccggcgcaaactgctggacagtatcccgggcattggcccgaaaacttcagcggtgctgctggcttatgtggggctgaaagagaggttcagggaggcgaggcagttcgcggcgtatgcgggtctgacgccccggcaacatgaatcaggcagcagtatcaggcgggtaagcaggatgagtaaaatgggccatgtatcgctgcgtcgggcgttgtatatgccggcgatggtgacgctgtataaaacagaatggggcagggagttcagggaacgactggagaagaacggaaaaaatgcaaagctgataatcggggcgatgatgaggaagctggcgcaggtcgcatacggcgtcctgaaatcaggacgcccgttcgatgccacactgcatacgaaaaatgcttgcatggcataacagtat

SEQ ID NO: 23 - DNA, 1400 bp, unidentified
  source 1..1400: mol_type = unassigned DNA; note = element_locus200162
tgatggggtggaacggcccgctccgacagcaccagtgtgctaaaacgtggtcgttgtttgaacgccacaaaggagggaccgttccatgaaccagattagcaccatcggcctggatttggcgaagcacgtttttcaggttcacggcgcagatgaggacggctctcctctcttcagtcggaggctgcgacgtggtgaagtgctgcatttcttctcgaagcaatctcgctgccttgtcggaatcgaagcctgtggcagcgcccattattgggctcgcgagatcgccaagttcggccacgacgtgcggctaatccccccgacctatgtcaagccattcgtcaaacggagtaaaactgatgcagcagacgccgaagccatcagtgaggctgtgacgcgcaagacgatgcggttcgttccggtcaaaacggctgagcaacaggcggaagcgatggtgctaaagagccgcagtcttttggtgaagcagcgaacacaggtggtcaatgccttgcgttcgcatctgggcgaattgggtatcatcgatgccgccggtatggaaaaagtcgatacgctgatggcggtcgtgcgcgatttcacggatgtccgcttacctgcggcagcgcggttcgccttgacggcgattgccgatcagatcaatgccctagcaggccagatcgatcagctcgatcgcgctattgttgctgaagcaaagactgacggggatatgcgccggctgactacgatccctggagttggcgctataaccgcggctaccgtcaaggcgctggtgccagacccaggcggtttcaaatcagctcgtcactttgccgcctggctgggacttacgccgagacagttttcaagtggagggaaagaacgtatcgggcgcatctcgaaaatgggaaaccctgaactacgatgccttctcgttcttggcgcgacagcggttctccgaggcgcccggaaaaatgaacgagcacagccctggctgagggcgctgctcgcccggcgcccattcaaggtggccgcagttgcgctggccaataagatggcgcggattgtctgggcgcttctaaataagagtggagtttaccaacgtccggaggcgtcggagacggctgcggttgcctgttgatgagcataggaacttaaaaacaatctgaccggcgcgaaccggcagagggcaaggagcaaaaacggacgatgaacccacgggacgaatcccgacaggagagagaccggacactcatgcgcttcgagcgcgttatgctgattagtcgctcccgtcgcggacttcatcgaggccagcggtcctataccgcgctttacaggccgtatacatgaccgcaccgatcccatgtgtgaaatcgatcgaaagctcttgcgcccgcgggccgttccataca

SEQ ID NO: 24 - DNA, 1246 bp, unidentified
  source 1..1246: mol_type = unassigned DNA; note = element_locus238387
cctttggtcaagtaatagaattttcttaaaagattgctattgttggaaacggggggtctggggggtgttaaaaactaaaaactttgtggaaagcgttaatgaaaaagcgggggtgaacttgtagcgctagtagtttacaggactttgtagcgtattagtcccccgcttttttcgattgcccaaggcccaactagaatactttctttgctacaacaaaggtgattggcaaaaggcaattttattatgatacttaagatacaaacgtatgaaaaaatggaatgttattttaggtgtcgatgtatcaaagctgacactcgacatctgctgtgctgaacgcaatctgcacatcaagatcgacaattgcacaaaaggttttgctgtattgaaaaaatggtgcaaagaaaaagagatcgatctccatacaacgctgatcatcatggaatttaccggcggatatgaatatcgctttgtgcaattctgccagtcgatgtctatcgattatcgtcgggtgcctggtttggaaatcaaaaactcaatgggtatggtcagggggaaaagcgatcaggcggatgcttatcgtatcggtctgtatggcgaggataagagcaggcgtctggagccatcaaatccactcaacgacaatgtcttaatacttaggcagctgctttcttttcgcaaaaggctggtccgggaaaaggcggggctgcaaagcacgctaaaagaacgtgaacatatgtacggagtaaagaaaaacgatcatattacccgtattgcaaaagataagataaaagcaaatgacaaacatatccggcagatcgaggaggagatcatggggaccatcaaaaacgatgaagcgatgtggtggaactaccggatcataaccagcattaaagggataggcaaagtaaacgggtggatgacaatagtttatactgaaaactttaccagctttacagaccccagaaaatatgccgtatttgtcggggtaattccatttgctaatgattcaggtacgagcataaaaggtaagaaaagagtaagtcacctggcgcataaagaaatcaaaaaggaactgaatcaggccgcgaaaacagctatgatacatgatgcagaaatcagggcctatgctgaacgaaaacttcaaaacaaagcgtatccattgtgaaatgtatgtggataactacaaacaagcagcttagaaaactatttttttaaataaatttgcttatgtccgaaacctagaata

SEQ ID NO: 25 - DNA, 1380 bp, unidentified
  source 1..1380: mol_type = unassigned DNA; note = element_locus36182
tgatgctgtggacggctcctccaccggcacgagagtgtcaaggatgtgggcgctgttaaggctcccacgattgggaggagctatccatgcaaaccgttacgacaatcggtctcgatattgccaagtcagtcttccaggttcatggcattgatgctgctggtcaggtgatcatccgccgccagctgaggcgtcgcgctgtcctggcgttcttccagaagctgccgccctgtcggatcggcatcgaggcttgcgcttcgtcgcaccattggtcgcgcgaacttcaggcgctcggtcataccgtgcgattgatgccgccggcgtacgtgaagccctacgtcaaacggcagaagaacgacatggctgacgcagaggccatttgcgaagccgtcagccgcgccaatatgcgcttcgtgccaaccaagacgcctgagcagcagagtggcctgatgctgcaccgcacccggcatctgttgatccgccagcagaccgcggtgattaattcgatccgggctcactttgccgagttcggcattgtcgcaccggtcgggcgcaaaggcgttatggaactgcttcatgttgttgccgacccgagcgacaaacggctgcctgaggttgcccgcgcctgtctctcggctctcggcgctcaactgctcagtctcaagcagcagatcgtggagttcgatcggatgatcatggactggcaccggtccaacgaaacgagcaagcgcctacattgcattcccggggtcggtccgatgctggcaactgctctggtcgccagtgttgccgaccccaggaccttccgatcgggacgcaacttctcagcctggattgggcttgttccgaagcagcattcgagtggcggcaaggacaagctcggcagtatcagcaaacagggtgatcgctatctccgtagcctgttcgtggccggtgcactcgccgttatccgctatgccaggatccacggcacaaagcatcggccctggctgacggcattgttagcgcggcggccgaccaaggttgccgccatcgcacttgccaacaagatggcgcggatggcctgggccatgatggccaagggcgagcgttaccagcaaccccttgcgcttgcccgctaaacgagatcgcgccgggcaaccggtgtgatgccagagttggcagggctaacagcacgtaatgcagagccggtcgatccggcgatcaggacaacccatttgtgccagcgcataatcgaatgcgggcttttgaccgggacctgatccgcggagggcattatggccagcggtcatgcgaaccgcacctacaggccgaacacatggccgcaccgaccaaccctgcaaacgtgaagaaagctcttgccgacccggagccgtccacaca

SEQ ID NO: 26 - DNA, 1383 bp, unidentified
  source 1..1383: mol_type = unassigned DNA; note = element_locus6338
gatggggtggatggctcccgctccaactgacggcatctcggtgccaagatgtggttgctgtcgaagcagcagccacgcagatgcaggagccatccccatggagatcaccaccgtcggcatcgatctggccaagagcattttccaggttcacgccgttgatgcagctgggcacgtcgtcgttcgcaaggcgctgcggcgggcgcaggtcgtgccgttcttcgccaagctgcctcgatgcctggtcggcatagaggcgtgcggcacgtcccatcactgggcctgggaactgacgaagctcggccatgaggttcggctgatgccgcccgcttacgtgaagccgtatgtgaagcgcggtaagaccgatgcgaacgacgccgctgccatctgcgaggcggtgacgcgcccgagcatgcgcttcgtgccggtgaagtcgaccgagcagcaggcggcgctggcgctgcaccggacgcgcgacctgctggtcaagcaacgcacgcagttggtgaacatgatccgcggcctgctcgccgagttcgggatcgagatggcgcggggcctgcggcacgcgctcgaactggcagcccggctctcggccggagacgcagccgaggtgccaccactggcgcaacgcgtggtgaccgggctggccgaccagatcagcgccttgcagatccagctcacccgcctggagaaggagttgctcgcttggcatcgggaaaacgacctgtcgcagcgcctggcgacgatccccggtgtcggtatcgtctcggcaacggcgctggccgcctcggtgagcgagcccgagcgcttcctgcccggtcggcagttcgccgcctcgttgggactgacaccgctgcagaactgtagcggcggcaaggagcgcctgggtcggatctcgcgcatgggcgaccgctacctgcgccgcctgctcgtagtcggcatgacttctctggtccggcgcgcgaaggccgcgccgacgtcggtcgactcgcggctgccggcccttctccagcgcaagccggtgcgcgtcgtgaccgttgcggccgccaatcgcaccgcgcgggtcgcctgggcgatcatgacccgcggcggcacctaccgcgcacccgcggccacggccgcctgaccgcacggcgcggaggtttttccaggttgcgaggacgacgagagttgatggcgaaccggtcagaccgggagccgggacaccccgctgaatgtccagggcatcatagcccgcaaagcagagtgggacccagctcgcggataccatcagggccagcggtcacatgaacgactgcatcaacaggccggacacaagactgcacccgaccaacgcgtcagaagctcaattcgccgcttgcaatgcgggagccatccacacag

SEQ ID NO: 27 - DNA, 1520 bp, unidentified
  source 1..1520: mol_type = unassigned DNA; note = element_locus229727
aggcagtatgactttccgtgagacagatgctggccaacgtgggatatttaacgcgggttaacatcgttgtcagagccgcatgggtgagctgttgctacaccccggtatttccaccacggaggccagcatgaacaacaataacacattgtacgtcgggttagatgttcacaaagaatcgattactgtcgcttatgctatcaattcagaacctgttgaactgatgggtaaaattggcacatcacctactgatattcagaatctttgtaaacgtctcaggtcaaagtcatcgcaggtcagtatcgtttatgaagcggggccctgtggttatggactttatcgtcggctggtgaaatccggttttgactgcatggtctgcgccccctcacttatcccgaaaaaaccgggggagcgggttaaaaccgatcgccgtgatgccatcagacttgtgcgttcactgcgtgcaggagatctttctgctgtctacgtacccggcattgaagatgaggcattccgggatttggcccgggcatgggcatctgcccgcgatgatttacggcatgcaaggcaacgtctgaaatcgtttcttctggttcatggggtccattatgtcgggcgagcagattggggccctgcacaccgacgctggctcagcaaatactcattcgaaagtccctggcgacaattagcttttgacgaacaccgtcgtacaatagaagaccggcaggcacaatgtgaacggctggaatccgccctgaaggaggccgttaccgaatggaggctgtatccggtagtagaggcgctgcaagccatgcgagggattcagtttattactgcggttggattaatttctgaactgggtgatctgacccgttttgaacatccacgacaactgatgtcatggtttggtatcacgccatcagaatattcatcgggtggaagcagacatcagggcagcattaccaaagccggaaacagctatgccagaaagctattggtcgaggcagcgtggagttaccgtcatccggcacgcatcagtccggcaatacaaaaaaggcaggaaaatttaccccgccccgtcattgacagagcatgggatgctcaactcaggctttgtaagaggtatcgaaaacttcaggccaaaggaaagaatgtcaatattacaattgttgctgttgcacgtgagctggcgggttttatctgggatataggccgaatagcaatgtctgtcgcacaacaaccacaatgtcacaaataaaaaatgagaataaccagttccctgaaggcgacgtagcccggtacaagagtaacccacgttagcgcttggcgacggcggaacaaagctgattcgcgacgtaagaaagtggcaggctcatatgacggacctctgtaatgcggtatccaacccgcgaatatcagcgtgattcaccgtcggatttactgctacgtcgccctcagggaattaaacctaaaaagaaaatcgtcaaaattagagattccggtttgacacggaaagtcatatc

SEQ ID NO: 28 - DNA, 1366 bp, unidentified
  source 1..1366: mol_type = unassigned DNA; note = element_locus189474
gaatggaagggacttcccctgattatgcgcctgattaattcttgtgcaatcatgggataaacacagccccggagggattcgttatgaccttcacatctgtcggtatcgatcttgctaaaaatgtgttcgctgttcacggtgttgaccagaatggcaaaacagttctgattaaatccagagtaacccgcactgctcttcccgggctgattgccggtttgccgccctgtgttatcggaatggaggcctgttccggagcgcattactgggcaagactgttccggcagtatggtcatgagccgcgtctgatggccgctaaatttgtatctccttaccgcgtggctggtaaatcagggaaaaatgatgcagctgatgctcaggctatctgcgaagcagtctgcagaccgcatatgcggtttgtgccagttaaggatgaatgtcaacaggcgatgcagtgcctgcatcgcactcgtcagggatttatcgaagagaaaacagcaacgtataatctcctgagaggattgatatctgaattcggcgtcatcgcgccacaaagtactgatgccctgcgacacatggtttcagcgcagaagaattctttaccacttcaggttcagcaatgtgttgatgatttgctggagcacgttgctcgcatcgaagccaacattgctgaatatgacagaattttgtccctcatggccaaaacagatcatcgcagtcagcggctgatggaattaaagggcgttggccccacaacggcctgtgcgctggtcaccagtattggtaatgcacatgattttaaaaatgggcgccagctggcagcctggctggggcttacgccatcgcagtacagcagcggcggaaagtcaaagcttggcaggataacgaaagctggcgattcgtatctgagaacacttctcgttcagtggactcgctcggtactgatctgggcggagaaaagactgattcattcagtcgctgggtctgctcactggtcgaacgcagaggatactggcgcgctgttgttgccatcgctgccaagaatgcaagattgtgctgggcatcattgcattacggtgatgatttcaggttgtactcagccagctaaagcacgaagcagcagtataatcatctgacctgcaactcgttgatgataaagggttagaccccgtgaggtatatctgattattgtacaggataaacgtatccgcttaacgaacaagagcctcacgcgtctttcatcagagcccgaatcgataacgattcattatggccgtttatagtaccgcagtctcttccctttatttttaactgtagtgcatacagaaaccgtaaacaccggcgttgacatgccggggaagcccttata

SEQ ID NO: 29 - DNA, 1431 bp, unidentified
  source 1..1431: mol_type = unassigned DNA; note = element_locus40696
aaatgtaatgaacgcatcccaacattatgaaatgagccgctcggggattaagtagatgagtgtggatccccgcagatttccggcatcatcgtgcccaacgggatgcgtttcgctcccaacagactggaggatccacaccatgaaatatatccctgtcggcgttgatattgcaaaacatcttatgcaggtgcatttcgttgatgaacataccggagagattatcgataagcaggttaagcgtgagaaattccttgaatatttcagcaaccgtgaaccctgccttatcggcatggaggcctgtgggggttctcatcactgggcgcgtgagcttcagaaactgggacataaggtcagattactcaaaggccggttcgtcaaagcattcgtgatgggaaataaaaacgatgtgatggacgcccgagccatctggctggcggttcagcagccggtacaatccgtcgccgttaaaagcgaggagcaacaggccacgctggggttacaccgaatgcgccagcaactggtgaagttcaggacagcacagataaacgcgcttcacagtctcttgctggaatttggtgaaacgacgcacaaggggcgtgctgctttggcgaaggaggtgccggaagccctggagcgtctgaaggagcggctaccgctctacctgataaacatgctggatgaacaatatcagcgaattactgaacttgatgaacatcttgaccacattgagaagcagttgcaggcgatagccagacagaatgaaacctgtcagcggttactgaacatcctaggcgtggggccgttaatcgccaccgctgccgttgccacgatgggagacgcctccgcctttaagtcgggacgggaattcgccgcgtttatcggtctggtgcccagacagacaggctcaggaggaaaaatccgcctgctgggaataagcaaacgtggtgataaatatctgcgaaccctgtttattcatggtgcaagggcggcagcattactgaccaaagaacctggtccatggataaccgaactgaaaaagcgtcgtccggccagcgtggcaatcgtcgcaatggcaaacaagctggcgcgaacggtgtgggcaatagccgctcacggacgtaaatacgacaaaaatcatgtcagtatcaggcctgattaatcgctgataccgataaacataaactctttacaaaagggtgaatgcagaaaggttgctctggcagccagcgtgatgacaaagacaggtaagaccgtgactcactaaacctggataatcgattgggcctaaagcccgcagaggaaatgaggcgtgagtcggcgaattacataggggctcgcagcttccgggctgcaataaagccggatataaagctgcaacctaccgtcgatgtcagaacaatggatgcctttgcaaacgggatgcgttcatat

SEQ ID NO: 30 - DNA, 1328 bp, unidentified
  source 1..1328: mol_type = unassigned DNA; note = element_locus196678
ttaatgagatggtcactccctccttcccagtactatgctgaggacaggctttcattcggagaaccatcatggaaaacattgcgcttattggtatcgatctgggtaagaactctttccatattcattgtcaggatcatcgtgggaaggccgtttaccgtaaaaaattcacccgaccaaagctaatcgaatttctggcgacatgcccggcaacaaccatcgcgatggaagcctgtggcggttctcactttatggcacgcaagctggcagagttagggcattttccaaagctgatatcaccgcaatttgtccgcccattcgttaaaagcaacaaaaatgacttcgttgatgctgaagctatctgtgaagcagcatcacgtccatctatgcgtttcgtgcagcccagaaccgaatctcagcaggcaatgcgagctctgcatcgtgtccgtgaatccctggttcaggataaggtgaaaacaactaatcagatgcatgcttttctgctggaatttggtatcagcgttccgcgaggtgctgccgttattagtcgactgagtacccttcttgaggacagtagtttgcctctttatctcagccagttactgctgaaattacaacagcattatcactatcttgttgagcagattaaagatctggaatctcagttgaaacgaaagttggacgaagatgaggttggacagcgcttgctgagtattccctgcgttggaacgctgactgccagtactatttcaactgagattggcgacgggaagcagtacgccagcagccgtgactttgcggcggcaacagggctggtaccccgacagtacagcacgggaggtcggacgacattgttagggattagcaagcggggcaacaaaaagatccgaactttgttggttcagtgtgccagggtattcatacaaaaactggaacaccagtctggcaagttggccgactgggtcagggagttgttgtgtcggaaaagcaactttgtcgtcacctgtgctctggcaaacaagctggccagaatagcctgggcactgacggcgcgacagcaaacttacgaagcataaaggcagaaatacaccagtttaaacaatcattcatctggttttgcgaatactgatattgatgatacaaacggcccaccggcctgttgaggaacctgtaaaacggaaaggctcgctgaagccgtatattttctggaggttcatcaggcgcggaactcatcgaggcgcgggaataaaatcccattcagacgccggatagattcaagcaagccaacttatcgtcaaaatcggtgttgcaaaaacgggagtgaccataga

SEQ ID NO: 31 - DNA, 1397 bp, unidentified
  source 1..1397: mol_type = unassigned DNA; note = element_locus137473
tgatggggtggacggctcccaacggcatcgcgatgtgccaaggtgaagtcgttgcagaattcacagaggaggccacccatggaacaaattatccgtattggcatggacacgtcaaaaagtgttttccaattgcacggtgtaaacgcgaaggagcagcctgttttgcgcaggaagctatcccgccgggagatggtaaagttttttgagaaactgcccccgattgaaatcgcgattgaggcctgtggcgcctcccattactgggggcgggtgctctcgtgtctgggacacacagtgaagctgatcgcgccgcagctcgtgaagccttatgtcaagcgcgggaaaaacgatgccgccgacgcggaagccctctgtgaagcgatgagtcggcctacaatgcggttcgtcccgctcaagagcgaggaagagcaggcagcgttgatgctgattggaatgcgggcacgacttatccggaaccgcacacagctcgccaatacgatccggggatatgctgccgagtttgggatcacggcgcccaaaggcatgtgccggattgaggcactccttgatcggatcgctgcggacgaaagcctgcccacattgacgcgcgagttgtttgcccttcacgcaaaggaatatgctgaattgcaaggtgaaatcgaacagcttgagggcaaggtgatggcatggcaccgcgccaacgaatgcagtcagcgtcttgcgaaaattccgggcgttggcccgatcggcgcagcgctgctgatgatgaaaacgcctgatccgcatctgttcaaatcgggtcgagcctttgcggcctggatcggattgacgcccagggatcactcaaccggtggaaaaacaaggcttggcagaatcacacgcgctggcgatgaggtcttgcgaagcacgctggtggttggcgcgaccgcagtcgtgtcgcatgcccggcggaccaatgggaagaatgcctcatcttggttacgtgaattgctggagcgcaaaaaaccgaaactcgcagcggtggcccttgccaataagattgcgcggattgcctggaaactgatggtcagcggcgaacactataagcgccttctgcagcaacccggcgcagctgctgtttgagcttagcctggcacgatgcgctgacatttgacgctctcgtgccgagctgaggtcgtggcttgcaagtaatagagcagatggtgtgatcgatcgatccatggcgtgagaaaacccgtggcaaccagtggtcatcaaagaccgcttctgtgtttggggctcacgctgcggaagccatcttggccagcgaccctatggccgcatcaacaggccggacatatggaagcaaagatccgatcattttcttgcctagccccttgcaagggggagccgtccacata

SEQ ID NO: 32 - DNA, 1438 bp, unidentified
  source 1..1438: mol_type = unassigned DNA; note = element_locus101259
tccctacgttgttctgtggggggtggtgagcccctcgtatggttcatccacccaggggcgccgggtgtggttgaaagagctctgccgcttgtggctttcagtgattggccgcccggtgccccacgacgactcggctgccaattaggaagtgcgaatgatcgctccgtagggaatcgacagcgaggtcgtccgtgggaggcgccaggcaacatcaccgcatggaggcaccacatggccgcgatctgggccggcatcgacgcaggcaagacccaccaccactgcgtctcgatcgacgacagcggccgacggctgctgtcgcgacgcgtcgccaacgacgaacccgaactgttggaactcctcgcccatgtcctggctctgggcgaccaggtgacctggggcatcgacctggccgacggcggagccgccctggtcatcgccatcctcctcaaccacgaccagccgctgcactacatctccggccgggccatccaccgcgcctctgagagctaccgaggcgagggaaaaaccgacgccaaggacgccgccgtcatcgccgaccaggtccgcgtccgccgcgacctgcaccccttacgcgccgccgacgacacaatcaccgatctcaagatcctcacaggccggcgcatggacctggtcgccgaccgcacccgaacggtgaaccgcctccgagcccagctcaccggcatcttccccggcctggaacgggcgctggatgtgaccaacagcggccccctcaccttgctggtcggctaccagaccccagcggccatccgccgaatcggcgccaagcggctggagatctggctacgtaaccgtcacgtcgtccgcgccgaccggctcgccgagatcgccgtccaggccgccgaacggcagcacacccgcctgcccggcgagaagctggccgcccaactggtgcacacgctggccagggaggtgatgggcctcaaccagcagatcgccgagctcgacaaggacatcgaggccaggtttcgcgaccaccacaccttcgacgtgataatcagcatgcccggtctcggcgtcatcctcggcgccgagttcctggccgccaccggcggcggcatgacggtcttcggtaccgctgaccgactcgccggcttcggcggcgtcgcccccgtgccccgcgattccggaaagatcagcggcaacctgcggcgcccgcagcgatacgaccgccgcctccaacgcgtcttctacatctcggcgttgttcagcatccggcactgcgaggaatcgcgtcagttctacgatcgcaaacgcgccgaaggcaagcgccgctcccaggccgtcctcgcccttgcccgccgccgcgtcaacgtcctctgggcactcatacgcgatggacggtgctacgagctcacgccacccagtgccctcgctgcttgacagaccgcattaggaa

SEQ ID NO: 33 - DNA, 1335 bp, unidentified
  source 1..1335: mol_type = unassigned DNA; note = element_locus78905
ccgacttatggtcgtgtcagcggtccgtggtccgggttagctgctcgtaatgtgccgtagcagaccggaagggttgactcgtgagattcctgtcaccccatcctgcgggttgacttcgtggcggtgtgtcggccccttccggcctgcgttcgcggagtgacttaagggaggcgtgaccccaagctgctgtgagaggtacttgaagtcggattgtcctccgcggattcccccaatccagcagagaagggaaccgccttccatgatcgtcatcggcatcgatccccacaagtccagccacactgccaccgcggtcgacccggccaccaacaccgacctcggctcgatccgcatcgacgccacccgcaccggttacaagacgctgatcgactgggccaagacctggccgacccgcaaatgggcggtcgagaacgccgagggactcggccaccacctcgcccagtggctactggtcctcggcgaactcgttctcgacgtcccgaccacctccaccgcccggatccggcaactctcccgcggtggccgacggaagaacgaccgcatcgacgccgccgcagcggcctgtgtcgccgtcctgcagggcgacgcccgcccggtggaccccgagggcccgaccgatatcctggcgctgctcgacgaacatcgaacgaatatgtctaacagtcggactcgcctcgtcaatcagttgcacgcgttgctgcgacagctgttcgccggcggagcgccgacctcgctgaccgcggcctcggccaccaccctgctgcggggcttccgtgcccgaagcggcgtcgaccgaactcgcgtcggtctgtgccgggatctgatcgccgacatccgccgcctcgatgaccagctcgcggcgaacgagaagcagatggcccatacgctcgacgagcacggcacccgtctgcgggaggtggacgggatcggtgcggtgaccgcggcccggctgatcggtcgcacgggacgcgccagcagattcccgaccgccgcggcctacgccaactacaacggttcggcaccggtccagatcgccagcgccgacaccgaccgccaccgcctctcccgctacggcgaccggcaactcaacagcgcgctccacaccgtcgccatggttcagacccgaatgcccgccagcgccggccgaacgtactacgacaagaaaatcgatgaaggcaaaccgcccgcagcggcgaggcgcgccctcaaacggcacctatccgatcacgtctggcgcatcatgctcgccgacgagaaacgccgataccgacgaaacgaggcggataccgcaagtgcggcttgacagatagagaggca

SEQ ID NO: 34 - DNA, 1379 bp, unidentified
  source 1..1379: mol_type = unassigned DNA; note = element_locus71993
tgatggggtggacggccccacccgacggcatcgagatgtgccatgctggtgctgtcataaaccaacagtgggaaggagccgtccaccatggatgttacaacaatcgggattgatctggccaagtctgttttccagttgcacggcgttgacgaggaaggcaacgctgttgtgaagaagaagctgcggcgtggcgccgtgctcgatttcctgcgtaacctgccgccctgcctgatcgggatggaagcttgtgccagcgcacactattgggcgcgcgagatcggtgcgcttggtcacacggtgcgccttatgcctccggcctatgtgaaaccctacgtgaagcggcaaaagaacgatgcggcggatgcggaagcgatctgcgaggctgtgacccggcccagcatgcgcttcgtgccggtcaagagcgccgagcggcagggcgtgctcgtcctgcaccgggcccgcgatcttctgatgcgccagcgcaccatgctgctgaatgcgattcgggcgcatatggctgagttcggggtcattgctgcacagggtccgcgcaaggtcatggatctgatcgcgcaactcaggagcgatgaagagatcggcctgcctgacatcgcccgcccggccctgctggcgctggcggcccagcttgaggccatgggatgcgagatccgctcccttgagcgccaactcatggcctggcaccgcacagatgagaccagccagaggctcaagaccatcccgggcgtgggcatcatcaccgccaccgcgctggcggccagcgtgcctgatccgtcggtgttccgctccggccgtcagtttgcagccttcctcgggctggttccgcgacagaactcgtcgggcggcaaggaccgtctcgggcggatctcgaagatgggtgatggctatctgcgaaagctgctggtggtcggcgccacctcggtcatccgcagggccgggaccaacaacacggccacgggcgtgtggatacgctccttgcttgaacgcaaacccgcgcgtgtcgccaccgtagcgatggccaacaaaaccgctcgaattgcctgggtcgtactggtgcgcggtgaggtttatcgcgcgccagcggcggcatgaattgaaatgcgctgcggcgattaatctgccgcagccccaaactgtgagggcaaatgtgagtgatgatgatcaaaaaagggccgcaaccgggacaccccgaggcattgtcagggcttcaaagctcggtagtctgattgggacccggtccgcggacttcatcagggccagcggtcatgcgcaccgcgtcaaaaggccggacacatgaccgcaacccacaacgatcagcaccagtcaaaattatcccttgcagaaacggggccgtccacaca

SEQ ID NO: 35 - DNA, 1477 bp, unidentified
  source 1..1477: mol_type = unassigned DNA; note = element_locus95399
cttgtatgtaataggactcgatggctagctaccatcatatgaagcagagtgagcttgtcccagccctgaacagtcagactttgattagcagcaaaagccctctgcttcacctttcacgccagcattaacattgaacggttgccaagagcgatgactctgcatgtacaaggggaataggcgtgatggtttggtgaaaggagaatattcatgtttcagttaggtattgatgtcagcaagaaaacgctggatttgtgcctgctgcgcgaaggcgtaaaaggcagagttaaaacccgaaagcttcagaatgatattaatgctgtcagcgcggtaatagcctggctcagtaagcaacattgtaaacctgaagatgtccatatcatcatggaagctactggtgtttatcatgaatcactggcttacgggcttcacaaagccgggggccggatatcacttgccaacccacacagggcaagagagtttgcccggggtatgggaatgctgaccaaaaatgaccgggttgatgcttatatgctggcttgctatggcgtgcttaaagcaccggagccatggcttcctccaccggaagaagtccgccatctcagtgcactgctccgcagacgtgatgctcttgtggctgacagtactcgcgaaaaaaacaggctggaaaaatacctagcaacagacacaccttctgttatagctgaatccgtagaggcaatgattggtcagttgaacgcagaaattaaacgtctggacagactgatccgttcacaccttaaccagcatcctgaattaaaaaaggattttgacctgctgacgtcaataaaatccgtaggttatcagttaggtctgaatatgcttgtcatcctgcggagccatgatttcgccacagcagaacaggcggctgcatttttaggtgtcgttcccgttgaaaaatattccggcacctcggtcagagggtgtccgaaactgtcaaaaattggtccgccggaaatccgggcgaaactgtatctggcttcgttgtgtggtctgagatttaacccattgatgaaagcgatgtatgagcgattatgcctgagaggtaaggccaaaatgtgtgccattggtgcgctgatgagaaaactcgtgcactggtgctatggcgtactgaagacccaaaaaccgtttgatgtgggctatttgccttcatatgcgcgtagcgcatgtaaggcggcatgatgtagttacatatggtacaggagtaacaccgccgaagcccggcgtaagccggtacgtattgataggtttcacctatcccatccctgccctgcgaggccatacgggctttcagcgatgatgaagtataggtaagcccttttaaccccgttagcgcggctacgccgcgctgtatcggggacttagtgctgacagcttgctggcagtacttagggggctgtacgtcggagttcaagcgatttttcttgacagaacacggtag

SEQ ID NO: 36 - DNA, 1357 bp, unidentified
  source 1..1357: mol_type = unassigned DNA; note = element_locus79791
ataatgatatggtcacccccaccttaacagcagtacgctgttaaggtaaatccctttaacggagagaccatcatgcagaacatcacacttattggtatcgatctcggaaagcactccttccacattcattgtcaagacaagtctggtaaggctcttctgcgtaaaaaatttacccgtactaaactgatgcagtttctggcgacatgtccgccctcagttgttgtaatggaagcctgtgcgggtgcacactttatggctcgctgtatctctgattttgggcatgaaactaagctgatttctccacagttcgttcgcccgtttgtcaaaagtaataagaatgattttgttgatgcagaagccatatgcgaagcggcttcacgaccatcaatgcgttttgtccagccaagaactgagacccagcaggccatgagggcgttacaccgggtcagagaatcgctcatcagagataaggtgaaaacaaccaaccagatccacggtttcttgctggaatttggaatcagcctgccgataggtgatgctgtaataaaacggttgtctctcgtgttggctgaacacgaaatccccgaatatctgagccgccttttggtgaggttgcatacccactacttttaccttgttgagcaaatagcagagctggaatcagaattaagtcagtcaatcaacgctgatgataccgctcagcgcattatgacaattcctggtgttggtccgattactgccagcttactatcgtcgcaacttggtgacgggaaacagttctcatgcagcagggattttgcagcttccacaggacttgttccccggcagtatagcactggaggaaaatcgactctgttgggtatcagtaagcgaggtgataaaaatttacgccggttactggttcagtgtgcccgctcattcataatgcgacttgaacgcaagcatggaaaacttgctgagtgggttcgggagcaactcaacaagaagcattcgaatgtggttacctgcgctctggcaaataaactggctcgaattgcctgggcaatcactactcagaaaaaagaatatcaggcctgatatagatgctgatataactcaattagtttattttaaacaataagatacaagttacctttctggttttgcgaagactgattattgatgacatgaacggcaaatcgacctgattaaaaacctaacagatgaaatggctcactgaagccgaggggatttttaggattatcaggtgcggaactcatcggggcgcgggcatccttgcccacagagacgccggatagatttaagcaagccaaccattaatcaaaaatcagtgttgcaaaaacgggggtgaccatag

SEQ ID NO: 37 - DNA, 1380 bp, unidentified
  source 1..1380: mol_type = unassigned DNA; note = element_locus108084
cgatgagatggtcttcccctccttcacggctgcccccatttacgccatgatggacaaactttaatcagagaaaagttagagggataccatgtctgaaatgaaaattaccggcatcgatctggctaaaacgagcttttatctcttcagtatcaatgcttatggaaaaccagcaggcaagataaaactttctcgaagcaacctgctcaactggctggttcagcaaccaccgatgactcttgctatggaagcatgtggagcatcgcatcactgggcacgggagatacaaaagcttggtcataaagcgattttgcttccggcacaacatgtcagagcttatcagcggcgccagaaaaatgattataacgatgcacaggccattgctgaggcttgccagcatggaaccatccggcctgtacccataaaaacacttgatcagcaggatcttcagacatttttaaaaatgcgccagatggtttcgatggaaaggacacaactgataaatcatgtacgtggacttctcgccgaatatggcattgtgctgaataaaggggcaacagaactgcggcgaaccctgcctgcgctacttgaagatgctgaaaatgaactcactgataccatgaggacactcttgcaccggcagtataccaggctggccatgctggatgatgaactggaatggtataattccgaacagaaaaaatacgttcatcaggacccggtgtgcaaacggttgttggctattccagggttcggtcccctcgtcagccaggcgataaaaagctggatgggtgatggcaagcaatttaagcgtggaagagacgcctcagctgccttagggttggttcccaggcagttcagtaccggcggcaagcaggtgttgctgaacatatcaaagtgcggcaaccggtatgtcagatccatgctggtacatggagcgagagctgtcctgttcagggctggtgaaaaaaccgatccactcagcgtatggattaatcgtatcagggaaaaacgtggatttaatcgggccgttattgctctggcgaataaactgctgcggatttcctgggtgatcatcgcccgcaatgaattatatttaccagtagcaatgaaaaatcagtaagttattatttggtatagtgcaatgaaagctaacctgaaattgcgaagaatgcagaaatgatgaaaaacaggtcaaacctgcatatcgaaaacctgtcggctgtacgaggctatcaaagccgtgtaagcgtgaaggacggtatgtgcggatgattcatcgaggccagaagttattcacttcaaaaacaggccggatatacgaaagcaaacctgtcactatcattatgactgccgtcttgcaatacgggggaagaccatata

SEQ ID NO: 38 - DNA, 1394 bp, unidentified
  source 1..1394: mol_type = unassigned DNA; note = element_locus241619
ctcctatgtttacaaaattaattcagtcgaaggataaaagttaaatttgtaagataaagtgataaaaagatgagagtagatgacacactcaataactcatgaagtatattgttccatagaaattgcctcatctttttttatcttttcgagtctgaacagaatgtaaggaattgagtataactcaatattcagaatatccaaccaggagacaagactgtgggagattcatcactttatgttaactattaacattagaacgatgaacactttaaaacaagtattgggagtagatgtagcacagaaggagctcgtggtcacgttaggtcggttgctggcagatttaagcattgagttgtatgcttataaagtttttagtaacacagaaaagggcttttcttccttgttgacatgggttcaaaagttgacaaatcctgatacagaagttcggtttgtgatggaggccactggtgtctatcatcagaaatttgcttattttctggatgatcatggttactgtttaagtattgttttacccaacaagatcagtaattacatcaggactctggatgttaaaacggttacagacaaaagttgttcggaggccataaccaggtttgggttggagcgaaagctagataattggaaacgtcctaaaaaaacttataaaagccttcagcaacttaccagagagcgagatcaggtggttttagagcgatcaatggtaaaaaatcagctacatgcggaatctcaggaagcagagccacatgagcggagtttggagcgcttgaaggagcggattaagtttcttagtagtcaggagagagaaattaaagaagatatagagcaggttgttaatcgggatgctgagctcaaaaaagaagtggaaattatcagtagtattccaggggtaggagaattgacggctgcaattattttgggagaaacaaatggttttgaattgatacgaaataagaagcagctcaccagttatgcgggctttgacgtcaaagaaaaacaatcagggacctcggtgaaaggcaaaccaagaatatcaaaaaaaggaaaccgaagccttaggaaagcgatgtatttaccatcaatgagtgcagtgaaatgggacgataatttcaaaaatatgtatgtaaggatcgtcagtaaacagggtataaagatgaaggccttgatagctgtccagaggaaattattggaactggcgtacaccttatttaagaccaaggcaagctatgacaaatcatacgaaagcaaaaaggtagaacaaaaaaatagcatgtcagcaccaaaggcatgagcatgctatactggctgcctctggaccgccttcaagaataaaggtatgaaaaatttaaatttttaataggtaatcaacacagaat

SEQ ID NO: 39 - DNA, 1368 bp, unidentified
  source 1..1368: mol_type = unassigned DNA; note = element_locus38909
cttgtatcttgtttgtaactgcccgatctttttgccctgtggtagttggaaactggatcgggtttcggcgggaggccgatcgcatcctgaggcgcggtagctttgcagcctggattatagataggctccccgcccttctttcacacgccgtagagaatccgaggccacttgagcctgcattcacaaggtcggcgagagagatggtacagggtcggggagccggaactcagtctaatccaaatcttgaggacagatatggcaaatggttctaagaccgaagtccaagttttcgtaggcatcgatgtcagcgcacgcgagttaagcgtcgccgtgcgttgtggaaccgaggaccgggaggcggtcacaacctttggcaacaatgccggtggacacaaagcccttctggcttacttgctgcgaggaaacgggcgcgcccgcgtctgcttggaagcgagcggcaattacagcctggatctggccttgaccttgcacgcccagcgccaggtggaggttagcgtggtgaatcctcgtcgtgcgcggcgcttcgcggaatcgttgggcgaacgcagcaagaccgatccggtcgatgcaggtgtgctttgcgaatatgccatgcgcatgcgttgggtaccttgggtaccgccaaacctggtcgccctgcgcttacgtgccctgacacgggctatcgaagatctgggtgtcatgcagacccaggagaaaaatcgtcagcatgcgttgacgatcagccgcgctcttcctgccttactgattcgggaactacagaagcatcagcgttatctgcagctccggatcacgcggctgcggcaggaagcgctgcgactcatcgcccgcgaccccgagctggaccgccgcttccgtgtgatgcttaccactcccggaatcggtgaaaccagtgctttgcaaatcctcggcgagttagcggtgctgcccgacacactggatgcgcgccagtgggtggcattcgctggactcgatccatgtcgcttcacgtccggaacctccgtcgaaaagaaaccccggatcagccgtggtggtagtcgtcacctgcgtcgggctctgtacatgccagctttggttgccatgcgccgtgagccctacctgcgggccttctaccagcgcttgctggctcgcggaaaagccccgctgcaggcggtggtggcagtcatgagaaagcttctgcatgcctttttcgccatgttccactccgatcaaccgtacgatggatccaagttatgcccagtaaagttcgctcccgacacggtggctttatgcgcttgaccgagaaaaaagagagaggttctcctgcacctctccagagagaaaaaaacttggaaatcaagagagaat

SEQ ID NO: 40 - DNA, 1378 bp, unidentified
  source 1..1378: mol_type = unassigned DNA; note = element_locus107523
tgatgaggtggaacggcccttctcaaacggcatcaagtgcctaacgtggtcgtgttgaaacgccacaaagaagaaggaccgctccatgaggaagattatcacagtcgggctcgatctggccaaatccgtttttcaggttcatggcatcgccgcagaaggagacgtgctcgtacggcgcgcactgcgtcgatcacaggtgctggacttcttccgcacattggagccttgcctcgtagggatggaagcctgtggcagcgcgcattattgggctcgggaaattcaggccctgggacatacggttcggatgatgccacccgcatacgtgaaggcctacgtcaaacgcaacaaaactgacgccgcagacgccgaagctatttgcgaggcagtcacccggccgaccatgcgctacgtgccgacaaaaacgcaggacgagcaggctgccggaatggtgctcaaagcacgagatttgctcatccgtcagcgcactcaagcaatcaatgccttgagagctcatcttgccgaactgggcattatcagggcgaccggtctggttggaatcatcagccttgccgccatagtgcgcgacgacagtgacttgagattgccagatatagcgcgaatggctttggaagagctcgtcgagcaaatcgagaccgtaacgacacgcattgaaaggctcgatcgaaaaatccttgaagcggtgagaaaagacgacagcgctcgacgcctgacggcgattcccggcgtggggccgatcattgccgcgaccgttcgagcagttgtaccggatcccgctggcttccgaacaggccgagatttcgctgcctggattgggttgactccacgcgcgcattccagcggaggaaaagaacggataggttcgatctcaaagcgaggaaaccagcaactgcgaacactgcttgtcgccggagcgacgtcgatcctcaagctcgctcgtcgtggcctccagccatcagcatggattgcggacatgatgttgcgccgcccgttcaaggttgttgctgtcgcactcgcaaacaagatcgcacgcgtcatctgggctcttctcgtccgaggtgatagctatcggggagcgaagacgatcgcccaggcttagacatacgagctttccggctgaccagtcggagaggcaggcaaggtgccaattgtgatgacccaacgggacgacatcccgaagcaaatcagaccgcaaaatcgcaagcgcgttacagcgcgagaagctgattaggcgatttgctccgcggatctcatcgtggccatggccgaaaggccagaaaacaggccggacatatgaccgcaccgtccttattggggaaatacatgaggaaataccttgccaagcgggccgttccacata

SEQ ID NO: 41 - DNA, 1508 bp, unidentified
  source 1..1508: mol_type = unassigned DNA; note = element_locus31809
tgatggggtggatggccccctcacggcatctgtgtgccaaagttgggttgtggacaacaccaacagacgggagccatccatgaaagaggttacaacgatcgggctggatctggccaaggcagtgtttcaggtgcacggggttgatgcagttggggcggtcacgctccgtcgcacggtgcggcgaaggcaagttttggcgttctttgccaagctgccgccctgtctggtcgggatggaggcgtgtgcgacggcgcattactgggcgcgcgagatcggcaagctgggccacgacgtgcggctgatcccgccggcctatgcgaaggcctatgtccggcgcaacaagaacgacccggcggatgccgaggcgatctgcgaggcggtgagccggccatcgatgcgcttcgtcgcgatcaagaccgaggggcagcaagcggcggcgggcattcacaaggtgcgcgagatgctgatcaagcagcgcacgatgctgatcaacacgctgcgcggactgatggcggaattcggcgtcgtcgtcgccgaaggaccccagcacgtcggcgagctcgtggcgatcctggccgacccggcaaaccggcgcatcccgacaccgctgcacgagggcttgctggcgatcgtggagaccttgcgtgggctcgaacgacggatcgagatcgtcgacaagcagattgtcggctggggtcgcggcaatgcgacctgccgacacctgatcaccattcccggctatggaccgatcctgtccagtgccatgacagcgttcgcggtcgaccccgccgccttcgctagcggacggcacttctccgcctcgctcggcctcgtaccacggcaggacggcacgggaggaaaagtcaagctcggtccgatcagcaagcgcggcaacggctatctgcgccggctgctggtcaacggcgcgatggcggtgctgtgcagcaagcaagccaaggcggatccctggctggtcaaactgctcgagaccaaggagcgcaaggtcgccgcctgcgcgctcgccaacaagatggcgcgcatcggctgggcggtgatggtgcggcaggaggactttcgcagtcggcggcacgatcagccgtgcgccgacctgaaccagcttggcgctgtgctcaccgccgtcaagaccgcttcgcgcgcgccttcggcagtggccttcggccagtcttgaccgcggctccgcgcggcgccaccccacaaccaggtcgggacggagaaacggccctctgatcgaacaaagaaacagagaaagacacaggacttgcgagggtgaagaagcgtgatggcatcgtcggtcaaccgacggatcgaggggtacctgccacgggtcatggggcaacgcgaccccgcgggcttgatcaggcctcgatccacggaacccatcagggcctgcggccgtgcgccgcgccaccaggccggacacatgactgcaattggtcttcgatgcagacacgtaaaaaaatccttgcgagccgggggccatccacaca

SEQ ID NO: 42 - DNA, 1442 bp, unidentified
  source 1..1442: mol_type = unassigned DNA; note = element_locus144529
gctctaccttctgagtcgggttgatcgagccattcgtaaggttgggtcgcccaggggcgctgggtgtggctatcaggccgctgccagctcgtggcattcgacgcttcgccgcccggcgccccacgacgactcggccgccgattaggaagtgcgaaaaagtcgctgagtagagcaatgccggcgaggtcgtccgtggtacgaaccgaacgaacacgcacgtcaggagcacgatgagccggatctgggcggggatcgacagcggcaagggccatcaccatggcctggccctggatgccgacggcaggaccctgctttcacggcgggtggccaacgatgagccggagctgctgcaactgatcggggatgtcctcgccgtggccggtggtcgccaggtgacctgggcgatcgacatgaccggcggcgagccggcgctgctgctgagcctgctggtggcccacggtcaggaagtcctctacatccccggccgactggtgaaccgggcgtccgacggctaccgcggcgagggcaagacggatgcccgcgacgccttcgtgatcgccgaccaggccaggatgcgtcgtgacctgcagccgatccggcccggcgacgaggccgtggtcgagctgaagctgctgaccgggcgccgggcagacctggtcgaggaccgcacccgcgcggtgaaccggctgcggggcaccctgctgggcatgttccctgcccttgaacgggcactggagctgaccaataccggcccgctgatcctgctgacgggttaccagacgccagcggcgatccgccgcgtcggcaccgcacggctggccaagtggctggccaaccgaaaggtccgaaacgcgagacccctggccgaagctgccgttgaggcagcggagcggcagtacacctccgtccctggggagaaggccattgcgaaactggtccacaccctggccgagggggtgatggccctgaacgagcagatcgccgagatggacaagctcatcgagggccggtttcgcgagcacgaactcgccgaaatagtccagagcgtccccgggatcggtactgtgctcggtgccgagttcctggcaggcatcggcggcagcctggacagcttcgactccccggacgccctcgcgtccttcgccggcgtcgcccccgcgcctcgcgactcgggcaaggtcagcggcaacctgcaccgaccggtcgtctaccaccgcaggctccagcgtgtcttctacacctcggcgctggtcagcatccggtgcgacccgaactcgcggaagttctacgaccgcaagcgcgcggaggggaagcgacacgtccaggccgtgatggcccttgcccgccgacgtgtcaacgtcctatgggccctgatccgtgaccgacggtgctaccaggtcacaccgccagtcaccgccaccgcttgacaacgacattaggaa

SEQ ID NO: 43 - DNA, 1204 bp, unidentified
  source 1..1204: mol_type = unassigned DNA; note = element_locus65581
cttatgtcttgatcttctccgccttagcggagaagatccccgactgatcatcgggagatagccggtgagctccccctaaccctagtgcctatgagcccgtgggagagattgtgccccggctgtctatttccctgtcgccttctagaccgaacggtatcctgtgcctatgagcacccacatataaggatggtccggcgataaatttcagacatggttatggagtgccataatgcgtagaacccctgtcggcgttgatatcgccaaacacaaatttgatgtcgccgtactgctggacaatcagaagtataaaaccaaaaagtttgccaataccccttctggatgccgcgagttcgcagcctggttgagccgctttggcgactgtcatgtctgcatggaagccaccgggagctacagtacggaactggccacttatctggcagacaacaactaccacgtcagtctgatgaacccggcgtgtatccattccttcggcaatacagaactggcccggaacaaaacggacaaaagcgatgcagcgatgatagcccgctactgcgcactgcatcagcctgagccgtggttcccagccccgttgagcgaacgccagttgaccgcgttggtcaggcatcttaagaacctggaagagatgcgtcagatggaagaaaatcgcctggaggtggccgaagcagtcattgtcccttcactcaatgagcacatcgccacgttggatgaactgatacgagaaacgaaaaagaaaatcagtcagcacatcgatgataaccctgacctaaaacgggacagcgagttgctaaaaagtatccctggtgtgggagagatgctgagttccagcctgctggccttcgctggaaacctgcgtcggttcaccagcagcaaggccctggtagcgtacgcaggactgaatccacagcgatgtgaatcggggatgtttaaaggaaaaagccggttatcgaaagtgggacacggtgagctacgaagcgcgttatacatgcccgcggtagtggcaagccaatacaatgttgtggttaaagacttaacagaaaggctgaagctgcgtgggaaatcgggcaaagagagagtgtgtgcggcgatgcgaaaactgctgcaactggcctatggtgtggtgaaatcaggaaagacatttaatgcggaaataccgcttgccggatagccgacaagacggtat

SEQ ID NO: 44 - DNA, 1199 bp, unidentified
  source 1..1199: mol_type = unassigned DNA; note = element_locus206026
cttgtatggtttcccggcaagtcttagaaggagaagacttgtcggggtggagggaccaggcaagcttctgaccctagggtacagactgtgggagatatggccccaccccgcaccttcaaacgccgataaggaatccatcggctgagcgcgcactcagaccgacgatactctgcaagccagcgtgacggtgcgccccgacaagcccatttaacctagctgacaggggagccccatggcaatgccggcaagccgcccggagatcgggatcgacgctgcgaaagacaacctggtgatccaccatcaggacctgaaccaaaccctcaccatcgacaatacgccccaagccatccgccaatggctggccaccctccccaagggctgcgatatcgccattgaggcgaccagcacctatcacatggacattaccgagcgcgcacacgccaagggccaccgggtctatgtggtggacggctaccgcctcagcaactaccgcaaaggcgttggagggcgggccaagacggatctggccgatgcccagttgctggcccgctatctgcgcagggagaaagacgagttacgcccatggagcccgcccccaaaggcgtaccgggtgctgcagagcctgctgcgtcgccgggccgccttggttaaggcccgcacggcattacgtcagagcctgagcggagaaccggagctcaaggccccgctacagaccttgattgccgaaatggaccggattgacactctgatccagaaacggctcaagagcgcggtgagcgccgccggcttacagactcaggtgcaacgctgcgacgcgatcgacggggtcggcgagatcaccgccaccgccttggtcatggccttcctgagaggagacttcaccaatagcgatgccttcgttgccttcctggggttggatgtccgggtccgtgactccggcaaactcaccggcaagcgtaagctgaccaaacaaggagatacggaggtcaggcgactgctgcactgtgccgccatgagtgcgtctcgacacccggtctggcgcgccttctatcagcgctatcgggaccggggactgcacaccacgcaagccttggtgatcctggcccggaagatcgctcgcaccgccttcgccctgatgaagcagcaacaagaatattgccccgcaaagctcttctaagcattgcagggcaccatagaat

SEQ ID NO: 45 - DNA, 1368 bp, unidentified
  source 1..1368: mol_type = unassigned DNA; note = element_locus9882
tgatgaggtggaacggcccttctcaatcggcatcaagtgcctaacgtggtcgtgttgaaacgccacaaagaagaaggaccgctccatgaagaagattaccacagtcgggctcgatctggccaaatccgtttttcaggttcatggcatagccgaagaaggagacgtgatcatactcgcgcactgcgtcgatcgcaggtgctggacttctttcgcacactgcggccttgcctcgtagggatggaagcctgtggcagtgcgcatttttgggctcgggaaattcaggccctggggcatacggttcggatgatgccgcccgcatacgtgaaggcctacgtcaaacgcaataaaactgacgccgcagctatttgcgaggcagtcacccggccgacaatgcgttacgtaccggcaaaaacgcaggacgagcaggctgccggaatggtgctcaaagcgcgagatttgctcatccgtcagcgcactcaagcaatcaatgccttgagagctcatcttgccgaactgggcattgtcgggtcgaccggtctggtcggaatcatcagccttgccgctatagtgcgcgacgatagtgatctgagattgccgggtgcagcgcgaatggctttggaagagctcgtcgagcaaatcgagaccgtgacgggacgcattgaaaggctcgatcggaaaatccttgaagcggtgaggaaggacgactgcgctcggcgcctgacagcgattcccggcgtggggccgatcattgcggcgaccgttcgagcagttgtgccggatcccgctggtttccgaaccggtcgagatttcgctgcctggattgggttgaccccacgcgcgcgctccagcggaggaaaggaacggataggttccatctcaaagcgcggaaaccagcaactgcgaacgctgcttgtcgcgggagcgacgtcggttctcaaggtcgctcgtcgtggcctccaactatcaccctggatagcggccatgatgttgcgccgcccgttcaacgttattgccgtcgcactcgcaaacaagatcgcgcgcatcatctgggctcttctcgttcgaggcgatagctatcgggaaacgaaaatgatcgcccaagcctaaacatacgagctttccgaccgatctgtcggagaggcaggcaaggtgccaattgtgatgacccaacgggacgacatcccgaagcaaatcagaccgcaaaatcgctagcgcgttgcagcgcgagaagctgattaggcgatttgctccgcggatctcatcgtggccatggctgaaaggccagaaaacaggccggacatatgaccgcaccgtccttatcggggaaacacatgaggaaatatcttgccaagcgggccgttccacata

SEQ ID NO: 46 - DNA, 1371 bp, unidentified
  source 1..1371: mol_type = unassigned DNA; note = element_locus146556
cagtaataatgccgatgtcagtctttaccaccacttagtttgccgtttaaccagattggtgtgattactgatgcagtgaagaccttcccgcatcctgactcacacagcgatcgaccttttgtgtcctgccctggacccgtcggttgccggaagcgccttcatgcgaggcatctcctcaccgatgcgcgtgactcaagaagggcctgacggcttgtctcgttactgtcctgtccgggttatctgtctggagattcaactctgtttcctcacaggagctctgtcatggttgataaagttaccgaagctgccgttgtgggtggcgtggatacacataaagatttgcacgttgccgctgtcgtagatcagaacaataaagtccttgggactcagtatttctccacaacacgacaaggttaccggcagatgctggcatggatgacctcgtttgggacattaaagcgaattggtgttgagtgcacaggtacctatggttccggtttgcttcgttattttcagaacgccgggttagaagttcttgaggtgactgctccagaccggatggagcgacgcaaacggggtaaaagtgacacaattgatgctgaatgtgccgctcatgcagcattctcaggcatcaggacagttactcccaaaacgcgtgatggcatgattgagtccctgcgggtattaaaaacttgccgaaaaacagcaatatcagcccgcagagtcgctctccagattatccattcaaatattatctctgccccggatgaattacgtgaacagctcagaaatatgacgcgcatgcagctcatcaggaccctgggttcctggagacctgatgccagtgaataccgcaatgtaaccaacgtttatcgcatttcattaaagtcccttgcccgacgctatctcgagttacatgacgaaatcgctgatctggatgtcatgattgcggcaattgtcgacgagttggcacctgagctgattaaacgtaatgctatcggatacgaaagcgcttcacagttgctgatcactgccggagacaatcctcaacggttaagatcagaatcaggatttgcggcactgtgtggtgtcagcccggtccccgtttcttctggaaaaacgaaccgttaccgacttaatcgtggtggagatcgtgctgcaaatagtgcacttcacatcatcgccatcggacgcttacgaactgacgcaaaaacaaaggaatatgtcgccaggcgtgtagccgaaggacatacaaaaatggaagcgatacgctgtctaaagcgatatatctcccgcgaagtttacacgttactgcgcaatcaaaacaggcggatcaacagtatcccgataacagcttgactcttagaaggg

SEQ ID NO: 47 - DNA, 1360 bp, unidentified
  source 1..1360: mol_type = unassigned DNA; note = element_locus222797
tgatgaggtggacggttccacccaccggcatcgcaatgtgctaaagtgctggtgtttgaaccggctctgaaaggaaccgcccagatggaaattacaacgataggaatcgacattgcaaagtcagtttttcaatttcacggtgtcgatgcggcaggccagaccgttctgcagaagaagcttcgccggagtgcagtcctagataccttggctaaattgcccccttgcctgatcggcatggaggcttgtgcgacgtcgcaccattgggcccgtgagatcacggcactaggccacgatgtgcggctcattcccccggcctatgtaaaaccctacgttaagcggcaaaagaatgatgcggctgatgcggaggctatttacgaggctgttacgcgcccgaatatgcactttgtggccataaaaagtgtcgatcagcaggcggccatgatgctgcaccgggtccgtgaccttctcgtacggcagcgcacaatgctgataaatgcactgcgcgcgcatatggctgagctggggatcattgcgccacagaggcctcagaatgttctcgggttgatccagcaactcgaagaggacagcaatggcggcatcacagaggtcgcccgatctgctttgctgagtctggccggccaactcaccagtctgacacaagaaatcagcgcacttgatcgcaagatccttgcatggcatcgctcgagtgaaaccagccagcgattatcgaccattccgggagttggagtgctgaccgcgacagcgatggctgcttcggttacggacccctcgctcttccgatccggacgccaatttgcagcctttctcgggttggttccccgacaaaattcatccggcggcaaagagcgattgggacgtattaccaaaatgggtgacggatatttgcgtaaactcctcgtggttggggccacagctattctgaggcgtgttgctgatacgcaaacgcgaaccgcgaattggctccgcagcctgctagaacgcaaggcctctcgactgatcagtgtcgcaatggccaacaaaaccgctcggatcatatgggcactcttggcgagaggaggaacctatcgagcctcataaacagtgaacagcgctgcattgtttacgcagcacactgtgatgcaagggcaaaagacgtgatgatgatcaaagcaagccgcagccagaacaccccgaggtattgccaggacagacgaagtccgacaacttgatagggatctggcaggcggacttcatcagggccagcggccaacggtgccgcgcgaaaaggccggacacatgaccgcaacccgcgatgatcatgacgtcaaaaaaaccttgctaaacagggaccgtccacaca

SEQ ID NO: 48 - DNA, 1590 bp, unidentified
  source 1..1590: mol_type = unassigned DNA; note = element_locus11380
tttttagtaccatataagtgtaagagataaagcatatcatttgtgctttaccctctgcacttatttttttatgataagggagtaattggtctggcgatgttctttttggattagccacatccgtcataaaaaccgtcaaccaccccttattataaacagtcgtttaagcaggttgaaacccgtaaggtgctttcgtgtaacgaactaaaatgagttgtaataagtgtggatgggaacaattacaaatctattttggaggttacagatgattagcgtaggaattgatgtatcaaaagagaaaagtacagtatgtattttaaagccttatggcgaaatcgtgagtaagccctttgaagtataccatgtggaacaggaactgtctgagttggcaactatgctgcttcgcttgaatgatgaggtacgaatcatcatggaagctaccgggatttatcatcttcctgtactaagctattttaaggagaagggatttttcgtagcagtgatcaatccatttgaaatgaaagaataccgttgtcagggacttcgccgtgtaaaaacagataaacaggatgcgattacaatctctcattatggaatagaccattggtatcgcttgaaagagtataaggcacaagaaaacatctatacagagctaaaacttttaggacgacaatactgtcattatatgcgaatgcgtgtggaaagcgttttggaactgacccatcttctggactatacgatgccggggattaaaacattactgcaaggttggaatgagaagaatggaaaggataaactgggggattttgcagaggaatactggcattatgataatataacaaagaaatcagaaaagcagtttatagacagctatctgaaatgggcaaaaaagaaaggataccatcagaaccaagataaagcgatcaagatttatgcactggcaaaagaaggtatccccacagtttcctccaataccccatcaacaaaaatgctggtacaggaggcagtacgggtattacgagaagtcgatcataccctgatgacgattttaacacaaatgcggtcgttagccaagagtctgccggaatatccaatcgtgcgagcgatgggaggtgttggagatgttcttgctccgaaactcatagcggagataggagatgtaagaaggtttcatagtggtaaagctctgattgcttatgctggaattgatgccccaccatatcaatcaggtcgacttgtcggaacggaaagaaaaatatccaaacgaggttcttccaacctaaggaagataggatacgaagttatgagaagtttgaaaacgcataaagcacctgaggatgcagctgtctatgagtttatattgaagaaagaacgtgaggggaaatcaaaacgcgccgcaaagatagcaggattaaataagtttttgagaatctactatgcgagagtgatggaagtataccgaaaataaaagaaaataaaccagagaaaacaacagaccggattttgagccggtctaattgtcgtggagatttttatttagttgagaacatttaaaaaacctgcgaaaaggtcttgacttttgttagcagg

SEQ ID NO: 49 - DNA, 1366 bp, unidentified
  source 1..1366: mol_type = unassigned DNA; note = element_locus102412
gaatggaagggacttcccctggatatgcacctgattaactattgtgcaatcatggggtaaacatagccccggagggattcgttatgaccatcactactgtcggtatcgatcttgctaaaaatgtgttcgctgttcactgcgttgaccaacacggtaaaactgttctggttaaacccaaagtacctcgagctgcccttcctgagctgattgccagtttacctccctgtgttatcgggatggaggcatgctccggggctcactactgggcaaggttgtttcggcagtatggtcatgagccgcgcctgatggctgctaagtttgtatcgccttaccgtatggctggtaaatcagggaaaaatgatgctgctgatgctcaggctatctgtgaagctgtccgtcgtccgcatatgcggttcgtaccagtgaaagacgaaagccagcaggccatgcagtgtttacatcgtacccggcaaggtttcatcgaagagaaaacagcaacatataatcgcctgagagggttgatctctgaattcggcgtcattgctccacaaagtacagatgccctgcgccacatggtatctgaacagaagaaatctttgccgcttcaggttcagcaatgtgttgatgacctgctggaacacattgatcgcattgaaaataacgttactgaatatgaccggatcctgtcccgcatggcaaaagcggatcaccgcagccagcggctgatggaactgaaagggattggccccacaacagcctgtgctctggtcgccagtatcggtaatgcacacgattttaaaaatggacgacaactggcagcctggctgggactaacgccatcgcaatatagtagcggcggaaaatcaaagcttggcaggataacgaaggcgggcgattcgtatctacgaatcgctgttggtccagggcgctcgttcagttctgattggcgccgagaaaaagacagactcattcagtcgttggggttgctcgctagttgagcgcagaggatactggcgtgccgttgtggccatagcggccaaaaatgcaagactgtgctgggcatcgctacattatggtgatgatttcaggttgtactcagtgagctaaagcacgaaactgattaaccatcttaactacaactcgttgatgataaagggttagaccccgtgagacatatctgactattgtacaggatatacgtatccgttaaacgaacaagaatctcacgagcgtctttcatcagggtccgaatcgataacgattcctcatgaccgtttatagtaccgcagtctctcccctttatttttactgacgagcagacagaaaccgaaaaaaccggcgttgacatgccggggaagcccttata

SEQ ID NO: 50 - DNA, 1447 bp, unidentified
  source 1..1447: mol_type = unassigned DNA; note = element_locus67572
agatggggtattcggccggccggtgtccctcactcaaggtgaggtgctgcgcttcgggctgatggtagacgtggtctgcgtttaggggcagccacaaacatcagaaggagaaacgcagcatgaggcactatgccggtctggatgtctccgtcaaagagacgtccgtgtgcatcgtcgacgagagcggcaaggtctgccgcgagacgaaggtaccgagccaccccgaggatctcgcgcgagcccttcacgaccgggcctggtgtttggagcgagtcggcctcgaggccgggccattgtcgcaatggctgttcagcggcttggcggcaacagggctaccggtagtgtgcatcgagacgcggcacacgaaagccttcctccaggcgcaggtcaacaagagcgaccggaatgacgcacgcggcatcgcgcagatgatgcgcgtcaacctgttccggcctgtgcacgtaaagacgctgaccagccagaagcgccgcgccctgctgactgcacgcaagctgctgcaggaaaaggcgttggctgtcgataacgatatccgcggcctgctacggaacttcgggctcaaggttggacccatcggtgcatccaggttcgagacgcgcacacgcgagctcgtcgacggcatgccggaactcgccgagataatcgaccctcttctcgaggcccgccggaagctgcgcgaactgtttgccgtgcttcaccgcaagctgttggtgatcgtgcgggatgacacggtgtgccggcgtttgatgacggtcccaggagtcggtccggtagtatccatggccttcaccgccaccatcgacgttccggcccgcttcaagagctccaaggctgtcggggcggcccttggattgaccccgatccttaatcaatccggcgaaagcaaacgcctcggcagggtctcgctgtgtggcgatggaatgacgcggacgcttctctatgaggcagctcaggtaatgctgacacggacgaccaaatggtcgtggctgaaagcatgggcaatgaaagtggcggcgcgtcgcgggatacagaaggcaatcgtcgccttggcccggcggctggcggtcatcttgcatcgcatctgggtgagcggcacggatttccgctggacaagggaagtgcaatcgacttaacgcgaacagtcccgtaatagaggagcggaccaggaggagaagtttgcggttccgcgttgaggcggagagttgtccctcgcgggacgagggacgaagtgagttcggtgcatgtgctgttccttgagcttcgtgagcacaaaggacgccttgaagattgttccacttcgttcttctgatcccatcatggaagggcctatggggccgattccggagagaagcgagaacccggagggataggtccacgtcacaacgcaagacggtccgaaagcgcttgacctcggttggccgaatagaga

SEQ ID NO: 51 - DNA, 1433 bp, unidentified
  source 1..1433: mol_type = unassigned DNA; note = element_locus153144
cttgtatggtatccactcatcggggcactcggaggagaatggacgccgacggaaccgggagagggtcgccgcaggctcgctggaggccatgtcctcgggaatgagattggcgccctcgaccggtgctgaaggttcgaacggtatcccgaggccggcgcgtccgtgtcctcgtatgcacaagcgtgaactgcagcaccggctccgaggctcccgccttcctccgtcgccaggaggttgtatgcgtttcgccggagtcgatatcgcgtccgaaactcatgtggtagctgtggtgcatgcaaacggcgacgtcgcggtgaaggctacgtcctttaccgaggatgccgctggctatcaaaaattgttggcgcttctcggcgaccctgccgatctgatggtggctatggaagccaccggccactattggaagaacctgttcaccgtgttggcggcggcgggattttccgttgcgctgctcaatccgttgcgcacccatcgctttgccgaggaagacctgcaacgtaccaagaccgacgccatcgacgccttgggcatcgcctgcttcgctgcgcaaaagcggccgcccgcaacacgcttgcccgacgccgccaccgaagagctgcgcgaaatggtccgcctgcgcgagcggctgctgcaggatttcggcgaccgagtccggcaactgcaccgcatggttgaccttggctttcctgagttcactcgctacgttcgtggtcttgatagcgagctcgccagcgcgatcctttctgactatcccaccgccgcagcctttcgcggcgtctcggtcaagcgcctggcagcattgcgctacgacggccggcatcaggtcgggctcgacttggcgcgcaccctcatcgacgccgccaagcgttcggtcggtcagcatcactccgccccttaccgcatgcaggttcgctacgcctgtcaggatctcgacgtgcttcgccgtcgcttgcgcgagctcgagcacgacatcgacggcaaattgcgcgaacatgaactcggccgcctgctcaccaccatcgacggcatcggaccgcaaaccgccgctcgcgtcatcgccaccgttggcgatccagcacacttcgaaagcgccgccacgctcgccgcttatatcggtgccattccgggactcaagcagtcgggcaaacgtcgccccactcgcgccggctcgaccccgatcggcaatgcccgcctgcgtgcggcgctgtggatgcccacactgaccgcggtgcgacgcaacccgtggctcaaagcccactatcaacgcctccgtgcccgcggcaagctgcccaaagtcgccttgcttgcctgcatgcacaagttgcttctggccatctactcggtggcgaagcatcggcgcccgttcgttaccccatgcacatgaagacaccgcttgacaaagatcacggtat

SEQ ID NO: 52 - DNA, 1199 bp, unidentified
  source 1..1199: mol_type = unassigned DNA; note = element_locus20607
cttgtatggtgcgacgggggtgagtcgtgttgagatggaggggctggggtgacggacagattcccgtttctgccattgtctttggacagacagcgaaagcgctctgcgctccgtgcccaacgtcgataaggaatgcaacggccgcctaagcggaccgtcgatagctctgcaagcttacgtgtgcacggcctcaccccagcgcttttagcgtagcacaccgacacagaggaggtcgaatgagtaaggtccactattttgccgccgatgtcagcaagcgtgagctggtgattgcggcctatccggcagtgggtgatggcgtaagggtgaacaacacggcggcggcgattacggcgtggctggatacgctgccggccaacagcgtgctggccatggaggctactggcacctatcatcgccggcttgctgcgctggcgtatgagcgaggcttggtggtctacgtgctgaatccgcgcgatgtctactattacgctcgggccatgggcgcccgcggtaaaaccgatgccagcgacgctaagctgctggcgcgctacgtggcccatgagcaggcccacctgcattgctatctgccgccaacaccgcgtagcgaacaactgacgacgctgctggagcgtcgtgccgtgctggtgcgcacccgccaaaccctcaagcagagcctggccgagctgcccgccctggacgcggagaaacaggccgcactggcggcgcttgacgacttgctgaaggccattgatcgtgagctcgcgcggctgaacgacagcgatcctccgacggcgcagttggtaacgcggctgaagactattagcggcgtcgggccgctggtggcgaccctgctcgccgccttgttccagcgtttcgccttccgtcacgccgacgccctgatcgcctatgtcgggctcgatccgcgacccgatcagtccggacaacatcagggccgtcgacgactgtccaaacgcggccatcccgaatggcggcgcttgctcgttgccgccgccatgtccgccgcccgtagccacgcctggcgcgactacgtcgcccaccaacggaccaaagcgctgcccgccaccgccattcatgtcatcctcgcacgcaagatcctgcgggtcgcgcttgccttatacaaaaacggccagcaattcattgctccgcaaacgcagaccgcttgacagcaaccatagaat

SEQ ID NO: 53 - DNA, 1300 bp, unidentified
  source 1..1300: mol_type = unassigned DNA; note = element_locus22609
cctttggtcaatgaaagaatatttattagcaattactattgttgaaatggggggtccggggggtgttaaaaaactaaaagcattgtggataacgttttaataaaaggcagggtgaactattgtcattcctagttttagagaacttatcgctgtaatagtccctgccttttattgattgcccaggcccaactagaatacttctttggatcaacaaaggtgataggcaaaggcaatttatcatttaactaacatataaacgtatgaagaactggaatgttattttgggcgttgatgtttcaaaactgacgcttgacatctgttgggcagagggtaacctgtatttaaaaattgataactgtacaaaaggattcaacacctttagaaaatggtgtaagatccatgagatcgatttaaaagaaactctaatcgtaatggaatacactggagggtatgaataccggttcattcagttctgtcagtcactttccattcctttttgcagagtccccggattagagattaagcaatcaatgggtatggttcgtggtaagagcgaccaggtagattccttccgaatcagccagtacggtcaggagaaaagtaagcggttagtacctgcaaaacctttgaatgatactattttagcccttagacaattgctttcattccgaaaaaggcttgttcgggaaaatgctggatggataagtacagtaaaggaacgaaagcacatgtatccattaaagaaggtcgataccattactcacactgcgatggcaaagatcaaagcaaataataaatatatcagccaggcagagcaggaaattacggagataattaaaagcgacgatacttggttactaagctatcggattatcagtagtatcaaagggataggcaaagtaaatgcatggatgaccttagcatttaccgagaacttcaccagttttacagatccacgtaaatatgctgtatatgtcggggtaatccctttcgagcatacctccggaactagtgtcaaaggcagaaaacgagttagtcacctggcccataaagagctcaagcaggaactgaatcaagccgctaaaacagccatggtacatgatccggaaatcagagcatatgccgatcgaaagctcaaggataaaagctactcgcttgttctgaataatataaagttcaagctgatcttaaggatgttcgcactgattaaaagaggggaatcatatgtggaaaactaccaaagagcagcctgatagaatctattttaaattaaatttggagagaagttaaacctagaata

SEQ ID NO: 54 - DNA, 1620 bp, unidentified
  source 1..1620: mol_type = unassigned DNA; note = element_locus111069
gttcgtattataaggtcatccagttttatttactggttgaccattttttatatggtcttatgattaagtagtcggggcagaacgaagcattagtggggcttagaccccgtcaactaaacagttcaccccctacttatagaaacatgattttggctggttgggacatagatcccgcataacaagcgaacctatgacactataagggagtattaggggaaccgataaatttaatagttttaggaggagatagtttatgaatccagtagttggtctggatgtcgcaaaaggagaaagccaaatacaagcttttttagatagaaagactccttttaaaaaaagttttaaaatttcacatacagttgaagggtttaagcagctacatcaattcttacagagtatcgaagaaaaagccaattcaaaaccagtattaataatggaatcgacaggacattaccattctccagttatgcagttcttagatagcttaaattatatttacatcgttattaatccattaatctcttatcgagctaaaagttcgagtttaagaaaggttaagactgatgtcatcgatgcgtaccacctctgcgagctgtattacaaagaagagttagagccacataaaaaacgtggtgcacagttactaaacctgcgaaatttaaccagacagcacgatcatttaacaggtattagttctcagacaaaactacattttttagcgattctagatcaagtgtttcctgaatatcgaggtgtatttggagatttgtattctaatgtttcactcttaactttactggagtttccttcatctgaagctgtgttacaagcaggtgaagatcaactagctaaacgaatcgcatctttatgtactagtcgttctaaacaatgggcaaacgaaagagctaagcttttaattactgcggctgaaaaaaatccgtttcaagtaaatctttatagaagcctaattatttcgcttgagatgcatattaaaatggttcttcaatacaaagaacatctatccaatttaaaagcagagatagatgtcctcgtaaaagaaattgaagaatatactatcatccaatcgattccaggtatcggaaaaaaaatcgcggcaacgattatctctgaaattggtgaaattgatcggtttgataatcctaaaaaacttgtggctttcactggtgttgacccgagtgtctttgaatctggtaaattcacagccagtagaaaccgtattacaaaacgtggttctagtcgattgagacatgcgttatttatggctgttcggtgtgcaattcgtgataatcgtaagagtaagacaacagacgaaatcatcccacgaaataagcgaatgcgacaattttatgataaaaagcgtgaagaaggaaaaccatttagagtaacagttattgcttgtgtaaacaaactattacattggatttatgccctgttaaaaagcaaaacgactttccaagatctagcttaaaatctgaactaacttcaactaccataatcttccaatttttgaataagtggaagattatttggcatgtcaaaaatagtataacatgggtcactaaatttttttattgaaaattattgacaaactattagctg

SEQ ID NO: 55 - DNA, 1394 bp, unidentified
  source 1..1394: mol_type = unassigned DNA; note = element_locus123581
gctctaagtttgcagcagttaagcggcgcagccgctaacctgtaaacattgttaaatagaactttgtagttagaagctttttctattacttttgtcgtagtaaagtaaaggaatagctggttgggaggaaaaatacaccgtcgccagtccgtagagactattgggggcattaagacccctcccaaccaagctgcaaagactaaatagaatgctcataaaattagttagagtggcagtcatcacagctttcgctacctttaaataaccatacaaagatatgaaaaagttcattattggaatcgatttttccaaagaaacagtagatgctagtatcgtacagaaagaacaaccagaaactctcattgcgtacaagaagtttagaaacaacctgaaaggagttgatggactgattgcctgggccaagtcaaaggttgcacaagacggagaaatcatcttctgtggtgaaaacactggtacatatagcacactcttcagtgatgaattgacagatcgtggctttatcatatggattgagcatggcatgaatatcgtacgtggcatgggtgatgtaagagggaaagacgacaagacagactctctgcgtattgcctcttacgctgcacgtttctatgataagatgaaaccttacgtacgtcccaaggacgaaacgcgtgtacttaagacactccttgctaagcgagatagactcaaatccttcttaaaagcggaaattactaacacaaaggagaatcctttaatgctgcaggactccaacatagcaagtagcataaacgagtttttcaaacgcctagaagaatccttacggaaagaactcaaggaacttgagcgaatgattctcgatgttgtcatgagcagctctgaatacgcaaaaaacttcaatatcctgacttccatgaaaggtatcggtttgattaatgcagtcgcgctcatagtctatacagacaacttcaccaagttcaactttaaccaccgcaagattgctacatattggggggttgttccctttaagaacgaatctggtacttccgtcaggagaggtacacatgtaagccccaaatgcaactcttggctgaaagcgcttttgaccgaagctacgctttgtgcaattaggtataactcacgcataaaagcttatcatgataggcttatggcacgagggaaagcgatcggtatagtatttaacaattgcaagaacaaaatgctcaagattcttgttgcaatggtacgtgactccaaaatctattcagatatggacgtatcaaaggatcctcatacgaccacaactactagctcaatagttgtatgctaacatcggtatccaacagatcctttaacaaaaaaacttgccaaaaatttggtcaataacatagaat

SEQ ID NO: 56 - DNA, 1374 bp, unidentified
  source 1..1374: mol_type = unassigned DNA; note = element_locus39063
taatggaatggtcgcctcccatctcttgtgccacagtgggacgataaatcgtcactcattgaacggagcgctgctatcatgaacgttaaaactattggaatcgatttggcaaaaaacgttttccagatccatggggttgacgagcacggaaaacggttgttcaacaaacaactcagacgggcacaaatggcctccttttttgccaacatcccaccctgtttgatcggcatggaggcctgtgcatctgctcatttctgggccaataaactgatatcgatgggccataatgtcaaactgatggcccctcagttcgtcaaaccctatgttaaaaccaataagcatgatgctgcagacgctgaagctatttgtgaagccgtcactcgacctaacatgcggttcgtgccggtcaaaaccgctgagcagcaagccgtattggcacttcaccggagtcgtcagagcttcatcaaacagcgaaccgcacaagccaatcaaatcagggggttattggccgaatttggcattgtcgtcccccgaggtatccagcagctacagcgacgattacctgagctcgtggaagatgcggataacccgttacccgtcctgtttcgtacacagctgagtctactacagcaccacatggcgtacctgttcgatgtcatcgctacactcgacaagcagattgagcagtgctatcggcaaaatgctctctgccagcgtatcggcaagatccctggtattggccctgttaccgccagcgcgctgattgcgaccattggtaaagccaacaatttcgagaatggccgacaactggctgcctggctcggattggttccacgtcagcactccagtgggggtaaacaagtcctgctcgggataagcaagcgaggtgatacctatttgaggaccttgcttatccatggtgccagggcggtattgcagtcggccaaacataaacaggatgccgtatcgagctgggctaaccagctaatggcgcgccggaataacaacattgcctcggtagcattggctaacaagaatgcgcggactgtgtgggcgctcctggccaaagagcgggagtattgtgcaccaataataagcgcttaagttgcttaatcagtaagacagaaacaacaccaccgattgcccaggcaagcatgaagtgatggcaagacaggtcagaccgcgatggggaaaacccggtttattcaaggctcctgaaagagcgctttgttgatagaggcctccatcagcgtattccatcagggacagaggtattttacatcacctcggcaaagtccggatctatggctgcaatcgatgaccagtaaagccaccacaacatatttagcttggcaaacaggaggcgaccatcta

SEQ ID NO: 57 - DNA, 1273 bp, unidentified
  source 1..1273: mol_type = unassigned DNA; note = element_locus165043
cttgtattatccctcctgtgcagagaaaatcggccagttttctctgacctgcagtccgcatgccgtatccggccttgggtttctaacctgcgttgtagatttatgcagcggactgcctttctcccagagtgataaaccggacagtatcatggaccggttttcccggtaatccgtatttgcaaggttggtttcactatggaacatgaacttcattatattggtatcgacactgctaaagagaaactggatgtcgatgtgttgcgccctgatggccgtcatcgcaccaaaaaattcgctaacaccactaaagggcacgatgagctggtgagctggctgaagggccacaagattgaccatgcgcatatctgcatcgaggcgaccggcacctatatggaacctgtcgcagagtgcctttacgatgctggctacatcgtgtcagtcattaatcctgcactgggtaaagctttcgctcagagtgaaggactgcgtaacaagactgataccgtggatgcgcgcatgctggcagagttctgtcgtcagaagcgtcctgcagcctgggaagcgcctcacccgcttgaacgcgcgttgcgtgccctggtagtacgccaccaggcgctgacagatatgcacacgcaggagctgaactgcactgagacggcgcgggaagtccagaagccgagcattgatgcccaccttctgtggcttgaagcagagctgaagcgccttgagaagcagataaaagacctgacagacgatgatccggatatgaaacaccgcaggaagctgctggaaagtatcccgggtatcggagagaaaacatccgcggtattactggcttatatcggtctgaaggaccgcttcgcccatgccagacagttcgccgcttttgcgggtctgatagcacggcgttatgaatcagggagcagtgtgagaggggcaagccggttgagtaaagccggacatgtgtcgcttcgcagggcgttgtatatgcctgcaatggtagccaccagcaagacagagtggggacgagcgttccgcgagcgtctgacggctaatggcaagaaaggaaaagtgattcttggcgcgatgatgcgcaaactggcccaggtggcgtatggagtgctgaagtcaggcgtgccgttcgatgcgtcacggcataatccggtagctgcataaaaatcgcggaagggatgaaaaaaacagcgcctgacggcgctgtgtctggcatgccgggataccggagtataaaaaaacttgcaggtcataacagtat

SEQ ID NO: 58 - DNA, 1368 bp, unidentified
  source 1..1368: mol_type = unassigned DNA; note = element_locus187447
gaatggaagggacttcccctgattatgcgcctgattaactcttgtgcaatcatggggtaaacacagccccggagggattcgctatgaccatcactactgtcggtatcgatcttgctaaaaacgtgttcgctgttcacggtgttgaccagaatggtaaaacggttctggttaaacccaaggtatcgcgtgctgcacttcctgaactgattgctggtttaccaccctgtgttatcgggatggaggcatgttccggggctcactactgggcaagattgtttcggcagtatggccatgaaccacgtctgatggctgcaaagtttgtatctccttatcgcatggccggtaaatcagggaaaaatgatgctgctgatgcacaggctatctgtgaagcggttcgtcgaccacatatgcgatttgtaccagttaaggacgaaagccagcagtcgatgcaatgtttacaccgcacccgtcagggttttatcgaagagaaaacagcaacatataacagactaagaggactggtgtcggaattcggtgtgatagccccacaaagtacagatgccctgcggtatatcgtttctgagcaaaagagttctttaccgcttcaggttcagcaatgtgtcgatgatttgctgaaacacattgatcatattgaagatagcattgctggatatgaccgaattctgtctcgtgcggcaaagaccgatcaccgtagccagcgattaatggagttgaaggggattggccccacaaccgcctgtgcactggtcgcgagtatcggtaatgctcatgattttaagaatgggcgtcagctggcagcctggctgggactgacaccatcgcagtacagcagcggcggaaaatcaaagcttggcaggatcacgaaagcgggcgattcgtatttgcgaactctgctggttcagggggctcgttcagttctgattggcgccgataaaaagactgattctttcagtcgttgggtttgtactctggttgaacgcagaggatactggcgtgccgttgtggccatcgccgcgaaaaatgcaagactgtgctgggcatcattgcattacggtgatgatttcaggctgtactcagccggttaaagcacaaatcagcagtttaaccatctgacctgcaactcgttgatgataaagggttagaccccgtgaggtatatctgattattgtacaggatatacgtatccgcttaacgaacaagagcctcacgcgcgtctttcatcagggcccgaatcgatgatgattcatcatggccgtttatagtaccgcagtctcttccctttatttttactgtagtgcagacagaaaccataaaaaccggcgttgacatgccggggaagtccttata

SEQ ID NO: 59 - DNA, 1386 bp, unidentified
  source 1..1386: mol_type = unassigned DNA; note = element_locus82201
ataatgagatggacgctccagattttacggtatcaaagtaccagactggatcgttgcaatacgtcctgaaaaattaggagcgtccacatgaaagtatcaactcttggtatcgacctggcaaagaacgtttttcagcttcatggtgtcgatcatgaaggccatactattttgcgtaaaaaactcacccgggctaagtttgttcagtttgtgattcaactggaaccttgtctgattggcatggaagcctgctcatccagtcattattttgcgcgattattcacccgctatggtcatgaggtaaaactcatacctccgcagtatgtgaagccttatgtgaaaacgaacaagacggatgcagcagatgctgaagcaatctgcgaagcggtaacccgtccgaatatgcgttttgttcagataaaaaccgaagagcagcaggccgttttagcgttacacactgaacggggaatacttatccgtgagcggattgcctgtgccaatagtttaagagccacactcgctgagtttggtattacgattgcggccggacaaaaccatttaacccgtgagctgccagccattctggaggatggcgaaaatggtttatctccctttgtcagaaccagcatctacagacagtctaaacatatccgggaacttgaagaacaagttaaacaggtagaagaagctctggcctcctggtatagaacgcaggaagcctgccagagaatggccaaaatcccgggggttggcatgttaacggccacttatgtggtagcagcagtgggtaatgcccgacaattcagtaccgcaaagcagttcgcttcatggctggggctgacactaaaggaacattccagcggcgggaaacagcaactgggagggatcagcaaacgtggagatggatatttccgatacctgctggttcacggcgcacgcgcacttaccgcctgggtcaaccgaaacggcgcggttgaggagaattcctggcttcagggactccttgagcggaagcactacaatgtggctgttgtcgccatggcggcaaaaacagcgaggatcatgtggtcaatgttgtcacacaatactgaatatcaacctcggcagctcgcctgacacaaggtcagtcaatctgacgaggtgctgaaaaaaagttaacgtcctggtaggtgcaggtgacttcagaagatggcaaaacaggtaagaccgcaggcaggatacaccgagaggtaacaagggcaagttagcccgtagaggatgattggtacctgcctggcggatttcatcatggttcgggataaaaatcccatcagaaaccggatatatggctgcacctacccgttttattacataactgaagaaagcattgcattccgggagcgtccatat

SEQ ID NO: 60 - DNA, 1423 bp, unidentified
  source 1..1423: mol_type = unassigned DNA; note = element_locus21613
ttccgtaagactgttggtggtccgggaggaccgggtgtggctgagatcgccttgcgctgtggtcgctgattgggaatgaccacccggtcctccgggacgccccggctgctgattgagatctgcgctcggtcgctggttacggatgtgtcggcggggtgttccacgggaccgctggcagcacccggtcgacggacggagacacgcatgacggtagttcgggacaaggcatggatcggcatcgatgtcggcaagacgcatcactgggcgtgcgtcgtcgacaccgacggccggaccatgttgtcggtcaaactcgtcaacgacgaaaccgacatcgtcgcgttcttgcagcggacgggaacgctggcgagcaattggtctgggcggtcgacatcatcgggtccccgtcagcgctgctcctcggtctgttggctcgggccggccactctgtgcgctatgcatcgggtcgaatggtggcggcgatgagcgccgcttacaccggtgaaggaaaaaccgacgccaaagatgcctacgtgatcgccgagaccgctcgcctgcgtcgggatctggcggtgatcgatgccgagaccgatctggtgcgcaacctcgcggtgctgaccgggcatcgggcggatctgatcgccgatcgcgtccggatgatcaaccgactccgtgacctgttgaccagcgtgtttcccagcctggagcgggcattcgactactccgctcataagggagcgctggtgttgctcactcgatacgccagtcccgatcggattcgccgcctcggccgtgcccgactggcgcagtggttgcggcaccagaaggtgcgcggcgccgatgaggtggcggcccgggcgctcgccgcagccgaagcgcagtcgatcgtgccgcccggacaggagctcacggcttctatcgtctccgagctcgccgcggcgatccttgctctcgacgctcgagtcaaggcactggacgagaagatcgaccacgagttcaggcagcacccacaagccgagatcatcgtgtcgatgccgggattcgggccgttcctcggcgccgcactactggtcggtgccggggatctgcgagcatttccgaccgccggccatctcgccgcggcggccggactcgtgccggtgccgaacgactccggtcggcgcaccggcaatctgcaccgcccgttgcgttacagccggccactacgtcacgtgttctatctttcggcgcagaccagcatgatgcgagccggcccgaaccgcgactactacctcaaaaaacgtgcccgaggcgccacccacacccaggcggtcatcgcgctggctcgccgccggatcgatgtgttgtgggcgctgctgcgggagaaccggacgtggacagcgacgcctccaccaaccgctcaggcggcttgacaacatcattgaga

SEQ ID NO: 61 - DNA, 1368 bp, unidentified
  source 1..1368: mol_type = unassigned DNA; note = element_locus66768
gaatggaagggacttcccctggatatgcacctgattaactcttgtgcaatcatggggtaaacatagcctggatagattcgttatgaccatcactactatcggtatcgatcttgctaaaaatgtgttcgctgttcatggggttgaccaaaatggcaaaaccgttctggtgaaatccagagtaacccacgcagctcttcccgggctgattgcaagtttaccgtcctgtgttatcgggatggaggcgtgctccggggctcattactgggcaagattgtttctgcaatatggtcatgagccgcgtctgatggccgctaaatttgtatctccataccgcatggccggtaaatcagggaaaaatgatgcagctgatgctcaggctatctgcgaagcggttcgtcgcccacatatgcggtttgttccagttaaggacgagagccagcaggcgatgcagtgtctgcatcgtacccgacagggttttatcgaagagaaaacagcaacatataatcgtcttcgagggttgatatcagaattcggcgtcattgccccacaaagtacagatgctttgcggcacatggtttctgcgcagaagagctctttacctcttcaggttcagcaatgtgtagatgatttactggaacacgttgatcgcattgaagctaacatcactgaatatgaccgaattttgtcccgcatagccaaaacagatcaccgcagtcagcggctaatgaagctaaaaggagttggtcccacaactgcctgtgctctggttgcctgtatcggtaatgcacatgattttaaaaatggacggcaactggcggcctggctggggttgactccatcgcaatacagtagcggcggaaagtcgaagttaggcaggataacaaaagccggtgattcgtatctgcgaacgcttctggtacagggggctcgttcagtactgattggcgctgagaaaaggactgactcattcagtcgttgggtctgttcactggtcgaacgcagaggatactggcgcgctgttgtggccatcgccgccaaaaatgcaaggctgtgctgggcatcattgcattacggtgatgatttcaggctgtattcagccagctaaagcaggaagaaaccgtatgaccatctgatctgcaactcgttgatgataaagggttagaccccgtgaggtatatctgattattgtacaggatatacgtatccgcttaacgaacaagagcctcacgcgcgtctttcatcagggtccgaatcgatagcgattcattatggccgtttatagtaccgcagtctctcccctttatttttaactgtagtgcagacacaaaccataaataccgacgttgactgttcggggaagcccttata

SEQ ID NO: 62 - DNA, 1321 bp, unidentified
  source 1..1321: mol_type = unassigned DNA; note = element_locus177259
ttaatgagatggtcactccctccttcccagtactatgctgaggacaggctttcattcggagaaccatcatggaaaacattgcgcttattggtatcgatctgggtaagaactctttccatattcattgtcaggatcatcgtgggaaggccgtttaccgtaaaaaattcacccgaccaaagctaatcgaatttctggcgacatgcccggcaacaaccatcgcgatggaagcctgtggcggttctcactttatggcacgcaagctggaagagttagggcattttccaaagctgatatcaccgcaatttgtccgcccattcgttaaaagcaacaaaaatgacttcgttgatgctgaagctatctgtgaagcagcatcacgtccatctatgcgtttcgtgcagcccagaaccgaatctcagcaggcaatgcgagctctgcatcgtgtccgtgaatccctggttcaggataaggtgaaaacaactaatcagatgcatgcttttctgctggaatttggtatcagcgttccgcgaggtgctgccgttattagtcgactgagtacccttcttgaggacagtagtttgcctctttatctcagccagttactgctgaaattacaacagcattatcactatcttgttgagcagattaaagatctggaatctcagttgaaacgaaagttggacgaagatgaggttggacagcgcttgctgagtattccctgcgttggaacgctgactgccagtactatttcaactgagattggcgacgggaagcagtacgccagcagccgtgactttgcggcggcaacagggctggtaccccgacagtacagcacgggaggtcggacgacattgttagggattagcaagcggggcaacaaaagatccgaactttgttggttcagtgtgcgggtattcatacaaaactggaacaccagtctggcaagttggccgactgggtcagggagttgttgtgtcggaaaagcaactttgtcgtcacctgtgctctggcaaacaagctggccagaatagcggcactgacggcgcgacagcaaacttacgaagcataaaggcagaaatacaccagtttaaacaatcattcatctggttttgcgaatactgatattgatgatactaacggcccaccggcctgttgaggaacctgtaaaacggaaaggctcattgaagccgtatattttctggaggttcatcaggcgcggaactcatcgaggcgcgggaataaaatcccattcagacgccggatagattcaagcaagccaacttgtcgtcaaaatcggtgttgcaaaaacgggagtgaccataga

SEQ ID NO: 63 - DNA, 1378 bp, unidentified
  source 1..1378: mol_type = unassigned DNA; note = element_locus47056
cttgtatgtaatcaacgagcgatgattagctaccatcgcatgaagcggagagaacctaccccatcatctaaggtaataaccttcgtcaacagctatagtcctctgcttcacctttcacgccagcattaacattgaacggttgccaagagctaagactctgcatgaacaagacaaattggcgtgatggttatgtgaaaggagaaaaaatgccgatgtaccagttaggtattgatgtcagtaaaaacactcttgatctatgcctcttacgggagggcatcaaagggaggatcaaaactcgtaagctaaaaaatactgctgatgcggctaaagtcgtggcagagtggcttaaaaagcaatcctgtgaactgggcgaagttcatatcatcatggaagccactggggtatatcatgaacctctggcttatggccttcactttgctggcgccagaatttctttagccaatcctcaccgcacaagggaatttgccagaggtatgaatatcctgaccaagaatgacaaagttgatgcctggatgctggcttgttatggctcccttaaagagcctgaggcatggactccaccaccagaatctgtgcggtatcttagagctcttttacgccgcagagacgctcttgttgcagacagcaccagagaaaaaaacagacttgaaaaatctgtttttacagacagccctgatgccgtcagggcgtcaattgaaaacatgcttcaggagctgagcaatgagatcgaacatcttgatgtcctgatccaggaacatattaaaactcaccctgagctcaaccaggatttcagactgttaacatcaataaaatctgttggttacctgctgggattaaatatgctggcaatactcaaaagccattcattcgaatcagcagagcaggcagcagcattccttggtgtagttccggtagaaaggagatctggcacatctgtaaagggaaaacctaaattatctaaaattggaccaccggagataagaacaaaactttatcttgccgctttatgtgggctgagattcaaccctgtaatgaaacagatgtatacgaagttatgccagaggggaaagtcaaagatgtgtgctattggagcattaatgcgaaaacttgtgcactggtgctatggtgtgctgaaaacgcagttaccattcgacgctgaatacaaccaacaaagttattataaaacaatattttaatcaacaccatcggagcaatactgaagcaacatgtttgtatctttttccttctatcatggtatttaactgagcatctgctctttttataaaaactcagagaaaatttctcctgaaaatggaatgttcaaacatcacataattttcttgactaaacacggtag

SEQ ID NO: 64 - DNA, 1302 bp, unidentified
  source 1..1302: mol_type = unassigned DNA; note = element_locus31940
cccccgttactttattcgtaccccttataatggggtgttagccagccagacccggcatgattactgcccccagtcgtccatgatccggggggtgatgtcaccgggtctggtggggcgctggtaaccgctaataggggtcaggtcaggcacttttgccgggaccgtctgtaacgtggatgtcggtacctgctccccgtggttatctggttaacccatatacaagggagacagaatgaccgaatccagcgattacgaatccgtctaggtctttatcggcgttgatgtcggtaaagatacgcatcacgctgttgcccgctcagaaggagtccttgtcggatacctccctggactggccatgcgccgcatagccgacttacacgccgatgaagctaaaactgatgctcgtgacgctgccatcattgccgaagctgcccgtaccctgcctcgcgcgctacgcacgctgaaactggctgacgagcaaatcgccgaactctccatgctctgcggcttcgatgatgatcttgccgcacagacaacgcaggccagcaaccgtatccgcggccttctgacccagatacatccggcactggagcgcgttctcggtccgagacttgctcacccggcggtactcgatcttctccagcgatatccctcaccagaaaaactcgcttcgctgggtgagaagaagctggcagcccagctctgcaaacttgcgcctcgtctgggtaaacgccttgcagcagacatagctcaggcactggccgaacaaaccgtcgtcgttcccggcacgaatgccgctgccgtagtactgccacgtctggcactccaactcatcacgctgcgtaagcaaagagacgaggtggcgcttgaggtagaacagcgagttcttgctcaccctctttacccggtcctgaccagtatgcccggagtcggtgtcaggaccgcagccagactcctcaccgaggtcgcctgccgcgccttcgcctctgccgcacatctcgctgcttatgctggccttgcgccggtaactcggcgatccggctcgtcaatacgcggtgagcatccctcgcgacggggtaataaagctctcaaacgggcgttgttcctgtcggccttcgccgcgctcagggatccgatctccagggcttactacacccgcaaaatgagtcagggaaaacgacacaatcaggcgcttatcgccctggcgagacgacgctgcgacgttctgttcgccatgatgcgcgacgggactttttataccccgcaggcgtcataacatgcttgacaacttaataggggccc

SEQ ID NO: 65 - DNA, 1606 bp, unidentified
  source 1..1606: mol_type = unassigned DNA; note = element_locus65800
ctactacaatatatttatggttaatatcccttacatccagtaaggaattatccatcttgttgcttaagctgttagaatgtaggtagcaattggatatctttttcttccttggacttcgcgtccgtaaaacagactgataaccagttcctcattcgcagcgttcgttttatgcaggttgaatcaccttaggtgcattcgtgtcacaccacagtagattgaataggcaatgagtaaaactggtacttatccattgcaataatcttaaggagtgacaatttatgaacgcagtaggtatcgatgtttctaaaagtaaaagtgtggttgctattatgcggcctttcggtgaaattgtttccacacctttcgaaatcaaacacacagccagcgatatccattcacttatagaactcatcaactctgttgaaggtgagtctcgaatcgtaatggagcacacaggacgttattatgaagtcctcgctcatcagcttttggaggcaaatcttttcgtcagtgccattaacccaaaacttatcaaagactttgataatgattctcttcgtaaagtgaaatctgacaaagcggatgctgttaagattgcccgatatgctcttgacaaatggcaaaaccttaaacagtataatgttatggatgaattacgcaatcagctcaaaaccatgaatcgccagttcggcttttacatgaagcataagacagctatgaaaaataatcttatcggcatccttgaccaaacctatcctggtgttaatacttactttgacagtcctgcacgcagtgacggcagccagaaatgggttgattttgcatctacatactggcatgtggactgtgtccgtaaaatgtccctgaatgcctttatcgaccattatcaaaactggtgcaaacgcaagaagtacaacttcagccaatccaaagctgaggaaatctatggaaaagcaaaggaacttgttcctgtacttccaaaggatgccattacaaagcttattattaagcaggctgtagaccagcttaatagtgcctctacaactgttgagtcactacgcactctcatgaatgaaactgcatccaaactcccggagtatcctgtcgttatggctatgaaaggtgttggaacttcacttggtcctcagttgatggctgagattggaaatgtttcccgtttcactcacaaaagtgctattactgcatttgccggtgtagatcccggtgttaatgaatcgggaagttatgaacaaaaaagtgttccaacttccaaacgaggctccgctgatcttagaaagactttatttcaggtaatggatgtcctgattaaaacgcatcctcaagatgatcctgtttatcagttcttagataagaaacgtgctcaaggcaagccttactatgtctatatgactgcaggtgccaacaagtttctaagaatctactacggacgagtgaaagaatatctcgcatctcttccagagtcttaattatccaccaaaattttcagaccagcactggcgtggtggtctaattttgatacccaattttcaacctgtataaatttttcaatattctttcaatttagccttgactttttatttgcagg

SEQ ID NO: 66 - DNA, 1457 bp, unidentified
  source 1..1457: mol_type = unassigned DNA; note = element_locus181296
gaatgaaagggacttcccccgtcccgaggctgcggtggaagccgcgaattggtatcacagtgccatgatggagtctcgaaccttcatcaacaccaacaagaggggaagtccatgcctgttgtcaccgtgggaatcgatctggccaagaacgtgtttgcgattcacggagtggacgagtccggcaaggttgtgctggttaggccgcgcgtcatgcgggaccaactcatcttgctcatcgcccagctgccgccttgcctcatcggcatggaagcctgttccggcgcccatcactgggcccgcctgttccagcaatatggccacaccgtgaagctgatggcgccgaagctcgtggcaccgtaccgtatgtcgggcaagcgcagcaagaacgacgcggcggacgcagcggcgatctgtgaggcggttacacgtccgagcatgcgcttcgtgccgctgaaggacgaacaccagcaggcgacactctgcctgcatcgaacgcggcagggctttgtcgacgaacggaccgcaatctacaaccggatacgtggcctgctttctgaattcggcgtggtgctgccgcaaagcccggagcgtctgcgaagagagatcacagtccatctcgattctttacccagttgggccaatcgctgtatcagcgatctgcttgagcacgcaggcaacatcgaggcccggcttgccgaatacgaccgcgcgattcgccaaattgcgcgcgatgacgaacgtagccggcggcttatgcagttgcgcggtatcggcccgaccacggcgagcgcactgcttgcgagcctcggtgccggacatgacttcaaaaatggtcgccaggtaggcgcgtggctcggattgacgccggggcagcatagcagcggcggcaagcagcggcttggcagcatcacgaaggcgggcgacgcctacctgcgctgtctgctggtgaacggtgcgcgcgccgtcatcgcgaatctcggcgagaagcaggaccgcttcagccgttgggtgagaagcctcgttgagcggcgcggatattggcgcgcggccgtggcgatcgcagccaagaatgcgcgaatggcgtgggcggtcctcaagtacggcgacgacttcaagcacgagccagccgccgcgtgagctccacggatgtgttcatcaaccgcataccgataagaagcaacggtaccatgagcgaataaacgatcactttgcactgccagcggtgatgtgaagcgggttggacctgcgcgaggcatacctgataaggctacagggatttcattcccggtcagcgaacgaggcccttgcgcgcgtctttcatcagggtccgggccgtcagcccaacatgaccggttgtagtaccgcagtccttcaccttctcacacgacgtcggcaaggcaacattgcgacaacagaaaaccacatttgtgcttgcgctcaatggggaagcccttgta

SEQ ID NO: 67 - DNA, 1160 bp, unidentified
  source 1..1160: mol_type = unassigned DNA; note = element_IS1000B
catgtatcttgccccctgagggaggccccaccgccccggttgccgggccaccacgcccgcgggattgatcggtagccacccaccccggcctccccgccgcacagtatcccggtcgtcaaagaccgcatccacatggaaggcccacagggtcgggtggccacctccctcaggttaccaaaaggagagagcccatgaccttcgccggcattgacgtcagcaaaacccacctggacctggccctcgtctccaactcccccaaacccacccgcctccgcttccccaactcccctgaaggccgtcaagccctcctcgccgccctcgcccaccacaaccccgcctgggtcgccctggagcccaccagcgcctaccacctccccctcctcaagctcctggcagaaaaccgcctccaggtggccctggtcaacccctaccacctcgccgccttccgcaaggccaagggagaacgccagaagaccgaccgccaagacgccctcctcctcgcccgctacgcccaggtctaccacgaagacctccgggcctacaccctacccccagaaaccctccgggagctcaaagccctggtgggctaccgggaggacttggccgggcgggaaaggaccatcctcaaccagatggaggcggcggagtgggcggggagcaaggaggtcctcgccctcctccagaaggagctggcctgcgtgaaggggcttctcggggaggtggaggccaggatccaggccctcctcgccaccctccccgaggccgaggtcctgatggccctgcccggggtggggccccaggtggcggcagcggtgctggccctcctgcccccagagctctggggccgggcgaagagggcggcctcctacgcggggctcatccccgagcgggaggagtcgggaaagagcgtggagaggagtcggctctccaaaaaagggcctcccctcctgcggcgaaagctctacatgggcgccctggtggcggtgcgccatgacccggagatgcgggccttctaccaccgcctgctctcgcggggaaagagaaagaagcaggcgttggtggccgtggcccacaagctcctcaggcggatgatgggaaggctcagggagtactacgcgacccagctagatcaaggggtcgcttgacaggcaagacagtat

SEQ ID NO: 68 - DNA, 1374 bp, unidentified
  source 1..1374: mol_type = unassigned DNA; note = element_IS1111A
caatgaaatggacccaccccttaaagacggcgtcataatgcgccaacatagaatttctattttcaaaaaaaggagaaggtccatgaaagatattaaaatactgggtgttgatattgcaaaagatgtttttcaactgtgtggaattgatgagtggggtaaagtgatctacacgagacgggttaagcgtgctcagtatgtatccaccgtagccagtcttaaggtgggctgcgtggtgatggaagcgtgtggaggagcgaaccattggtatcggacgtttatggggatgggtatcccaacgcagttgatcagtccgcagcacgtcaaaccgtatgtcaaaagtaacaagaatgatcgtaacgatgcgcaggcgatagctgaagcggcttcccgcgcctcgatgcggtttgtgcagggtaaaacggtggaacaacaagacgttcaagcgctgttaaagatacgcgatcgtttagtcaaaagccgcacggcgctgatcaatgagattcgggggttgttgcaagaatacggactcacgatggcgcgtggtgccaagcgattttatgaagagctcccgttgattttagcgagcgaagcggtgggattaacaccgcggatgaaacgggtgttgaattgtttgtataccgaattgttgaaccgggacgaagcgattggtgattacgaggaggaattaaaagcggtggcaaaagccaatgaggattgtcaacgggtacagagcatcccgggggtgggttatttaacggcgctctcggtttatgcgagcgtgggtgacattcatcaatttcatcgttcccggcagttgtcggcgtttattgggttggtccctcgacaacattcgagtgggaataaggaggtgttgttggggattagtaaacgcggcaatgtgatgttaaggacgttattgattcatggcgcccgtgcgctattgcgtcatgtaaaaaataaaacggataaaaagagtctgtggttaaaagcactcattgagcgccgcggaatgaatcgcgcttgtgtggcgttagcgaataaaaatgcgccgatcatttgggcgcttttaacacgccaagaaacgtatcgctgtggcgcctaaacaccgccgtgggtaaaaaaaagaattaacaaaaggagacacaccaaccgagttcgaaacaatgagggctgatgaaagtaaggtaaaacctgaggttgattaagctgattcatacggtggctctgtgaagccgatagcccgataagcatcaaccttgcataattcatcaaggcaccaatggtggccaatttaaatcgtgatgccggatatacgaatgcaaccgctttcttttcatcaaaactgattgttgacaacaagggtgggtccatata

SEQ ID NO: 69 - DNA, 1345 bp, unidentified
  source 1..1345: mol_type = unassigned DNA; note = element_IS1328
ttaatgagatggtcacccccaccctgtgagcggtaagctgacagggttttctttttggagggatcatcatgcaaaacgttacgctcatcggcatcgaccttggtaagaattcattccatattcattgccaggaaaaacacggcaacacattattacgcaagaggttttcccgcattcaactcacccagtttctcgccacctgcccgccttgcattgtcgcgatggagtcctgtgccggggcgcattttatggcccgtcatatcagccagttagggcatcaggtcaaactcatttctccgcagtttgtccgaccctttgttaaaagtaataaaaatgatttcatcgacgctgaggccatatgcgaagccacttcccgtccctccatgcactttgtgacacccagaaccgaagaccagcaggccatgtcggctctgcatcgtgtccgcgatgcactggtgagggagcgggtcaaagccaccaaccaaatgcatgcttttttacttgagtttggcataagcatgccacgcggtattgcggtgataaaacgactggcgactgtgcctgaggagcacgagctaccgccttatttggtgcgactgctcacccgacttcatcagcattatggctatctctgtgaacagatcgaagaaatcgaaagagagttaaaaaaccatctggccgatgatgaaacagcacaacgcctgctcaccattcccggtatcgggacaatcactgccagtttgctcgccaccaaactgggagatgggaaaaactacctcagcagccgggattttgctgcgtcaacgggattagtaccccgccaatacagtaccggcgggaaaagtaccctgatgggcatcagcaagcggggggataaaaatctgagacggctactggtgcagtgcgcgcgggtctatatgcaacggctggagtatcagtcaggacgactggcggagtgggttaatgggcaactgacacgacatcactcgaatgtggtggcctgcgcattagcgaacaaactggcgcgaatagcctgggtagtcaccacacaaggaaccgtcttcagtaaataaaagagccaacagtaaatctactgtcagctcaatgagttaccaagtgactttctggttttgcgacgactgattattgatgacatgaacggcacagcggcctgatgatgaacctgacacaaaaaatggctctttgaagccgacgggttttttaaggttcatcaggtgcggaactcatcatggcgcggacatttttgtccaccagacgccgaatagatttaagcaagcccatcataaatcaaaatcggtgttgcaaaaacgggggtgaccataga

SEQ ID NO: 70 - DNA, 1423 bp, unidentified
  source 1..1423: mol_type = unassigned DNA; note = element_IS1383
agatggtatggacgcctccccccggcagcgggccgaccgcagcacctctacatcaatagaggatcctcgctgccccggcatctaggtgccaaagtggagagtggataacaaacaccacttgagcaggaggatccaccatgaaacatagcgtaattggcatggacatcgccaagaaggttttccagctgcacaccgttgatcagtgcactgggaggatcgagcgtatcaagctgcgccgtgatgaagtgctggcgttctttgcaaattatccgaccagcctggtggcaatcgaggcctgtggcagtgcccactggtgggcacgtcagcttcaacagcaggggcatgaggtacgactactcgcccctcgttcagtacgcccctttgtgctgcgaaacaaaaccgatgcggctgacgctcaagccatctggacagcggtgcagcagcccggcgcttgcctggtggcaatcaagcaggcggatcagcaggcgatcctctcgctacaccgtatccgctcccagttgctgaaatttcgcatcatgcagagcaatggcttacgtgggctgctttacgaattcggaatcgtgctgccagaaggttatacccagctgagcaaggccgttccggaggccttcgccgatgctgagcatcgagtgccttccatgttgttggacagcctacgcgatcagtggactcggattatccagttggatgaggaaattcgaaaaatcgaactgcgtttgaaacagtgcctgcgtgagagctccgactgccagaaaattgcagagattcccggaattggtttgttgaccgctacagccgctgttgcctcactgggagatgcgacaaccttccattctggtcgccagttcgcggcttggctgggactggttcctcgacaaacgggcaccggtggcagagttcggcaactggggctgagcaagcgcggagacacctatctgcgaacgctgttgatgcatggtgctcgctcgatcctcaatagaggacaccggtcagagtgggttgaacgcttgttgaccaggcggccttataacgtggcggtcgccgcagtggctaacaagctcgccagaaccctttgggccgtgttggccaagggctctacgtatcgggccgaactctttacggcatgccctacggggcattgaaaacagtaaccaacagacttcacaaggagcacaggcggtaagcacgtgatggcgaaataggtcagaccgtgacggggtaaacctggtagggaatatgagccacgggcacagccttcagctcgattttcagatgagggcctcgtcagcggattccatcagggccagcaggtttttcggcctgcacaacaggccggatataagactgctcctacctacgcgccagcatggctacctattgagctccgggaggcgtccatata

SEQ ID NO: 71 - DNA, 1459 bp, unidentified
  source 1..1459: mol_type = unassigned DNA; note = element_IS1492
gaatgaaagggacttccccgtccaagtccgcggcgaaagtcgcgaggcggcatcaaggtgccatgatgaagtttcataactgcatcaattactggaggggaagccaatgtcagttatcacggtgggaatcgatttagccaagacggtgttcgccgttcacggcgtcaatgaggctggcaaagccatattggtgaaaccgaaggttgcgcgtgatcagttggtgccattgatcgcgcagttaccgccgtgtttgattggtatggaggcttgctcaggggcgcaccactgggcgagggtgtttgttcagcacggacatactgtcaggttgatggctcctaaactcgttgctccttatcggatgtcaggtaagcgcggtaagaatgatgcagcagatgctgctgcaatctgtgaggcagtgacccgacccagcatgcggttcgtacccgtcaaggacgagcatcaacaggcgactctttgccttcatcgcactcggcagggatttatcgaagagcgcacagctacttacaaccgactgcggggattactttctgaatttggggtggtcctgccgcaaagcccagagcgattgagaagagagattggcccttatctggacagcttgcctggctgggcaaaacggtgcatgagtgaactgttagagcacaccagccatatcgaggaccgcttggtagagcttgatcgagcaatcagccagattgctcgtgaagatgatcgtagccgtaggttgctgcaattgcgcggggttggctcgaccacggcgagtgccttggttgccagtattggggatgggcacgacttcagaaatggtcgccaagtggctgcatggctcggactgacgccaggtcagtacagtagcggtggaaagcagcgtttggggagtatcaccaaagccggggatgcctatttacggagtctactggtgctcggggctcgatctgtaatggccaacctgggcgataaacaagatacattcagtcgctggatccgcaatctgattgaacgtcgcggttactggcgtgcggccgtcgcgattgccgccaagaatgcaaggatggcctgggccgtcctgcattacggcgacacgttcaagcttgagcaggtagaaccaactggtgcgtaggccctggcttcctattgctcaacttttaaggcgtcagggtagaaccatgagcagataaaaagaggatcaatgtgcactgccgtcgttgatgtgaagcgggttggacctacgtggggtatacctgaaaatcgtatggggaattcagtcccggttagcgaacgaggtcctcacgtgcgtctttcatcagggtccgagccatcagctcaatatgaccgtttgtagtaccgcagtccttcaccttcttacgtcgatccggcacgcgcagcagtagacaactaaatcgctattgcgcttgcgctcaatggggaagcccttgta

SEQ ID NO: 72 - DNA, 1415 bp, unidentified
  source 1..1415: mol_type = unassigned DNA; note = element_IS2112
ctccgtaagttgttagttggtccggaagtgctgggtgtggctgatggtgtcttgccttgtgtggctcgaaacgagtggccgcccagcgcttcgggacgccctggctgctgattgaaaaatgtgcttcgagcactgtttacggagatgacggtggggtgttcctcgggcctgacacgagtcggcgacatggaggagcgaatgagagaaactcacacccacgcatgggtcggaatcgacgcaggcaagggccatcattgggcagcagtggtcgacgaagcagggttgatcgtgtggtcgcacaagatcatcaacgacgagaccgcgatactgcacgcgctgagcgagattctggccttggccgacgaactccattgggcggtagatatttccggaacctcctctgcgttgctgctcgctcttctcgccgcacacgaccagagtgcggtgtacgtccctggtcgcaccgtcaacaggatgtccggcgcgtatcgaggggaggcgaaaaccgatgcccgcgatgcctatgtgatcgcggaaactgctcgacaccgacatgatctgtctgtgttgatcccaccggctcagttggccgcggaactcgcgctgttgacctcgcatcggaccgatctcgtcgctgaccgagtccggctgatcaaccgtctgcgtgacactctcaccggtgtctttcctgcgctcgagcgggctttcgacttcgggcgacacaagggcgcgttggtgttgttgaccggttttcagaccccgcgtgccattcggcgacgcggacgcactcgcttgagcttgtggcttggtaaacgtggggtgcgcggggcggacggtgtcgccgagattgcgtgggaggcggcgtctgcgcagaatgtggtcctgcctggtgaggctgttgcggcgcagttggtggccgatatcgccgaccgagtcctcgcagtggacgtccagctcgctcgtatcgacgcgcagatcggtgagaccttccgccgccatccgcaggctgcggtcatcgaatccatgcccggtatcggtccgatcctcggcgcggaattcgttgtcgctgccggtgatatgtcggcgtactccgatgccggacaccttgcctcggcagccggtttggttccggtcccccgcgattccggtcgccgaaccggcaacatgcaccgacccaaacgctacagccggcggctgcggcgggtcttctacctctccgctcaaacctcgatcatcaaagatggaccgaatcgcgagttctacctcaagaaacgaagtgaaggaatgaggcacgttcaagcggtaatcgccttggcgcgtcgacgagtgaacgtgatctgggcattgttgcgcgacgaccggctgttcatcgttgatgcacccgctcttcgaactgcttgatttcctcattgaaa

SEQ ID NO: 73 - DNA, 1363 bp, unidentified
  source 1..1363: mol_type = unassigned DNA; note = element_IS5708
gaatggaagggacttcccctagatatgcgcctgattaactttcgtgcaatcataggataaacattgacccagagggattcgttatgaccatcaccactgtcggtatcgatcttgctaaaaatgtgtttgctgttcactgcattgaccaaaatggtaaagctgttctggttaaacccaaggtgtcgcgtgcagcactttctgaactcatcgcaggtttacctccctgtgtcattggaatggaagcctgctcgggtgcccactattgggcaagattattcaggcagtatggccatgatgtccggttgatggctccgaaatttgtctcaccctatcgcatggcgggtaagaccgggaaaaatgatgcagctgatgcaatagctatttgtgaggcagtgcagcggccgcatatgcgctttgtaccagtcaaagacgaaagccagcaggcaatgcaatgcttacatcggacaagacagggatttatccaggaaagaacagcaacgtataaccgtcttcggggcctgatatctgaattcggggttattgccccacaaagcactgatgctctgcgtcatgttgtttctgaccagaaggaaactctgccagtacaggttaggctgtgcattgatgatctattgacacatgtcactaatattgaagagaaaatcgccgaatatgacagggtattatctcgtgtggccaaaacagatcatcgcagccagcagttaatggaactgaaaggtgttgggcccaccacagcgagtgcgctggtcgccagtattggcaatgcccatgattttaagaacgggcgccaactggcagcctggttggggctaacgccatcacaatacagtagtggcggaaaatcaaagcttggcaggataacaaaagcgggtgatgcctatctgcgaaccctactggtccagggagcccgttctgtaatggtaggggcagagaatagaacggacccgtttagccgttgggtctgctcgttgattggtaggcggggatactggcgtgctgtcgttgcaatcgccgccaagaatgcgaggttgtgctgggcatcattacattacggcgatgacttcagactgtattcaacaacatgaaaaatttaactgagtagtaactgaactgtaaattgttgatggtaaagggttagacccccgtgagaagtatctgcatatcctactggatatcactatccgattaacgaaggaggatctcacgagcgtctttcatcagggtccgaatcactagcgattcagcatgaccgtttatagtagcgcagtcttatcccttgcctttcattgatgaacagacagaaattaaaaaccggcgttgactgttcggggaagcccttata

SEQ ID NO: 74 - DNA, 1434 bp, unidentified
  source 1..1434: mol_type = unassigned DNA; note = element_IS884
attgaaatgaacgcgtcccacccgtgggcggtggggtcaagggatcttgaggtcgatcctcacgggccaacgacatcgaagtgtccaagtgggaagatgtacacatttcccggcaaccggaggatcgtgaaatgaattctatggccgtgggtgtggatatcgcgaagacggtgtttcaggtgcactacatcgaccaggcaacgggcgagatcgtgaacaagcagatcaagcgagccaagttcctcgagcactttgcgaaccgtgctccctgcctaatcggaatggaggcgtgcggcggtgcacaccattgggcgaggcagctgacgaagatgggtcaccaggtgaggctgatgccagcagagttcgtgaaggcgttcaacatccgcaataagaatgatgcagcggatgcccgggcgatctggctggcggtccagcagcccagcaaggcggttgcggtgaagaccgagatgcagcaggcaatgctggccctgcaccgtatgcgtgagcaactggtgaagttccgcaccatgcagatcaacgcattgcgcggtctgctaacggagtacggcgaagtgatgggcaaaggccggacagccttggataaggcgataccggaagtgctcgcccgggttgccgagcgcttgccggcggcgctggtcgagacattgcgcgagcagtggagtggcctcacgaagctggacgaacagatagccggcattgagcggcgaatgcgcgactgggtcaaagaggacaaggctgtgaaggcgatcagcgagatccctggcgtgggactgctgacggcgacagcaacggtcgcgatgatgggcgatgcgaaaacattccggtcagggcgggagtttgccgcgtgggcaggcctggtgccgaagcaaaccggatcgggcggaaaggtgaatctgcacgggatcagcaaaagaggcgatacgtatctgcgtacgctcttgatccacggtgcgcgcagcgtcgtgacgcgtgctaaggatcccggtccctgggtggagcaaatgacaaagcggcggcctttgaatgtcgtggtcgttgcgctggccaacaagatggcgcgcatgatatgggcgattctggcccatgaccggccgtaccagaaggattacatcagcgtgaagccggcttgagcggtaagcgccacgttggagattagcgttcttacagggtgaaacgtcgaaggttgcgttggtaatcgagtgtgatgacaagtcaggtaggaccgggacctgctaagcctgtggggtaatacgagccttgagctcgcagtacgaatgaggcgcgggtcagcgtatttcataggggccagcagcggcgataccggctgcaagagggccgaatatagagctgcagcccatcctgtcagtgtctgaacaagcgaaaacctggcgcaaacgggacgcgttcatatag

SEQ ID NO: 75 - DNA, 1452 bp, unidentified
  source 1..1452: mol_type = unassigned DNA; note = element_IS900
atccttacctttcttgaagggtgttcggggccgtcggccttaggcttcgaattgcccagggacgtcgggtatggctttcatgtggttgctgtgttggatggccgaaggagattggccgcccggcgtcccgcgacgactcgaccgctaattgagagatgcgattggatcgctgtgtaaggacacgtcggcgtggtcgtctgctgggttgatctggacaatgacggttacggaggtggttgtggcacaacctgtctgggcgggcgtggacgccggtaaggccgaccattactgcatggttattaacgacgacgcgcagcgattgctctcgcagcgggtggccaacgacgaggccgcgctgctggagttgattgcggcggtgacgacgttggccgatggaggcgaggtcacgtgggcgatcgacctcaacgccggcggcgccgcgttgctgatcgccttgctcatcgctgccgggcagcggctgctttatattcccgggcgcacggtccatcacgccgcgggtagttaccgcggcgaaggcaagaccgacgccaaagacgctgcgatcatcgccgatcaggcccggatgcgccacgacttgcagcctctgcgcgccggcgatgacatcgcagtcgagctgcgcatcctgaccagccgacgttccgatctggtggctgatcggacccgggcgatcaaccgaatgcgcgcccagctgctggaatactttccggcgctggaacgcgccttcgactacaacaagagccgtgccgcgctgatcctgcttactggctaccaaactcccgacgcgctgcgcagcgccggtggcgctcgagtagccgcgttcttgcgtaaacgcaaggcccgcaacgccgataccgtcgcagccaccgcgctgcaggccgctaacgcccaacacagcatcgtgcccggccaacaactggcggccactgtggtggcccgcctggccaaggaggtgatggccctcgacaccgaaatcggcgacaccgacgcgatgatcgaggagcgatttcgccgccaccgccacgccgaaatcatcctgagcatgcccggattcggcgtcatcctgggcgctgagttcctcgccgccaccggcggggacatggccgcattcgcctccgccgaccgcctcgccggcgtcgccggcctggcgccggtaccacgagattccggccgcatcagcggaaacctcaaacgcccccgacgctacgaccggcgcctgctgcgcgcctgctacctgtcggccttggtcagcatccgcaccgacccctcctcgcgcacctactacgaccgaaaacgcaccgaaggaaaacgccacacccaagccgtcctcgccctggcccgccgccgcctcaacgtcctgtgggccatgctgcgcgaccacgctgtctaccaccccgcaaccactaccgcggcggcttgacaacgtcattgaga

SEQ ID NO: 76 - DNA, 1472 bp, unidentified
  source 1..1472: mol_type = unassigned DNA; note = element_IS902
tccttagggttgaaggggtctgggattggatgtcctggatgcccaggacggtggggtgtggctaatgtgttgttgcaacggttgttgcttgaaaggaatggccgccctgccgttttggacggtcctggccactgattgagatctgacgcgtactcgatgacgctgctctaaggacctgttggcggggttgtccgcggggactgcgacgacaggagtagcggtatggccgaacccgaccgagtgtgggtgggtatcgacgtcggtaagtccactcatcatgcgtgcgcgatcgatgacaccggaaaggtggtgtggtcgaagaaaatcccgaacgaacaggccgcgatcgaagacctgatcgcccagggcggccggattgctaaccacgtggtgtgggcgatcgatttgacctcgccgccggcggcgctgctgatcgccgtactgctgagcgcgaaagccgaggtggtgtatgtgccgggccgcacggttaacacgatgagtcatgcgttccgcggcgaaggcaagaccgacgccaaagacgcgcgggtaatcgccgaaaccgctcggcaccgacgagatctgtccccggtcgtacccggcgaagacctggttgccgaattgcggtcgctgaccgcataccggtcggatctgatggctgactgggtgcgaggcgtgaaccggctgcgctcgatgctcaccgccatcttccctgctctggaagctgcgttcgactactccacccgcgcgccgttgatcctggtatccgctatgtgcactccgggcgaaatccggtcggcaaaaagagctggcgtgatcaagcaccttcggaaaaaccgggcatggcccaacaacatcgacacgatcgccgacaaggcgctcgccgcggcagcaggccagataatcacccttcccggcgaagccggaaccgccgcgctcatcaagcaactcgcagcacggctgctggacttggatcggcagatcaaggacatcgataagcaaatcaccaacaaatttcgtgagcatcccagcgccgccatcatcgagtcgatgcccggcatggggccacacctgggcgctgagttcctcgtaatcaccggcggcaacatggccgccttcaccaaccccggccgactggcatcgttcgccggattggtacccgtcccacgcgattccggccgtatcaccggcaatctgcatcggcccaagcgctacaaccggcgcctgcgccgcgtgttctacctcgccgccctgtccagcctcaagatcgaaggtccctcgcgggctttctacgaccgcaaacgatccgagaaccatatccacacccaggccctgcttgccctggcacgccgccacgtcgacgtcctgtgggcactgctgcgcgacaacagaacctggcaaccccagcaaccaaccgtggcagctgcctgacgcactcaccgggcgtcctcaccgcttgacacgctcattgagat

SEQ ID NO: 77 - DNA, 1463 bp, unidentified
  source 1..1463: mol_type = unassigned DNA; note = element_ISAar2
cgttatgttgttgacagctccttaactccgaggaatataggagctgtcggccgaccaatctcggcatggtgtcttgcccctgcttatccaatagtccggggggtgttgccaccgagattgggatggcagcgaggtgattgctaattaggggcgcggcgccaaaatggacgcctgtcataacgtggatgtaagactttgctaccgacggttggtcgaccttgaacaaaaactagttcaaaggagcactagtcatgatcaccacagacatcgagattttcctcggcctggacgtcgggaaaaccgaccactgggcctgcgctgtcacccaagacggcaccaaaatctggaacaaaaccctacccaacgacgaagccaaactcaccgccgtgtatcagaagcttttagctctaggacatgtcttggtggtcgtggatcagccagccaccatcggcgccctggccgttgcggtcgctcagcacctcggcattccggtggcatacctgcctgggctctcgatgcggcgcatcgcagatatgtatcctgggacggcgaaaacagacgaaaaagatgcctttatcatcgcggatgcggcccgtaccatgccgcataccttgcgtagcatccaggtctctgacgaggacgaagccaccttaggcatgctcaccggtttcgacctggacctggcccgtcagatcactcagaccagcaaccggatccgcgggctattcacccagatccacccacccctggaacgagtgatcggaccttggctggagcatgatgctgttttggaggtcctcgccacctggcccaccccagcgcaactgaagcacgcgggcaaagcgcggatcgatgcgaagctgaaaaagcagggagcccgccgtcacactgcttgggccggagccatcatggatgcactggatgagcaaacagtggtcgtggtcggcaccgacgcagccggcctggtcctcccgcatctggcccgccagatgatctcgttgcatgctcagcgtgtggacgtggccacgcatttggaggcaatggtggaggcccaccctctttacccggtcctgacatccatgcccggggtcgccgtcaggaccgccgcgatcatcatcgccgagacctccggcaagaccttcgccagtgccgcatcactgtcctcttacgctgggcttgcgccaaacacgcgccagtctggcacctcgatcaagtccgagcgcgtcagccattcaggcaacaaacggctgaagcgagcgctcttcctctcggcgtttgcctcgatcaggttcgacccgaccagccgggcctactacgaccggaaacgtgctcaaggcaaacgccataaccaagcactcatcgcactggcccaccgacggctcacagtcctgttcgccatgatccgtgacgggtcactctatgacgtgccagagctgaaaatagcttgactttttacatagggg

SEQ ID NO: 78 - DNA, 1340 bp, unidentified
  source 1..1340: mol_type = unassigned DNA; note = element_ISAeca3
taatgagatggtcacccccaccctgtgagcggtacgctgacagggtgtttttctttcaggagaggccatcatggaaaacgttgcgcttattggtattgatctcggtaaacactcttttcacattcactgtcaagaccggttcggcaaggctcttcttcgcaagaagttcaaccggacaaagctcatcgaatccctcgcaacttttcctgtatgcaccatcgtcatggaggcatgtgccggagcccattacatggctcgtcggctggctgaatttgggcatgagagtaagctcatttcgcctcaattcgtgcgcccattcgtcaagagcaacaagaacgacttcatcgatgctgaagctatttgcgaggccgcctgccgtccctccatgcggtttgtaacgcccaagaccgaaagccagcaaacgttgggagcactgcatcgtgtgcgcgaatcgtttgtgcgcgatcgggttaaggcatcgaaccagatacacggctttttactcgaatttggcatcagtctgcccgtcggtcatgccgccatcaagcgcctgccttctgtgatggctgaacacgagttaccagcgcgactgattaccatgttggagaggctgcatgcccatttcaagtatctggagcagcaaattgccgagatcgacaaggaactggccagccagcttggcgatgacgatcttggtcagcgtctgatgacaatccctggtgtcggcccgatcactgccagcgtgttggccgccgagctcggtgacggaaaacactatcgatgtagtcgtgatttcgcggcgtcagtcggattggtgccacgccagtacagtactgggggccgggcaaacctgaagggtatcagcaagcgtggcgacaaaaatcttagacgattgttggtgcaatgtgcacgagcctatatgcaacggctagagcggcaaacgggacgattggctgattgggtcaggtctatgttgactcggcgacattcgaatgttgtggcttgtgcactagccaacaagttggcccgcacggcttgggcgctggcggcacggcataccgaatttcgggcaatgccaacctgacgcgcccctatttacttttgtactgacacacccacctggttttgcgactgtgatattggatgacgtgcacggcataccggcctgactgataacctggcaaaagaataggctttctaggccgagggtctttttaggacagtcaggcgcgattctcatcgtggcgcggagaacattctccatcaagacgccggatagatttaagcaagccaaccacaacacccgaaatcaaggttgcaaaaaagggggtgaccataga

SEQ ID NO: 79 - DNA, 1422 bp, unidentified
  source 1..1422: mol_type = unassigned DNA; note = element_ISAfe1
atgtaatggatgcctccccctacaggaccggcagcggggtgcttcagaagggagtccccgcttgatccggacggcatcaaggtgccaaggtggaaatttatccacgtaaaggacaaggaggactcgtcatgcaggttacaacatacggattggatttggcaaaaagggtcatgcaactgcactgggtaaacctggagaccggcgagattcaccgcaaacagttgaagcgccgtgcactcctggagtttttcgccaaccgccaaccgggaatcgtggcgatggaggcttgcggtagcgcccactattggggacgggaattgcgtaagctggggcatgaggtccgcttgattgctgcccagtttgtgcgtcccttcgtgaagaccaacaagaacgatgcggccgatgcggcagcgatctgggaagccgtacagcggcctgatatgcgcttcgtggcggtcaagagtgaggaacagcaatccgttctgtcgctgcaccgtatgcgggagcaattgatcaagatgcgcactatgcaggtgaaccagatccggggcctgctctacgaatttggtgctgatctgccgcagggccgccagcgggggctgaaagaggttcctgatgctttggccgacctggaaaaatcgatatcgcccatgctgcgggacacggttcgtcagcaattaaaacgtcttgaagagatggacaaggatattgcggatatcgaaaagcgtttgacgctgtggaagaaaggccaagaggccgtgactcgattgatggctatccccggcgtggggctacttacggcaactgccattatcgccaccgtgggagatatgaagtcctttcgttcaggacgggagtttgcggcgtttctggggctggttccccgccagagtgggaccggtggcaaggtccgattactggggatcagcaaacggggggatacctatctccgaacattgctgacccatggagccagggcggtggtgaacttccagatcaagaatcggaatccctggattgacaaactgctcagtcggcgaccccataatgtggtggtcgtggcacagtccaacaagatggcgcgaaccatctgggcgctgctggtgaaaaacacagaatatgtggccaatcacgctaggaatgcggccgccctatagtaacagttacaggattgttgacgttcagcaaaaggagttgcgcaggcggtacacgattgatggcaaaacaggtcagaccgcaggaaagggaacctggaagctctctgtcctaataaggacgctttagagatgaggactttcctggcggatttcatcagggccagcaggcttaatgtcctgcatcaaaggccggatataagactgcaacccgacctcaacatgtcagacatcgcaatcctcttgcacacatggaggcatccatata

SEQ ID NO: 80 - DNA, 1155 bp, unidentified
  source 1..1155: mol_type = unassigned DNA; note = element_ISAli16
cttgtgtctttgaattttgctagagaagaagccctggggggtggggcatgccccaccccccagggtggagcggcacccgctaaccccttggccctggccggccgcggatgagcttgggaccgctccgccgtcttccacgcccgaacagttgcctggcacgaccgccgaacaggcaaggaagggatccgaagaatggcacttcttctcatgtttgtcggcatcgatgtgagcaaggatgctctcgatgtccatctcctgcccggcaacgcctcctggcgtacggacaacaccgagcagggttggaagcagttgatgacgtggctggaacgccacggcgagccggcccagatcaccgtcgccctggaggccagcggcggcttcgagaagggctgcgcccgcaagttcgccgaggcgggctatgccgtctccatcctcgatccggtgcgcgtgcgccgcttcgccgaggccgccggtcagttcgccaagaccgacgccatcgacgcccgcgtcatcgcccgcttcgcccagaccttcaccaccaccacggcggtcttcgaccaagccaccgagcggctggctgagactgtgcgctggcgccgccagctgatcgagcagaagaccgcgctggacaatcaactgcgtggcttgaccagcacctccctgcgccgtgccacgcgcggtctgctgacccggctcgaaacgctgatcgagcggatcagcgacgagatcgccaagcagatccaggccaatccggcctgggccgcgcttatcgagccgatccgctcgatcaagggagtcggcccggtcacggtcgccaccctgctggcggagttgcctgaactgggcaggctcgaccggcgaaaaatcgccgcgctggttggggtgtgcccctacacccgccaaagcggcaagagcgacgccaagcgcttgatccgcggagggcgccttggcctgcgcaacgcactctacatggccgcactcaccgccatgcgatacgatccgaccctcaaggccttctacgagcgcctccgagccgcaggaaagccgggaaaggtcgccgtcgtcgctgtcatccacaaaatgctgacaatcctcaacgctcgggtccgtgatgccctggcaaccactcccagcaacccatgaacaagacagttg

SEQ ID NO: 81 - DNA, 1461 bp, unidentified
  source 1..1461: mol_type = unassigned DNA; note = element_ISArsp5
cgttacctttttcgtagcccgttcctgttgcaggatgagggtgtgctggcctgccggccccggcaggattgccgcccccagtcttcaatgatccggggggtgttgtcaccggggtccggtaggtgccggagagaccgctaatagaggcaggacaggtggggatcgtcgtgcgtaacgtggatgccgggctctgacaccgcggacagtccagcactgggtatcagctgctgtgactgggaggtactggtgatcggaaaccacgaaagcattgatgtcttcatcggcctggacgtcggcaagggcgagcaccacgccgttgccgtggacagggccggtaagaaactcttcgacaaggctttgcccaacgacgaggcccggctgcgcgaaatcctcggctctttgaataggcacggcagtatcctgctcgtggttgaccagccggccacgatcggtgcactccccgtcgcggttgcccgggccgccggcgtcacagtcggatacctgcccgggctggcgatgcgccggatcgcggacctgcacccgggcgaagcgaaaaccgacgcgcgggacgcgttcatcatcgccgaagcggcccggaccatgccgcacacgttgcgctccatccagatcgctgacgaacagctcgcggaactgaccatgctctgcggcttcgatgacgacctggccaaacaggccaccgcgacatcgaaccggatccggggcctgctgacccagatccaccccgcactggagcgtgtccttggcccgcggttggaccacccggcactgttggatctgctgcggacctggccgacccccgacgccctccgccatgccggccggcgcaggatcgccagccggctcacaaagcttgcacccaggatgggtgaacgtctcgccgacgagatcatcaacgcactggaccaacaaacggtcaccgtcgtagggacaaacgctgccacgatcgtgctgccacagttggcgcggatgctcgccgacatccggcaggcccgcgacaccgttttcatccaggtcgaagccctcgtggaggcccaccctcttcacccggtcctgacgtcactcccggcggtcggcgtcaggaccgcagcacggatcctcaccgagatcgtcggcaaagacttcgcatctgccaggcatctggcctcctacgcaggcctcgcccccgtgacctggagatccggaacatccattcgcggagaccacccatcccggaagggaaacaagatcctcaaaagagccctcttcctctccgccttcgccgcgctgaaagatcctccgtcgagggcctactacgaccgcaagcgggccgaaggcaaacgtcacaaccaggctctaatcgctctggcccgccgccgctgcgacaccctctacgccatgctcagggacggcaccttctacgaaccacggctaccctcagccgcttgacgaaaaccatagagg

SEQ ID NO: 82 - DNA, 1404 bp, unidentified
  source 1..1404: mol_type = unassigned DNA; note = element_ISAs16
taatgggatggtcgcccctccccaaacggcatctaacgtgccaatgtggcaaagatattcccactgactgtagagaggcgaacgctatgaaaatcaccacgattggcatcgatttggccaaaaatgtcctgcaggttcatggcgtggatgagcgcggcaaagtgcttctgaaaaagcagctcaagcgggaccagatgatcactttctttgccaacttgcccgcctgtctgatcggcatggaagcttgtggtagcgcccatttctgggccaacaagctgcaaggtctggggcataccgtcaagctgatggcacctcaattcgtcaaaccctacgtcaaaacaaacaagaatgatgcccccgatgccgaggccatttacgaagcggtaacccggccaaccatgcgcttcgtgccgataaagagcagcgaacagttagccgtcctagccctgcatcgtgctaggcaggggttcgtcaaggccaggaccgcccaggccaaccagatccgaggacttttggcggaatatgggctcatcatcccccagggcatcacccacatcggccagcgtgttcccgaattcctggaggacagtgaaaactgcttgccagggacgtttcgcctgttgctgatgcgactccacgagcacctcaaggaactcaataagcaggtcaacgagctggaggaagcgagcgtacgctggcatcgagacagtgtcgccagccaaacattggcacagctacccggtataggtcctatcaccaccagcgccctggtggcctccattggcaatccgagaaatttccagaatggcaggcagttggccgcgtggctggggttggtgccacggcaacactccagcggtggcaagcagaccctgctggggatcagcaagcgcggcgacagctacttgcgcacactgttaattcatggcgctcgggcggtgctacgagtagcagaacacaaggagtcgtttgcaggaagctggttggccggggtgatggcacggcgcaaccctaacgtggcggcggtagcgcagacggctagaatcatctgggcattgctggcacacgacagaaaatatgatgctcacaatggcatggccgcatgaaaaacaggtttagtaagggcgggctgacagccctgcaacaagacggttggcaatgataatgaagcacagattgcgcaggcaatcatgaagtgatggcgagacaggtcagaccgtggctggcaaaacccggtgttaacacagcacgtcgttaagtgcgctgtaagtgatagaggagccagtcagcgaattccatcagggatagaggctgttgcctcggtgaaatccggatctatggctgcaatctccacctgactcactttcattgattgagggcttggcaaaccggggcgaccatcta

SEQ ID NO: 83 - DNA, 1386 bp, unidentified
  source 1..1386: mol_type = unassigned DNA; note = element_ISAs24
ttaatgtgatggtcagcctgacccacagcccagcaggctacgcttgctgggctgtttcttttctacttcaggagagcatcatggcaactatcgcactctttggactcgacatcggcaagcactcctttcatctcgtcggacaggatgccaacggcaaacccgtcttcaaacgccagttcactcgttctagcctcattcattaccttgctcagcaccccgcttgtcgcatcgtgatggaagcctgctgtggcgcacactggctagcccgtcaactcgctggtttcggccatcaggtgcaattgatcgcaccacagtatgttcgcccttttgtcaccggcaacaagaacgacttccttgatgcacacgccatctgtgaagcggcctcccgcccctccatgcgctatgtcggcgtcaaaacacccgaacagcaggccagctcggcactgcatcgactgcgcgaagcccgtattgccgaccgggtgcaaaccgctaatcaaatccacgccctgctgctcgagtttggcattgtgctgccgctaggggcacggggcatcaagcaagtccctgatatcgttatgaatgctagtactgacctcccacacgctgcacgccggatcctctcggcacagtatgagcactatcgctacctggcagagttgattgccgggctggatagccagattggagcgcaagccaaggccgatgcgttgaccagtcgattgatgaccattcccggcataggccccatcactgcaagccagctggctgccgatgcaggcaacgcgcagagctatggctcggcacgccattttgccgcgtcccttgggctggtaccgcgccaacactccacgggtggtaagagcaaactgctggggatcagcaaacggggggacaaatcgctgcggcggttactggtgcagtgcgctcgggtggtgatgcagaacgctgccaaatggcaaagtgcggtggcgcagtggacgcagcagttgatgacacgacggcactcgaatgtggtggcctgtgcgttggccaacaagctggcacggatcgtatgggcagtgctagtgaagggggaggagtatcgtccgaaccccaatgctgcctgaaggtaagtaacacatcgccgagtttccccggcgacatgaagtaacacgcctgcttttgcgatgttcagaaaatgatgacgacaactggcccaacggcctgagggtaaacctgacataaaaaacagtcttcaagactgacggttttttgaggtccctcaggcgcggctcacatcatggatcgggcatgatagcccaccaagaatccggatagattagagcaagcctgccctgtcagtactcatcatcaatctggccttgcaaagttcaggctgaccataga

SEQ ID NO: 84 - DNA, 1315 bp, unidentified
  source 1..1315: mol_type = unassigned DNA; note = element_ISAtu1
ttatgggatggacgcctccctccgaactgtcagaataaatggccaaccaaaggaggaagtcatgacatatgaattgctcgcaatcgatctcggaaagttgtcatttcatctgcatagcatcgctgcagatggcgccattctttcgcgcaaggtcagccggtcgaagttggccgaggctgtaaaatcgatttctccgaagacgatagcaatggaagcctgcgccagcgctcatcactggggaaggcagttcagggaagcaggacgagaagtcctcctcatcaatccacgcttcgtgaagccatttgtacgcggctccaagaacgatgcggtcgacgcagcggcgatttatgaagctgcgacacgtccaaccatgcgtttcgtaccggtcaagtcgaccgcacagcaagacctccagtcgctgcatagaattagagagcgtctgatcgttcagcgcacatcgctgatcaatcatgcacgcggccttctggcagaatatggaatcgttttgccgcaaggaccatggcgctttgcatcccaggcgccctcggctgtcgaggatgcggctctttctgatctcgggcgcgagctgttcctcgaactcctcgaccaactcaccgatgtgaatgaccgagttgccaggctcgacaggaagattagcgagatttgccgcgatcgagaagattgccgccgtctgtccgaactgcctggcgtcggtccgatcatcgcaacggcactcgttgctagcgttgaggacggacgtcacttcaaatccgggcgagagctggcggcttggatcgggctggtcccgcgacaatactcgactggcggcaaaccacggcttggcggaattggtcgccgagcgaaccactatctacgtcgccagatgatccatggtgcccgggcagttatcagccgacttgctagtcacgacgatcgccgatctcaatggctgaaagaactcgtcgctcgccggggatttaataaagcgatcgtggcactcgcaaacaagaccgcgcgggtagcatgggccttgctcacgcgacaggagcgctatgccgcacaatagtcatttgccaatcgttgcctataaggcaatgatgaatgcgagtaagaactgatggcagaacggcacggaccgcagcttccgatcctgatctacgacaaggccacaaaggtcgatcatgttatgaggacagaggtagcggactcccatcaaggccaggagcgtgatcgctccagcgataggccggatagattcacgcatccaatgccgagtgccgccaaatgttcatctcgcccgggaggcgtccataga

SEQ ID NO: 85 - DNA, 1393 bp, unidentified
  source 1..1393: mol_type = unassigned DNA; note = element_ISAve1
taatggaatggtcgcccctccccaaaatggcatctaacgtgccaaagtggcgaatgaaacttcccactgattgagagaggcggccgtgatgaacattacaacgattggtatcgatctggcaaaatcctgcatccaagtccattgcgtcgatgtgcacggcaagcggatcctcaacaagaaactcaaacgcgagcaggtggtgccgttcttcagcaaccgacccgcctgtctgattggcatggaggcctgcggcagcgcccacttctgggctaacaaacttcaggcgctggggcataccgtcaagctgatggcaccgcagttcgtcaaaccttacgtcaaaaccaacaagaacgatgcggccgatgccgaagccatttgcgaggcggtgagccgcccgaacatgcgcttcgtgccgattaaaaacagcgaacaactggccgtcctggcaatgcatcgggcccgccagggattcgtcaaggcgaggaccgcgcaggcaaaccaactccgggggctgctagcggagcacggtattatcatccccaagggcattcgccacatcaatcagcacctgcctgacattctggaggcgggggataatggcttgccagggcggtttcgtcagttactcgaccgcttgagcgctcacttcaaggagctcgataagcaggtgagggaattggacgttcagctccaaagttggcatcaggacagtccggccagccagaaactggcgaagataccgggtatcggtccactcacagccagcgcgctggttgctaccatcggcgatgccaaacagtttcagaacggccggcagttggcagcctggctggggttggtgcccaggcaacactccagcggcggcaagccaacactgctggggataagcaagcgcggcgatacttatctgcgcaccctactcatccatggcgcccgcgccgtgctgcgggtggtgaagagcaaggcacaacacgcaggtagttggctggagggggttatggcgcggcgcaatcataatgtggcggcggtagcacaggccaacaagacggcccgcatcgtctgggctctactagcaaatgaccgagaatttgatgcgcaatacagcacaggcacaatcctagcggcgtaatgacaggacaatagcaaaggcagaaaaagaaccaccgattgcacaggcaatcatgacgtgatggcgagacaggtcagaccgtgactggcaaaacccgaggtattcaaagcactttcgagagcgacaaactgatagaggagccagtcagcgaattccatcagggacagaggcagtagcctcgatcacagtccggatctatggctgcaatctcaacctaactcaccgtcatcaattgaaggcttggcaaaccggggcgaccatcta

SEQ ID NO: 86 - DNA, 1365 bp, unidentified
  source 1..1365: mol_type = unassigned DNA; note = element_ISAzs4
tgatgtggtggacggccctttcaccaaatgccggtgagcagcgttgaccgtcggagaaaccacctcataggagccgaccatgggcgtgacgacaatcggtctggatctggcgaagaatgtttttccaggttcatggtatcgacggcgacgggaagattctggtccggcggcagttacgacgaggcgaggtgctgaagttatttcaaggcctgcctgcgtgcctggtggggatggaggcgtgtggcacggcgcaccactgggcacgggaaattgcggcacttggtcatacggtgaagttgatgccgcccgcctacgtcaaaccgtacgtgaaacggggaaagaccgacgcggcggatgccgaggcgatctgcgaagcggtgacccggccgacaatgcgcttcgtggcggtcaagaccatcgatcagcaggccgccttgatgcttcacaagactcgggacctcttggtccggcagcggacgatgctgatcaacgtcttgcgcggtcacctcgcggaattcgggatcatcgcggccaaagggcccagcgggacgaaggccgccatcgaggctttgcacgaggcgcaggatcgtctgccggaactggcgcgacgggcgctgcacggcctcgtcgatcagctccgcctgctcggcgaggaaatcgaccggctggaggcgcgtattctggagtggcatcgcgtcagcgacgtcagccgccgtttggcgacgatacccggcattgggccgatcacagccagtgcgatcgccgcggcggtgccggacggctcactgttccggtccggccggcagttcgtcgcatggctcggcctgacaccgaaggcgcacagcagcggcggcaaagagtgccaggtcggcatcagcaagcagggcgacggcgacctccgccgcctgctggtcgtgggcgccacggcggtcatgcggttggcgcgccgagacaatgcggctcgatgctgggcagcgaagctgctggagcgcaagccggccaaactcgccgccgtcgccctggccaacaagaccgcgcgcatcgcctgggcggtgctgacgcgcggcgggacctacgcggcacccaccaccgcatagtcgaggttcggctcggcagcggaccaagtccctgccgggacggatggcgtgagggtggtgagacgtgatgacaaaccggtcagaccggggatcgaccaaacccacggggaccaagcgtccgggagcgcgctgaggtgatttgggcgttgatccgcggacttcatcaaggccagcgaccagaggtcgcgacgacaggccggacacatggatgcacccgaccaatcgtcaacatgaattctcctcttgcgccgagagggccgtccacaca

SEQ ID NO: 87 - DNA, 1397 bp, unidentified
  source 1..1397: mol_type = unassigned DNA; note = element_ISAzvi2
caatgaaatggactcccccctcctacggcgtcaatgcaccagactgaagttgctggaaacagcagtcaccagaggagagcgtccccatgaaactcaagcggataggcgtcgatttggcaaagcaggtgttccagattcatggcgtcgacagccacgagcaggcggtctgtcgcaaacagctcaaacgctcgcaaatgctggacttctttcgtcaactcgaaccctgcacggtggcgatggaggcctgcggcagctcccattactgggcgcgcgagctgagagtcctgggacatgaggtgcgactgatcgcaccgcagttcgtcaaaccctacgtcaagagcggcaagaacgacgccaatgacgccgaagcgatctgcgaggcggccagtcgaccgaacatgcgttacgtcgaggtgaagagcgccgagcagcaggccggccaggccctgcaccggatcaggagccgcctgatccgggcgcggacggcgctggtcaacgagattcgcgggttgctgggcgagtttggcctggtcgagagccggcacggcgtggcggctacccgccgactggcacaggcggccttggcggatgccgagaacggcctgccgggccagatgcgcgggttactggtggagttgcaaggcgaattggtcgagcatgaagcgcgcttgtctcgtctcgacgaaacgatccagcgccaggctcgcgaggacgagcgggtggaacgcctgatgctggtcgagggcatcggtccgatcacggccaccgccctggtgtcggccgtgggcgatgctcgccagttccgcagcgcccggcagttcgctgcctggctggggttggttcctcgccaacactccagcggcggcaaggagcagctgggcccgatcaacaagcgaggcgatacttacttgcgcacgctgctggttcacggagcccgagcggtgctcaggcactgccaggacaaggcggatcgacgcagccagtggctccagcgcttgctgtgtcgacgcaacccgaacatcgccacggtcgctttggcgaacaagaatgcccggatcgtctgggcgatcctcagtcggggagattgctatcaacctggctgaaaataaaatcgcaggctgcacagcctgcaaaatgttgagcagtaaccagtagatccaccccgattgcacagtgacatgcagcgatgacgaaccggtcgaaccggcatgtgtaaagcctgcacagtgcgtcggccccctgcaagcaaggccgctagatcaatcaggcacacatgagcggattttcatcatggctcggggcagccaatgcctcatcggaagccggatatacgcaagcagtcgtacctacgttcgtcggcagggcaaatcactggcaaaccggggggagtccatata

SEQ ID NO: 88 - DNA, 1352 bp, unidentified
  source 1..1352: mol_type = unassigned DNA; note = element_ISAzvi4
ttaatgagatggtcacccccacaccctgcgagggccatgctttcgcagggtgtttcattttggagaccatcaccatgagcgacgtggcactgataggaatcgacctcggcaagcacagcttccatcttcacggacaagacaagatcggccgagaggtctttcgcaggaagtcgtcgcgtcagcagatgatgcggttcttcggcaacctcccggcttgcaccgtggtgatggaggcttgtgccggctcccatttcattgcccgggagctgatggccttggggcatcaggccaagctgatctccccgcaattcgtccggcccttcgtcaagagcaacaagaacgacttcgtggatgccgaagcgatctgcgaagccgcttcacgttcctcaatgcgcttcgtgacgcccaggaccgaggcccagcagacgctctcggtcctgcatcgcatgcgggaatccctggtgcgggatcggaccaaaaccgccaatcagatgcatggttttctgctggagttcggagtcagtctgcccaaagggttggcagtcatgaggcgcctgcccggtgtcctgagcgagcggccactgcctgttcggttaagcctgctgctgcagcgcctgcacgcgcacttcgactacctcgacaaacagatcagggaactggacaaggaggttgcaggccagctcgcgagcgatgacctgggcagccgcttgctgaccatcccatgcatcggccccatcaccgccagcctattggctgccgaaataggcgatggcaggcaatacggatgcagccgggacttcgccgcgtccgtcggtctggtgcccaggcagtacagcaccggtggcaaagccaggctactgggcatcagcaagcgcggcgacaagaggctcaggcaactgctggtccagtgcgccagggtttacctgcaacgactggagcatcagcgcggcgccctggccgactgggtacgcgccctgcgcagtcgccgccactcgaacgtggtcgcctgcgccttggccaacaagttggctcgcatcgcctggtcgatcgcggccaaccacacgcagttcgaagcggggccagacgcctcggcggcctgaccttgccgttgcgcagtaccccgaacaccttccaggttttgcgatagctggacaagcgatgacgtgaacggcccaccggcctggcgaaaaacctggcgtaaaaatcggctttcgaagccgccgactttttcaggatcgccaggcgcgactctcatcgtggcgcggagcatgctccaaacggacgccggatagatttaggcaagcccaatactcatcgctgatcactattgcaaaaacgggggtgaccataga

SEQ ID NO: 89 - DNA, 1358 bp, unidentified
  source 1..1358: mol_type = unassigned DNA; note = element_ISBcen1
ttaatgagatggtcacccccaccctacacgcgggttacgctgtagggtgttttcttttctggagaggccatcatgcatgacgtaacgctggttgggatcgatctgggcaaacattcgtttcatcttcacgggcaggatcggcacggcaaagccgtgttccgcaagaaggtgaaccgcaagcagctaatcgagtttttcgccaagtttcacccctgcaccgtggtcatggaggcctgcgccggagcacattacatggcgcgccaattggcgggctggggccatcaggtcaaactgatctcgccacagttcgtgcggcccttcgtcaagagtaacaaaaacgacttcgtggacgccgaagcgatctgcgaggcagcctcacgcccatctatgcgatttgtgacgccgaagacggagtcgcagcagattttgtcagctttgcaccgcgtgcgtgattctctggtgcgggatcgagtgaagacggccaaccaattacacgggttcctgctcgaattcggcatcagcctgccagtcgggcaagccgtgatcaagcgattgccggctgtgctggccgagcatgcgctgccgccccggctagtggcgatcctcgagcgcttgcacggccatttcaagtacctgagtgagcagatcagtgagattgacgccgagatggctcggcaactagccgacgatgagctggggcaatgcctcttgagcattccttgcgttggcccgattacggcaagcgtgctggccgcggaaatgggcgacggcaagcaatacggctgcagtcgcgactttgccgcatcggtcgggctcgtgccacgccagtacagcacgggcggcaaaagcaatctgctgggcatcagcaaacgcggggacaagaatatccggcggctactggtgcagtgcgcccgagtctacatgcagcaactggaacggcaaagcggccggcttgccgattgggtccggaccatgctggcgcgtcggcactcaaacgttgtggcttgcgcgctggcaaataagctggctcgtacggcatgggcacttgttaccagccgtaccaccttcgatgcgcggtcggcaggtatgccggcctgattaaccgacttcggcttgttgctgtaagaatcacccacctggttttgcgaacgctgaaatttgatgacgtgaacggcacaccggcctgaccgagaacctgtcataaaaattggcttctgaagccgcgcggttttttaggacggtcaggcgcgactctcatcgtggcgcggagagcaatccccacaacgacgccggatagatttaggcaagccatacacggcatcgaagatcggtgttgcaaaaaagggggtgaccataga

SEQ ID NO: 90 - DNA, 1364 bp, unidentified
  source 1..1364: mol_type = unassigned DNA; note = element_ISBcen2
ttaataggatggtcagcccgatcctcactcagtggactacgctgagtgaggattttgtccttctggaggaccatcatggacacggtatcgctgatcggagtcgatctcggcaaacactgcttccacctgcatgggcaggatgcgtcaggcaggatggtgttccgtaagaagctcacgcgcagccagatgtttacgctgctgggcaatttcccgagttgtacggtggtcatggaggcctgcgcgggtgctcactggatcgcccgccgacttcagacgctgggccacgaggccaagctgatttcccctcagttcgtcaaaccgttccggcaaggcaacaagaacgatttcgcggacgcccaggcgatctgcgaagcagcttcgcgtccgagcatgcgtttcgcgagtccgcacaacgaagctcagcagatcgtttcagccttgcaccgcgtgcgcgagggccttgtgcgtcagcgcacctgcacgatcaatcagattcatgcgtttctgttggagttcggcatcagcttgccgcgcggtatggcggtgatccgacggctgcccgccgtgctggaggcagaatcgttgccgccgagactggtgagcgtgctcgaacgtctgcacgcgcacttcaagtatctggacgagcagatccatcagctcgaacatgagttgctttcccagttacacgaggacgaacgcagcgaacggctgctcgagattccgggcattggccccatgactgccagcgtgttgatgtcggagttgggcgatgcgcgtcaatatggttcggcaaggcagtttgcggcgtcggtcgggctggtgccgcggcagtacagcaccggcggcaaaccaacgctactcggcatcagcaagcgcggggacaaggaattgcggcggctgctggtgcaatgtgcgcggaccatcatgcagcgcatcgagcaccgcacggatgcattgggcgtctggattcgcagcctgttggcgcgacgacattcgaacgtagtggcctgtgccttggccaataaattggcgaggatcgcgtcggccatcctcgccaaagggacacactaccgaagcatcgaggctgttcctgcagtctgacgcttcctgtcgcttactgcttcagttgcagtagtcacaccaggttttgcgacgcgagatacgtgaaggcataaacgactcaacggccgggcaagtaacctgacacaaaaaacagcatctcaatgctgaggggtttttgaggtttgcccggcgcggctcccatcatggggcgggatctttcccatccgcgaccccggatagattcgagcaagtccactttaggtcaacaccacctcgcttgcaaaaatcgggctgaccataga

SEQ ID NO: 91 - DNA, 1413 bp, unidentified
  source 1..1413: mol_type = unassigned DNA; note = element_ISBcen3
taatggaatggacgcccccgcccggcacggcatcgatgtgccaaagtggaagtgtcagccaccacttaaccagagggaacgctcatcatgaaggttacgaccgttggtatcgatctggcaaagaacgtctttcaaatccacggcgtcgacgcgcacggcaaagccgtcctcaagaagcagatccggcgcgatcaattaatgctgttcttcacgaatctgccagcgtgcttgatcggcatggaggcctgtgccagcgcgcattactgggcacgacgcgttcaagaatgcggacacaccgttcgactaatggctccgcaattcgttaaaccctacgtcaagaccaacaagaacgatgcggccgatgccgaagcaatttgcgaagccgtcgctcggcccaacatgcgcttcgtccccatcaagaccgaatcgcagcaggccgtcctcgccatacatcgcgcacgtcagagtttcgtcaaggcgcgcaccgcgcaagctaatcagattcgtgggctcctcgccgaattcggcctggtgattccccaaggtatcgcccacatcgcgcaacgcgtacccgaactgctcgactccgacacttgcgccttgccaggcccgtttcgtctccttgtgctgcgcctgatggagcatctcaagctgctcgatcagcacgttcgagaactcgagacgcaaattcagacctggcaccgcgacaatcccgccagccgcaaacttgccgagattcccggcgtcgggccaatcacggcaagcgcactggtcgcgtcgatcggcgatgccaagaacttcgagaacggccgtcaactggccgcttggcttgggctggtccctcggcaacattccagcggcggcaaatcgaccttgctgggcatgagcaagcgaggcgactcctacctgcgcacgctgctcatccacggcgcgcgatcggccatcctagccgcacaacgaaagcccgacaccgatagctggctgagccgcctgctaggccgacgccatcccaacatcgctgccgtagccctggccagcaagaatgcacgcgtcatatgggcgttgctggctcacaaccagcagttccgaccgggttatgcgactgccgcggcagtcgcataacccggtcggcttgcagtcgaacaagaccgctgcgacaaactttaggagcgacaaaccacccgattgctcaggcaagcaatgcagtgatggcgagacaggtcagaccgtggccggcaaaacccatagaagtcagagcacctcaagtgcgatctgctgattgaggagctggccagcgtattccatcagggacagcaggcgtacgcctgacatcaaagtccggatgtatggctgcaatcgatgccttcgaaccgtcactcaccgcgaacctggcaaaacgggggcgtccatgta

SEQ ID NO: 92 - DNA, 1350 bp, unidentified
  source 1..1350: mol_type = unassigned DNA; note = element_ISBcen4
aaaatggtatggacgcctcctcatcgcataatgaggcgtcgttcaaccaggagaacgcaaatggaaccgacagtcgtaggcgtagacatcgccaagcgggtcttccaactgcactggatcgctgcggacaccggcgaggtgttcgaccggcagctccgccgcagtgattttctcgagcacttcgccaatcgtgagccctgtctcatcggcatggaggcctgcggaggctcacagcactgggcacgccgtctcaccgagctcggccatcaggtcaaattgatgccaggcaaactggtcaaagcgttcgtgacaggaaacaagaacgatgtcgccgatgcgcgcgcaatctgggcagctgcacgacacccgggcgtgaaagccgtcccggtgaagaccgaggcccagcaagcggttctggcactgcatcgtattcgacagcagttggttatatttcggcgctctcaatctaactgcctgagaggcttgctcggcgagtacggagaggtcatgggcgtgggacgcgcagcaatgaatcgcgccatgcccgacctgctgctacgcctcgaattgcgcctgccgcgagtcttgatcgattccctgcgggaacagtggcaacgccttgtcgacatcgacaagcagataaccctcatcgagcagcgactccgcgcgtggctgcatgaaaacccggcctgcagaacgattgccgaaatccccggtgttgggttcctgaccgccactgctgccgtagcagctatgggcgatcccaaagcgtttcggtccggccgcgaatttgcagcatggctgggtctcgtccctgcgcagtttggaactggtggcaaggtccggctgctcggcatcagcaagagaggcgatcgatacctgcgcacgctgatgattcatggcgcacggtccgtcatgaagcacgcaaaagacccgggttcctgggcagtgcagttgagcatgcggcgtccgctcaatgtcgtagtcgttgcactggccaacaagatcgcgcggacgatctgggctctgctagctcatggccgctcatactgcgagagctatccgcctccagttactgcagcatgatgtgtgtcgagatcgtatcgcgttctatcaccgatctgtagtccaaggttgcgcaaggtagtgttgtaatggcaaacaggtaagaccgggactcatcaaacctgcatcgtcttctggacatcacggtccgtggcaaaaatgaggcatgagtcagcggattccattggggccagcgggcttcgacctgcatgggccggatataaaaccgcagcctgtatctgttcgacagagcaacaaaccttggcaagccggaggcgtccatat

SEQ ID NO: 93 - DNA, 1424 bp, unidentified
  source 1..1424: mol_type = unassigned DNA; note = element_ISBcen5
aattgaaatgaacgcgtcccacccgtgaacgtgagagcagaaaaaggggtggaccctcacgggccaacggcatcgatgtgcccaagtggaaaatgcacgcatttcccggcaaccggaggatccacgatgaacagtatggccgtaggagtcgacgtcgccaagcaggttttccaagtgcactacgttgatagggaaaccggcgggatcgtgaataaggcaatcaagcgggcgaaattccttgagttcttcgcgaaccgcgcggcctgtcttatcgggatggaagcgtgtggcggagcccaccattgggcgcggcaattgacgcagatgggtcacgaggtcaggctgatgccggccgagttcgtgaaggcgttcaacatccgcaacaagaacgatgcggcggacgcacgggcgatctggctggcggtacagcaacccggcaagccggtggcggtgaagaccgagatgcagcaggcgatggtagcactgcaccggatgcgcgagcagttggtgaagttccgcacgatgcaggtcaacggattgcgaggtttgctgacggaatacggggaggtaatgagcaaggggcgggcgaagctggacaaggaaataccggtcgtgcttggccgaatcgcggagcgcttgccagcggcgctaatcgatacgttgcgcgagcaatggaacgggttggcaaagctcgacgagcagatcgcggaaatcgaacgccggatgcgcgaatggaagaaggaagacaaggcggtgaaggcgattagcgagataccgggcgtaggtttgctgacggccaccgcagcggtagcaatgatgggcgacccgaaggcgttcagctcgggacgagagttcgcggcgtgggccgggttagtgccgaagcagaccggctcgggcggtaaggtgaacttacacgggatcagcaagaggggcgacatgtatctgcgcacgctactgattcacggggcacgaagcgtgctgacgcatgcgaaagagcccggtgagtggatcgagcagatgaagaagcggcgaccgccgaatgtggtgatcgtcgcactggccaacaagatggcacggacgatctgggctgtactggcccatgaccggccgtaccaaaagggttacgtgagcgtgaagccggcctgatcggtgaatgccacgttgaagatcaacgtttaacactgggtgaacgtcgaaaggttgcgcaggaatcgagtgtgatgacaagccaggtaggaccgggactcgctaaacctgaatcgtggtaagagcttcgagctcgccaggagaatgaggcgcgagtcagcgaatttcataggggcccgcagcggcagtactggctgcaacaaggccggatatagagctgcagcccatcctgtctgtctgaacacacgaaaactgttgcaaacgggacgcgttcatat

SEQ ID NO: 94 - DNA, 1180 bp, unidentified
  source 1..1180: mol_type = unassigned DNA; note = element_ISBcen8
cttgtatgttcagtactgaccagtacggtaaagtctggtggtagccagacgagaccgtgcagtttgccccgcgcttgggtgttggagcccgtgactgagtacaaaacgcacggttgccgtgctggtcttcctgaagcccgaacggttacgcgcgccatttacatcgagtgcgcatgtacaagcatgggatccgaagatcatgtctgctccttctgccgtaacggtcggcattgacgtcgcaaaagctcacgtcgatgtttccgtactgggtgccaatctggacatccgtcgattcaacaacgatgccgagggccactcggccctggctgttgcccttcagccgctgaacgtgcagttggtcgtgatggaggcgaccggtggctacgagaccgagctggcgtgcgccttgcaaggtgcgggtttgccggtcgctgtcgtcaaccctcggcaagcacgcgattttgcccgctcgatgggacgtctggcgaaaaccgatgccatcgacgcacgtatgcttgccgaactggcttccgtgctactgcgtcgggacgatctgtcccgcttgctacgtcccgttcccgacgagcggcagcagtggctggctgcactggtgacccgacggcgccaactactcaccatgctcctttcggagcgacagcggctccagatcacgccggttggtctgcattcaagtctgctggctatcattgccgccatccaggcacaactcgatgacattgacgctcagatggtcgctcatgtacgccagcacttcggtgaactcgaccgcctgttgcagtccacacatggaattggcccggtatccagcgcctgcctgatcgcagaactgcccgaattgggccggctcaatcgccgtcagattgcagccctcgttggcgtcgctcccattgcttgcgattccggcttacgtaatgggcgacgacgggttcaaggtggccgcttcgcgatccgtcgcgtgctgtacatggctacattgactgccacacgctacaaccccgccatcagagccttctatcaacgcctgaaggccgccggcaaactgtccaaggtcgcgcttgttgcctgcatgcgcaagctcctaaccatgctcaatgccatggtcaaaaccaacacgccttgggacgattcacttcatcgggcttgactcggaagacggtta

SEQ ID NO: 95 - DNA, 1385 bp, unidentified
  source 1..1385: mol_type = unassigned DNA; note = element_ISBdi11
acatggggtaatcgcaggagcgtgttgccctaaagacaatcaatagtcttggagggtggctgttccccgataggatggaaatacgggctcacgactggacgccgggcccaagcatcgaatggagaacagccatggaagagtatatcggtctcgatgtgtcgatgaaagagacggcggtctcgatccgtcgagcaggtgaacggatctggcgcggcaagtgtgcatctgatcccagtgtcatcgccgcgctcatccgcaagcgggcgccggccgtgaaacgcgtggtgttcgagacgggaccgctgtcggtatggttctatcattctttgcgcaccgaaggattgccggcgatctgcgtcgatgcgcgccatgataaagcggcgctcgatatggcggcgaacaagacggacgcgaacgacgccgatggtctggcgcagctcgcggaagtcgggttctttcgtgaggtgcgcgtgaagggattcaacagcatgctgacccgcacgcttgtcgcggcgcgcacgcggctggtccggatcaccaccgagctttcgaaccagatccgcggcgtcatgaagaccttcggtctgcttgttcccgccggaaagggaagcaccttcgagaacgtccggaaccttctggctgatcaggacggacttgcatccatcgtgcttccgatgctggaagcctggcgtggcattcgcatccgcgccgccgaactcggtcgccagttggttcgggatgcgcgcgagagtcaggcctgccgcatcctcatgtcgattccgggcatcggtgcgatcaccgcaacctcttttgccacagctattgaggagcctgacaactttaggaaatcccgatctgttggcgcgtggatcggcctgacaacgcgccgctaccaatccggagaagtcgattatgatggccatatatcccgacgtggcgaccgccatttgcgtgggcttctctatgaagcggcagcggtcattctgacgcgcagctcaaccgacagcgctctgcggacgtggggacggcatctccgggagaggatcggcttcaaaagagccgccgtggctgtggcacggaaactggcggtgataagcatacgatgcttaagaccggcgagctgttcaatccgaatgccggagctgccgcataagctcggatagcgttcagaacctgaacgcctaaggtatccctgccaggacgtgagccgagccattccgctgatggggttgcactgctgactcagcaaagtgcgtcgtccacattgaaggctcgtccgcgaagctccatcatgcggcgaccaatgtcgaccgcgaagacaaccacgcacccggcagcgtctcttgacgaaactaaatgcttgacgtcccagcagcgattagacg

SEQ ID NO: 96 - DNA, 1466 bp, unidentified
  source 1..1466: mol_type = unassigned DNA; note = element_ISBfun1
gaatgaaagggacttccccgtcccgaggctgcggcggaagccgcgagtcggcatcaatgtgccaagatgaagttgcgaacgttcatcgacaccagcgagaggggaagtccatgcctattgtcactatcggaatcgatcttgccaagaatatattcgcggttcacggtgtggacgaagccggtaaagcgatgctgatcaagccacgtgtgccgcgtgatcagctggcgacgttgattgcgcagttgccagcgtgcctcatcggcatggaggcctgctccggtgcgcatcactgggcccgcctcttccagcagcatggccataccgtcaagctcatggcgcccaaccttgtggcgccttatcgcatgtcgggcaagcgaggcaagaacgacgcggcggatgctgctgcgatctgcgaagccgtggcgcgcccaagcatgcgtttcgtgccgctgaaggacgaacatcagcaggcaacgctttgcctgcaccggacacgacaaggtttcgttgaagagcgaaccgcgacctacaaccggttgcgaggcctgctcccggaattcggtgtagtgctaccccagagcccggagaagttgcgtaggtacgtcacggaacacctggacgcattgccaggctgggcgaagcgtagcatcggcgatctgcttgagcatgccggccatatcgaggatcgcctgctcgaatacgaccgtgcgatcgctgagatcgcgcgtgaggatgcgcgcagcaagagactgatgcagttgcgcggcgtcggcccaaccacggccagcgcgttgctcgccagtatcggtgccgggcgcgacttcagaaacggccgacaggtagcagcctggatcggactcacgcccggtcaatacagcagtggcggcaaggcgcggctgggcagcatcacgaaggcaggcgacgcctatctgcgcgggttgctggtcaacggtgcccgcgccgtcattgccaatctcggcgagaaacaggatcgtttcagccgttgggtccgaaccctgatcgagcgccgtggctactggcgagctgctgtcgcgattgccgcaaagaacgcgagattggcttgggcctcgttgaaatatggcgaggacttcaagctcgaacctgcggcagactgagttcgattcgagcctgtcgatctaccaatgcctggacgcgagcacggacatcatgagcacatagaagcgatcactttgcactgccagcggtgatgtgaagcgggttggacccgcgcggggcgtacctggctaacacggcggggatatccattcccggctagagaatgagacccctgcgcgcgtctttcatcagggtccgggccattggtccaacatgaccggttgtagaaccgcagtccttcaccttctcacatacaccagcgcggcattgcagcatgtatcgacatgcaaacctcgattgagcttgtgctcaacggggaagcccttgta

SEQ ID NO: 97 - DNA, 1395 bp, unidentified
  source 1..1395: mol_type = unassigned DNA; note = element_ISBj18
tgatgtggtggaacggcccgctccaacagcatcaaagtgctagaacgtggtcgttgttcgaacgccacaaaggagggaccgttccgtgaaacaggttatcaccatcgggctggatctggccaagcacgttttccaggttcacggggcggatgccgagggctcacccgtgttcaaccggaagctacggcgcagcgaagttctgcgtttctttgagaagctgccagcatgcctggtggggatggaagcatgcggtagcgcccactattgggcgcgcgagatcgcagctctcggtcatgaggtccggctcattccgccggcttatgtcaaacccttcgtcaagcgtggcaagacggatgcggcggacgctgaggccatcagcgaagcggtgacccgaaagaccatgcgcttcgtgccgattaagacggctgagcaacaggctgccgcgatggtgctgaagacccgcgctcttctagtgcggcagcgaacgcagtcggtcaacgcgttgcgcgcgcatctggcagaattggggatcatcgccaccgccggcctggcaaaggttgaggcgctggtcgcaatcatacgggatgagacagatgcacgcctgcccgcagcagcgcgcttcgcgctgatggctattgccgacgagattgaagcttcagccgaccagatcgagaggctcgagcgcgcaatcgtcgcggaggccaagcacgacgaggacatgcgtcggttgaccacgatccctggcgtcggcgccattacggcggcgaccatcaaagcgcttgtgccggatcccggcgggttcaagtcggctcgccactttgccgcctggctgggattgacgccgcggcctcattcaagcggaggcaaagagcggttgggacgaatatcgaagatgggaaatccagaactccgctctctcctcgttgtcggggcaacggccgtcttgcggcttgtccgaaacgacgttcgggcgcggccgtggctgaaggcgcttctcgccagacgccccttcaaggttgccgccgtcgcgcaggccaataagacggcgcggatcatctgggcgctcctgaacaagggcggaatttatcggcgtcccgacccattggcgattgccgcggtgacgcagtgaccgccaaaacgatctgaccggcgcaggccggcagagggcgaggtgcaacaacaggcgatgaacccatgggacgaaatcccgaaacgagtgaagctactgcccccaatgcgctcaagcgcgtaaacttgatttagctcctcgttccgcggatctcatcgaggccagcggccatattgtgccgcgcgcaaaggccggacatatgaccgcaccgttccaatgtgtgaaatcgactgaaaaagctcttgcctcgcgggccgttccacata

SEQ ID NO: 98 - DNA, 1378 bp, unidentified
  source 1..1378: mol_type = unassigned DNA; note = element_ISBj19
tgatgctgtggacggctcctccaccggcacgagagtgccaaggagtgggcgccgtttgaggctcccacgattcggaggagctagctatgcagtcgatttcgacaatcggtctcgatatcgccaagtcggtctttcaagtgcacggcgttgatgcggccggccaggtggtgctgcgccggcagttgaagcgccggcacgttcttgcatttttccaaaaactgccaccatgcctggtggggatcgaggcgtgcgcctcatcgcaccattggtcccgcgagctgcaggcgctgggtcatacggtgcgattgatgccgccggcctatgtgaagccctacgtcaagcggcagaagaacgacaccacggacgcggaggcgatttgcgaggcggtcacgcggcccagcatgcggttcgtgccgaccaagacggtcgagcagcagggctgtctgatgcttcatcgtgcgcgccatctcttcatccgccagcagacggctgtcatcaattcaatccgcgcctatctcgccgagttcgggattgttgcccctgtcgggcgcaggggtgtcgagcaactgctggagatcgtcgccgatagagccgacaaccggctccccgaggtggcccgtgcttgtcttgctgctctcagcagtcaattgcgcgcactgaaggcccaaatcctggagttcgaccgacgcatcgtcgcctggcatcgatcaagcgtgacaagcaagcggcttgacgcgatccccggcgtcgggccggcgctggcaacagctctggtcgccagcattgccgatcccaaggctttccgatcgggacgagacttctcggcctgggttgggctcgtgccgaagcagaactcaagcggaggcaaggacaagcttggcagtattagcaaacaaggcgatcgctatttgcgcagccttttcacggctggcgcgctcgccgtgatccgctatgccaagatccatggcgcggggcatcggccttggcttacgggactgctgacgcgccgccccaccaaggtggctgcgatcgcgctcgccaacaagattgctcggatggcgtgggctatgatggccaagggtgagcgctacagggagcccgtcgcgctcgcggcgtaacctatcgcgccggacatccggtgtgacgtaacggttgggagggcgaacagcacgtaatgcagcgccggtcgatccggcgatcaggacaacccacttgggccatggcatcttcgaatgcgtgcttttgaccgggacctgatccgcggagggcattatggccagcggtcacgtgaaccgcgctaacaggccgaacacatggctgctccgactaccgccgcatgcgtaaagaaagcccttgccaacccggagccgtccacaca

SEQ ID NO: 99 - DNA, 1576 bp, unidentified
  source 1..1576: mol_type = unassigned DNA; note = element_ISBj4
taatgggatggtccggccgtgctcctgccccgccagcgataagctggccaggggcgccaagacaaggagcacgccatgtcccagacacccagtaccgcgatcgccgtgatcggcatcgatatcggcaaaaactcgttccacgtcgtgggccacgatacgcgcggcaccgtcgtgctgcggcaaaagtggtcgcgtggccaggtcgaggcgcggctcgccaatatgccgccttgcctgatcggcatggaagcctgcgtcggcgcacatcatttgagccgcaaactcgcatcgttaggtcacgatgccaggttgatgccggccaaatatgtccgcccttatagcaaaggaccgaagaacgacttcaatgacgccgaagcgattgccgaagccgtgcagcgcccgacgatgaagttcgtggcgaccaagaccgcggagcaactggatctgcaggcgctgcatcgggtgcgcgagcggctggtgtcgcaacgcaccggcatcatcaaccagattcgcgccttcatgctggaacgcgggatcgcggtgcgccagggtatcggcttcctgcgcacagaactgcccaccatccttgcgacgcgcaccgatgccctgtcgccacgcatgttgtgtgtcatcgaggagttggcaggcgactggcgtcggctggatcagcgcatcgataggctctccggcgagatcgaagcactggcccgtcaagatcaggcatgttcgcgcctgatgacggtgcctggcatcgggccgatcatttcgagcgccatggtggccgcgatcggcactggagacgtcttctccaaaggccgtgacttcggcgcctggctcgggctggtgcccaagcagatctcgacgggagaccgcacgatcctcggcaaaatctcaaggcgcggcaatcgctacctccgcgttctgttcgtccaggcggcatgggtggtgctggtcaggatcaagaactgggaacgttacggactcagatcctggatcgaagccgccaagaagcgattgcaccacaacgtgctggcgatcgcactcgccaacaagcttgcccgcatcgcctgggcggtgctggctaaaggacgcgccttcgagctgacaaggaccaacgatgcaggcgtccgacccgcttgatcgtcgcgccgtgctcggcgcggtcaaggcgcggcctggcaacgccggagccagccgcaagcaaagcgcaacggccggccttgaccgcccgtgcgcgcgacgcgacgcacgtcctgcgggccgggacgaaggaacggcccctggctcgaacacaggaactgcgaggtaggaggagcaagcgatgacgtaaccccatcaacaggttccagccgaggtctgcgagaggatgagacgagatggaggttcggtcttcccggcgcatgcgaacactggtgacccaaatggcccaatcgaggcctgtccgctaatgagaacgcacgcgcgctgatatccatgatggcccggagaaaatgctccaatcaaaggccggatacattgatgcaagaccacaccacctgatcgacgaacctcttgctacgcacggccggaccgtaca

SEQ ID NO: 100 - DNA, 1448 bp, unidentified
  source 1..1448: mol_type = unassigned DNA; note = element_ISBma3
cgttactatcttcctgtcccaataatggggctttggccagccaggcccggtatgattcccgcccccagtcgcagtcatgatccggggggtgttgtcgccgggtctggtgggtggctggtgatcgctgataggggtttggccggaatattccgacgccgtccgtaacgtggatgccgagacttgccaccgttgttgcaggccaatccgttcactttgcacaaactgcgatgcaagacactcaacagcatgacgccgtggatgttttcgtcggcgtcgacgtcggtaaaggccagcatcacgccgttgcactcgatcgaaatggcaagcgtctgtacaacaaggcgctacccaacgacgaggtcaagctgcgagccctcatcgccgaactcaagactcacggtcgactgctgttcgtcgtcgatcagccttccaccatcggtgcgcttcctgtagccgtcgcccgcgctgaaggcgtactcgtcgcctatctgcccggactggccatgcgccgcatcgctgatttgcacgccggcgaagccaagaccgatgcccgcgacgccgccatcatcgccgaagccgctcgctcgatgccgcatacgctgcgctcgcttcgactggccgacgagcagctcgccgaactcaccatgctgtgcggcttcgatgacgacctcgccgctcaggtcacacagaccagcaaccgcattcgcggcctgcttactcaaatccatccggcgctcgagcgcgttctcggaccgcgcctcgaccatccggcggtgctcgatctgcttgagcgctatccgtcgcccgccgcacttgccagcaccaccgagaagacgctcgccaatcgcctgaccaagctcgctcctcgcatgggcaaaggcttggcggccgagatcgttcaggcactgagtgaacaagccgtgaccgtgcccggcacgcaagccgccaccatcgtcatgccccgtttagcccagcagcttgcggccttgcgtaagcaacgcgacgaggtcgccgccgaagttgagcgactggtgcttgctcaccctctttggccggtcctgaccagcatgccgggagtcggcgtcaggaccgccgccagactcctgaccgaagtcgcccataaggccttcgcttcggctgcacacttggcggcctacgctggccttgccccggtcacccggcgctcaggctcgtcgatccgtggcgagcatccatccagacggggaaacaaggtgctcaagcgcgccttgttcctatccgccttcgcggccttacgagacccagtctcacgggcctattactcccgcaagatccagcaaggcaagcgccacaaccaagcgctgatcgcactggcacggcgacgctgcgacgtcctgttcgccatgctgcgcgacggcaccatttaccaacccaagtcagcccctaacgcttgacgaaagacatagggg

SEQ ID NO: 101 - DNA, 1180 bp, unidentified
  source 1..1180: mol_type = unassigned DNA; note = element_ISBmu9
cttgtatgtttaagcctgaccagtacggtaaagtctgaacgtagccagactagaccgtgcagtttgtcgcgcgcttgggcgttggagcccgtgactgagtacagaacgcacggtcgccgtgctggtcttgccgaaacccgaacggttacgcgcgccggccctgccgagtgcgcatgtacaagcatgggatccgaagatcatgtctgctccttccttagtaacggtcggcattgacgtggcaaaagaccatgtcgatgtttccgtgctgggtgcccatctggacacccagcgattcgataacgatgcggagggccattcggccctggccgtcgccctgcagccgctggacgtggcgttggtcgtgatggaagcgaccggcggctacgaggcggaaatggcttgcgctttgcagagcgccggtttgccggtcgcggtcgtcaatcctcgacaggcgcgcgattttgcccgctcgatggggcgtctggccaagaccgatcgcatcgatgcccgcatgctcgcccaactggcttcggtcctggtgcgtcgcgaagatctgtcccgcttgctgcgccccgttccggatgagcgccagcagtggctggctgctctgttgacccgccgtcgccagttgctcaccatgctcctctcggaacgacagcggctgcagattacgccggtcggtctgcatcccagcctgttggctatcattgctgccgttcaggctcagctcgacgacatcgacgcacagatggtcggacacgtacgcgagcacttcagtgaactcgaccgcctgctgcaatcgactcacggcatcggtccggtatccagtgcttgcctgatcgcagaactgcccgaattgggtaagctcagccgtcgccagattgcggctctcgtcggcgtcgcgcctattgcttgcgattccggctcccgcaatggcagacgacgcgttcagggtggtcgctttgaaatccgtcgcgtgctttacatggccacccttaccgccacccgccacaatcctgccatcaaaaccttctatcaacgcctgaaggccgccggcaaactgcccaaggtcgcgttggttgcctgcatgcgcaagcttctgaccatacttaatgccatggtcagatccaacacgccttgggacgattcgctccataaggcttgacttggtagacggtta

SEQ ID NO: 102 - DNA, 1583 bp, unidentified
  source 1..1583: mol_type = unassigned DNA; note = element_ISBth13
ctcgtatgataaagttaggttttttaggaaagggatttacctataaacccgtgagtatctagttatatgagatacttatatttgtagatagagtgttgccgaccacctccttgaatctttgtattcggttgaaagaatggtacctctgtctaataagtagtttacgaatgagttggatgttgatgaccattggtcattcttcgtatctcttacgaggtagtagcgcttattagttcagaggaggacaacactatctaacactgattaaaataggggtgtaagctatgttctatttaggtattgatatcgctaaacataaacattatgcgtccattatcgaccaaactggaaaacctattactaagccatttccctttcagaatcataaagaaggcggacaagcactgttaaattggatgtaccaatatattgagtctcctacagaaatactgattggaatggaggcaacaggacattattggttagccgtttattcttttctacttgatcatggcttctcagtcgttgtattaaatccaattcaaaccaatgcttggcgaaaaggaacagaaattagaaagcgaaaaacagacgccattgatgccactatgattgccgatatcattcgattcggccgttttgttgaaaccccacttgtggacgagaaaatgttcgctctaaaacaaatgagccgctttcgtaatgcgcttgtaagtaatatgagtgatttaaaacgaaaagctcttgtcgtattagatcagactttcccagagtaccaaagcatcttttcggatgtttttggtaaaacttcttcgcaaatcttacttgaatatgcctctcctagtgactatgaacagatatctattgatgatttaacacaaataattgagcaaaccagtcgtaatcgactggggaagaaaacagccaacaagctaatggaattagcctctaattcgtttggtgttaccttctgtaaagacgctttttccttccaactaaaaatgttgatggaacaaattcgttttatcgaagatcaaatcaaagaatgtgaagaagaaatgtcacaacttttaattgatttagatactcctatcatgacaatacctggtgttgggcccattttaggagccactatactaagtgaaattggggatattcaccgctttgacaaaccatctaaacttgtcgcttacgcaggcattgatgcctctgtgtcccaatctggacaatttgaagcctcaggtacgtctatatccaaacgtggttcttctcatttgcgtagagccttattccaagcggctattacagcgcataaacatgaccctgtattaaaagctttttatgaaaagaaacgaaagcaaggaaagcactactatgtttgtataggggcggtagctagaaagctgtgttacattatctatgccattcttaaaagcaataagccttatgaagtaccacctcacacaacagaaacatgaccttttcattttttttgaaaatccttaggtttatttggcacgcccttttttagaaaaacaccccctatttatataaaaaactccccttgacttctcatagttggt

SEQ ID NO: 103 - DNA, 1183 bp, unidentified
  source 1..1183: mol_type = unassigned DNA; note = element_ISC1190
cttatataaaacatattagtcagatctgcgtattacagatctgactggggttgaggccgttgatctccttgggcttagagctcgagagggagcttggcctcctccaattcggaccggaagttgggcttgaagcccgaataaaacataagggtgagtatacatggaggccccagtcgccggaatagatgtttcaaaagataaattagtagtgtacttccaaggtaaatactatgaatttcaaaataataagcaaggttttgaaggagtaaagcaagtcttgccaaagggttgtaaagttgctatagaaagtactggaatttaccacatcaacttggctaagtacttgggtaaggagtacgacgtgaggattattaatcccctcatactcaagaagttcaaggacattaggggtaagaagagtgataagaatgacgctaaaaagctcgctgaactagttataagtatgggcagtgagtttacaacgagtgaggctaaggagttaacaagccaatgggattttatcacaaggagcattgttagggttaagaataggctaaggagagatttaatacttctaggctataaggacagtttgtccaagaagaacttgaatgaggtattgaggggggaggataatatagtattatctgaggttaggttcctcttggatgagttggagaggcttgaggttaggaagagggagattgaggaagagcttgaggatcttgttcctaaggatagtttgatcttcacgattccgggtattggcagaacgttgggttgtataattttagcaagggttggtgatgttaagcgttttggtgacaagaagaggtttgtcgcttattgtggtctcgatcctcttgttgaatccagtgggaagagtgttgtatcgagaggcatatctaggaggggtgatgctgttttgaggagggctttctatcttgcagctttaactgctatcaaggttaatcctattattaagcggttttatgaggagcacaaggggaatttgaagggtaaaaagttgattactgcttgtgccaggaagcttgctgttattacttgggctgtgctgtattataataagccctttgatgctagcgagtaaagcaggtgacatcacttgaataagtagtgtgtactatgctcgattttcacggaaaggtttttataccggaag

SEQ ID NO: 104 - DNA, 1244 bp, unidentified
  source 1..1244: mol_type = unassigned DNA; note = element_ISCaa14
catcctatgtttgtataaatgttgagtaaggaaaatctaaagagtaaattgattgcagaagaaaagggtaaagagcaaaaattaaggcacacattagctcataaaggctgttgcatatgctaatttctttactcaactgcaaagaccttggacagttcattaggctactgagcctgcatgtaggattgataaggcttgtgcagttccttctacctttttagggttagtagtaaaattatataaaataatatagctatgcaaagttcaataaattatgtaggggtagatatttctaaacccttctttgatgttgctttacctaatggccaagcatatacttactataagtttgataatagacaagatgggtttgaagctttattaaaagtgcttcctcaaaacagtgtggtagtcatggaagcctctggaccaccatactatatgaagttagcagcttatctcacccagcaagggataggagtgagtgttattaacccactagtaatccgcaggttttgtcagatgcgtatgtcaagggcaaaaacagataaaaaggatgcaaaaatgattgccgaatatggtcagatggaaaagcctgccctctggcagccaccgcagaaatatgttgtagccttacagcagatgcaagctttactggacaatctacataaagaacatacagcactcagtaaccagcatgaaggttttagcagcagtggtatgctaggtacaaagctagaacaaattattgaacaagagctcaaacataagcaagagctcattgataagcttactaaacagatggaagagctggccagaaagcattatggttctatgttagctgatttagaaaccataccaggattaggcagaaagacatctatcctgttaatagtactgatcggaggatttaaccgctttagtaattatagaaaactgggttcttatatagaattaagcccccggatatttgaatctggaacaagcgtaaaaggcaaagcaaggataactaagatgggtatgtctcgaataagagcgatgttatatgtctgtgcatggagtgctaaacgttacaacaaagcatgcagggagctttaccaacggttacttgccaaagggaaagctaaaaaacaggcgttgatagctgtcgttaacaagctccttaaacaggcttttgctattgtaacaaatcaaacagtctacgatgaaaattatgtgagcaaaccttgcttttgaacacagtt

SEQ ID NO: 105 - DNA, 1204 bp, unidentified
  source 1..1204: mol_type = unassigned DNA; note = element_ISCARN26
cttgtatgtttaaaccagatcagcgcggtgcagtctaatcaccgttgaggtgaccggaccggatcgtgcagcctgaaacgccctggagtcggcgagcgtgctcgccagctcgtggctgagtcgattgcgcacggaccccgtgctggtcttcctgacgcccgaacggttagttgagcggcgtttcgcctgctcgcatgcacaaggaagggatatgaagaccatgtctggatcatccgtgatggtgggcatcgacgttgccagtgcgcatgtcgatgtggcttgcctgggagcagtcttgccatcggagctggctcatgtcagcaacgatgccgaggggcattccgctctggccgacgccttggtgaagctgcagccggggctggtgctgatggaggccaccggtggctatgaggcggcgctggcgtgcgcgttgcaagcagtgggtctgcgtgtggcggtcatcaacccgcgcatggcgcgtgacttcgctcgtgcgatgcagcgcctggccaagaccgaccgcatcgatgcggccaccctggccgagttcgctgccgtgctggcccagcgccccgactgcgagcgcttcgtgcgtccgctgagcgagcccgagcagcaggatctcgcagccctggtcacccgcaggcgccagctcgtggccatgcagttgtccgagcgccagcgcttgcgcctggcccgcccggtgacgcgcccgagtatcgatgccctgctcgaggcgattgcccgccagctcgacgacgtcgatgccgaaatggtccgccatgtcgaacagcatcatgccgtgatggccaagctgttgcaaagcgtggccgggatcggccgcatcgctgccgcaaccctgatcgctgaactgcctgaactggggcggctcaaccggcgccagatctgtgccttggtcggcgtggccccctacgccaaggactccgggtccagccgaggccgacgacgcatcaccggcgggcgcttcgaggtgcgacgtgccttgtacatggccacgctcaccgccacacgattcaaccccgccattcgcgccttctacaagcgtctggtggccgcaggcaagctcaagaaagtggccttgatcgcctgcatgcgcaagctgatcacccacctcaacgccatcacccgggaccatctgaacgctcaaaatcagcctttcactgcttgactttcaacacggtta

SEQ ID NO: 106 - DNA, 1538 bp, unidentified
  source 1..1538: mol_type = unassigned DNA; note = element_ISCARN36
taatggaatgggtgcccccacccgatacggcatcgatgtgccaaagtgtggggttttgaagttccacgaacacgagaggagcacccgcgatgaaggttacgacgattggcctggatttggcaaagagcgtcttggtcgtccacggtgtggatgcgcagggcaagaccgtgctgaagaagcagcttcggcgcgatcaggtgacggcgtacttcgccaaccttccggcatgcctggtcggcatggaagcctgtggcagcgcccaccactgggcgcggcagttgcgggcgctggggcatgaggtccggctgatggcgccgcagttcgtcaaaccctatgtgaagaccaacaagaacgacgcggccgatgcgcaagccattggcgaagccgtggcgcgcccgagcatgcgtttcgtgccggtgaagacgcccgagcaacaggcgatcctggccttgcaccgtgcgcgccagggatttgtcgaagaacgcaccgcacacgccaatcgcatccgcgggttgctggccgagtacgggctggttttgccgcagggaatcgcccacattcgccagcgcgtgccgctgctggtggatgaggcgcgccagaagctgcccgggatgttcatcgagctcatcggcaggctgctggagcacttcaaggtggtggacgcccaggtccatgacctggaggcgcagatcgagcgctgggcgcaagagcaagacgactgccgcaggctacaggccatccccggcatcggccccatcaccgccagcgccctggtggcgagcatcggtgacgcccgcgccttcagctcggggcggcaactcgctgcctggctgggcctggttccccgccagcattccagtggcggcaagaacgtgctgctgggcatgagcaagcggggcgacagttacctgcgcaccctgctcattcatggtgcgcgctcggtgatttttgccaggcagcgtaaggctcctgtggggagttggctgcagaagttgctcgccaggtgccatgccaacgttgccgccgtggcgctagctaacaagaacgcgcgcacgatctgggcgctgctggcgcacaagcgcagctatcaggctggcttcgtgcccacaccgcagcaaggatgagcagcatggcgcaccacgatggtcgcgcggggtctgcagggaggtggcccccagcggggtgtggtccacctccctacacaagcgtatgcatgtgcagcgtcaaggggttgctgcgcagctctgacgagcgcccttgacgccacccgcagcacaggtttccgccaacgctttgaggagtttccccaccgattgcttcaggcgatcaagcagtgatggcaagataggtcagaccgggattggtcaaatctggcgaactcaacgggcattcaagcccgatggattgatgagataccgatccgcgaattccatcagggccagcggcaccatgccgcagcaaaggccggatgtatggctgcaatcgaccccttcaaaccgtcatgcgcgaaagccttgcaagccgggggcacccatgta

SEQ ID NO: 107 - DNA, 1281 bp, unidentified; identical to SEQ ID NO: 6
  source 1..1281: mol_type = unassigned DNA; note = element_ISCro4

SEQ ID NO: 108 - DNA, 1372 bp, unidentified
  source 1..1372: mol_type = unassigned DNA; note = element_ISCro5
cgatgtgatggacacctcccaccttacggcatcattagtgccagactgaggtgttaacttcagttcccagggggaggtgtccacatgaatattaaacgtattggcctcgatctcgcaaagctggtttttcagcttcatggcgttgatcaccatgaacgcgttgttctccgtaaaacactgcgccgttcacagatgcttgtctttttcgcccggcttgagccctgtcttattggtatcgaagcctgcggctcctcgcattactgggccagagagttgacccgactcgggcactctgtccgtattatcccgccccggttcgttaagccttatctgaagggcaacaaaaacgatgccaatgatgccgaagctatctgcgaggccgtcagcaggcccggtatgcgctatgttgccgttaaatctgaagcgcaacagagcatgcaggcagagcaccgggttcgtgcccgcctgcttcgcgacagaacggcgctcagcaacgagatacgcggcatgctgggcgagtttggccttgtgcttcctgtcgggcttgccgcgctcagacgagcactgccggagatactttctcagcaggaacaatgggataaccgctttatccgtctgctgtgcgagttagcggaggaattgcagatactggatgaccgactggcgcgttatgaccggcggcttaaacagctggcgcaggacgatgaccgtatcaggcggcttcaggagatcagcgggattggcccggtaaccgccagcgcgctggttgcagcagtgggtaatgcaagacagtttaaaaacggacgtgaaatggcggcctggctggggctggttcccgggcagcactcaagcggcggaaaaaaccggctgggtcacatcagtaagcggggtgacagctacctgcgaacgctgctgatccacggagcgcgtgcagtactgaatgcctgcggtaacaaggaagaccgtcgaagccagtggctgcagtcagtggcagaaagacgtaacaggaatgtcgcaacggtcgccatggcgaacaaaaatgcccgtatcgcgtgggccgtgctgagtcgggaagaagaatatcgcgtgatgtagaacgaaacggtaagagtgagagaaaagaataatcctgtcgtgagattgcagagtcattaagcacaaatgtgtaacaggtaagaccgacacctgaaaactccggtttatccgaaggctccctgcgaagcaaagccgtcaggccgaatggaaccaggtgtgcagataacatcatggccgggcacgacggtgccgaaagaaaggccggatatacgaaagcatcttactcccgttacacaaaacatgattagtggcttgcataacgggaggtgtccatata

SEQ ID NO: 109 - DNA, 1583 bp, unidentified
  source 1..1583: mol_type = unassigned DNA; note = element_ISCth7
cttgtacaatatagttagtttttcgacgtgctgaaaaatcaactttaagctctttgacaaccacataggaattctgataccttttgtctaaattattctcgtagtggcagggggcttcgatctacctccttgggaagcttaactgtcccgatttaaagagtgttgcccctcccctatgagatgtttcgaatgagcacgttgtggatgcggcttgctgcatgcctcgagtcacgagcaaggttgaaactcatagggagctgcgggaaaccctgccaaataatcagaaagtagggattaacatgttctatggtggtattgatgtagccaagtatcgtcatgagatttgtattgtggatgaaagcggtaatgtaatcctccaaatttttgtggataatactagaaatggccttgataaactcattcataacttgaagcgattagaaatcgaagtgagtaatgttgagttttgtttggaagctaccggccactactggctaagtctttactaccaccttacagagttggggtataaaatccatgtgataaatcctatccaatccgatgctttacgtaatttctatgtccgtaaaactaaaacagatcgtaaggatgctcaccttcttgcagatatcgttcgttttggtcatatttctgaaaccaaacttgcttcagaaactgttcttaagctgcaaaacctatcacggcttcgtttcgaatttgtccggcaagtgggtgggctaaaaaacagggttctaggtatccttgataggatctttcctgaatacccgcaatgtttttctaatgtttttattaatacatcccgggaattgcttaagtcttttactgcaccagaagacctggctgaagcagatctatcagagctaaccgattttttaaataagcattctcggggtaggttgggagttgatcgggccaaacagatacaggctctggctaaaggcacttttggcattaatattgcactagatgcttttactcttgaacttcgattattagtcgaacaaattgaatttatcgaagaacaaatcagtgttatagaagaagccattgaccaagttatggaggaaatgcggcctagtaaggatactgcttatcgacatgttttagagactatccctggtattgggcctgttcttgctgcttcaattattggagaaattggcgatattaaccgctttcctaatgctaaggctcttgtggcttatgctggtttagatgcaactgtgcgctcttccggtcagtttgagggtacccgtaatcgtatttcaaaaaggggttctcctgtcctaaggcatagtatttggctcgctgctgtttctgctagacgtttcaatccggaaatgaaagagttttttgagaaaaaacgcagtgaaggaaagcataccttggttgcaacgggtgccgtagctcgccgtatggttcacttgatatactctctatggaaagataacaggccttttgaccctaactatcaatggtcacccacaaactctcgttagtaccagaatctctatgtggttgtcaaagaacaattaaatatttgttgacttttcatagcacgt

SEQ ID NO: 110 - DNA, 1442 bp, unidentified
  source 1..1442: mol_type = unassigned DNA; note = element_ISEc11
aaatgtaatgaacgcatcccacacaattaaacacggagcagtatgatggttaaaagggtgaaactggcaggtgtggagcctcgcagatttccggcatcatagtgcccaatacgggatgcataaagctccctcagactggagactccacaaatgaaatatacaccggttggcgttgatatcgcaaaacatgtcattcagattcacttcatcaatgagcacacaggtgaagtggttgataaacagttgcgtagacaggattttctgacgttcttcggcaaccgtgagccatgcctgattggtatggaggcctgtggaggttctcagcactgggcacgggaactgacaaaacttggtcataaagtccggttgttgcaggcccgcttcgttaaggcattcgtcatgggcaataagaatgatgtgatggatgcccgggctatctggatggcggttcagcagccgggtaaagaaatcgccgtaaaaacagaagaacagcagtcggtactggttctgcaccgtacccgcatgcaactggtgaagttccggaccgcacaaattaatgccctgcacgggacgttactggagtttggtgaaaccatccacaaaggccgggcagcgatggagcgggagttccccgaagcactggaacggatgaaagagagactgccaccgtatctcattatggttctggaaaaccagtacaaccgactgaatgagctggactcactgatagaggatattgaaaaacagcttaccagcgtggcgaggcagaatgaaacctgtaagcggttgctggatattcctggcgttggaccacttattgcgacggcagcggtggccaccatgggggaagcatcagcgtttaaatcggggcgagagttcgccgcatatgttggtctggttccaaaacaaactggctccggagggaaagtacgtctgctggggataagcaaacgtggtgacacttatctcaggacattatttatccacggtgcaagagcggtggcattagtagctaaagagcctggcccgtggataaccgaactgaaaaaacgtcgtccagccagtgtggcaatcgtcgccatggcaaacaagctggcacgaacagtatgggcgataaccgcccatgaccgtaagtatgacaggaaccacgtcagtatcagaccatattaatcgctgataccattaaacaatgaactcttaacaaaagggtgaatgctgaaaggttgctatggcggccagagtgatgacaaagacaggtaagaccgtgactcactaaacctgaacagtattttgggcttgaagtccgccgtgaaaataaggggtgagtcggcgaattacataggggctcgcagcgttacggctgcaataaagccggatataaagctgcaacctacccgtcatgtcaaaacaatggatgccttgcaaacgggatgcgttcatat

SEQ ID NO: 111 - DNA, 1224 bp, unidentified
  source 1..1224: mol_type = unassigned DNA; note = element_ISEch1
cttgtatcttgctcatgtcgtgattagctatcacgacatgaaacagagtgagcttcgaaggagagtcagggctgtaaaccttgtgtgtgagtttaagccctctgtttcacctttcacgccagcattaacattgaacggttacccagagcactgactctgaatgtacaagcggaacgggcgtgatggcttcagtgaaagggggacatcgttatgtattatgttggtattgatatcagtaagcgtgtcgtcgatgtgtgtttgttagctgatggcattaaaggtaaacggaagacgaaaacgttacccaatggccccaacgccgttcaggcgttggctgaatggttgacgcgacaaaaatgtgagccgagtcaggcccatatcatcatggaagccacgggggtttatcacgaacacctcgcttatggtcttcatcattcaggtattgccgtatccgtgataaaccctcatcggttgcgtgagtttgccagggggatggggattctcacgaagacggataaagtggatgcctgtgtgctggcctgttatggctgtctgagacagccggagggctggacgcctccttcgccagaaataaggaaactcagggcattactgcagcacagggatagtctgctgggtgataaacagcgcctggaaaaccggctgagcacgttaaacgccacactgacgacggaagaagtggtgacatcgctggagtcgatggtgcagcacgtaaagggtgagctggagcgtatagaaagactgatagaagaccacatcgacaggcatcccgggctgaaaaatgacctgaaactcctgaagtcgatagatggagtgggagaccaaatcggatggaacatgttggccaccatcaggggcagtaacttcaggagcgcagaacaggtggcggcgtatctgggggttatcccggtagagcgtcgctcgggaacctcggtacgtggcagagcgaggttgtcgaaaatagggccgcctgctatcagggcaaaactgtatatgggagcaatagcggccatcagtcacaatcgtcatgtgaaggcgcaatacgagcgactgttgctaaaaggcaaggcaaagatgctggcgataggagcggcgatgaggaagctggttcatctgtgttacggcgtgctgcatacgcagcaacgatatgacagggattatggggtggtagccagttgaaatacttgactggagacacggtta

SEQ ID NO: 112 - DNA, 1355 bp, unidentified
  source 1..1355: mol_type = unassigned DNA; note = element_ISEch4
ttaataagatggtcacccccaccctgtgagcggtacgctgacagggtgtttttctttctgaaggggctcatcatgcaaaacgttacgctcatcggtatcgacctcggcaagcattcgttccatgtccacgctcaggataaaaacggcaatgcattgctacgtaaaaagttttctcgcaaccagttaaccgcctttctctctacttgtaccgcttctaccgttgttatggagtcctgtgccggcgctcattttatggcacgacacatcagccagttcggtcatcaggtgaagctcatctctcctcagtttgtccgaccctttgttaaaagcaacaagaacgatttcattgatgctgaggctatctgcgaagccgcctcacgaccttctatgcgtttcgtcactccgcgaaccgaggaccagcaggctatgtcagcgttccatcgcgtccgtgacactctcgtcagagaacgcgttaaaacgaccaatcagatgcatgctttcctgctggagtttggcattagcatgccgcgcggcatcgcgattatcaggcgtcttgccgtagtgcttgaagagcacgaactgccgccttatttagcgcgattgcttatgcgactccatcagcattatgcctgcctcaccgaacagattaaggagctcgaacaagagttaaaaatccacatcgcgggtgacgataccgcgcagcgcctgctgactatccccggcgtcgggcttatcacggccagccttttagccacgaagctcggcgacggaaaaagttatgccagcagccgggactttgctgcctcaacggggttagtcccgcgtcagtacagcacgggcgggaaaagtacgctaatgggcatcagtaagcgcggggataaaaatctgcggcgtcttctggtgcaatgcgctcgcgcttttatgcaacggcttgaacacaatcagggacggctggctgactgggtgaagacccagctctcgcggcatcactcgaacgtggtggcctgcgggctggcgaacaaattagcccgaatagcctggtcggtgacaacccatcggacagcgtttatccaataaaaaagagccaacagcgacgaacagttagctcttgggtgttacgcagtgactttctggttttgcgacgactgattattgatgacatgaacggcacagcgacctggggatgaacctgacataaaaaatggctctttgaagccgtccggtttttaaggttctgcaggcgcggacttcatcgtggcgcgggcaacgtaaggttgcccatcagacgccgtatagatttaagcaagcccatcataaatcaaaatcggtgttgcaaaaacgggggtgaccataga

SEQ ID NO: 113 - DNA, 1611 bp, unidentified
  source 1..1611: mol_type = unassigned DNA; note = element_ISEnfa110
ctattacaataaatttggacaggaaagccggacagccagtccggctttccctccatctcgtgcctaagctacaatgagaggagcaactggctgaccaatcactccttgggcttgtatgtccgtgtgaaagactgttagccatcctctcgttgcagcgttcgatttaagcaggttgaaccaccggatgtcggagagttcgtgtcacacaatagattgaatcggcagcgagaaaagatggattccggttgcagattctttgtattggaggaatgtgaatgaactgcgttggcatcgatgtttccaagggtaagagcatgattgcagtcatgcggcccttcggagaggtagtggtttcaccctttgaagtacgtcacaccgccaatgaactgagcgagctggcaggactgctcaaaagcctggacggcgagacccgtgtggtgatggaatccacgggtaattaccatgctccggtggcctggctgctccacgacgcgggcctttatgtctcggtagtcaatgcaatgctggtgcatgactacggaaacaacagtttaagacgggccaaaaccgacaaaaaggatgccgtaaagctggccaactacggtcttgaccactggctcacattgccgagatatatcccggaggaggatacccgactcatgctgaaaatctgctaccggcagtaccaacagtattccaaagttcagaccatgctgaagaataacctgatctccctgctggacaccaccttcccagacgcaaatcgcttgtttaccagtccgccccgcgccgatggcagcgagaagtgggtggactttgtcgctactttttggcattgcgagtgcgtttgtggccggtctgagaaggcctttactacccaataccagaagtggtgcagaaagcacggctacaatttcagcgaggataaggcgctggatatttatgcctctgcttgcagacacttcggtgtcataccgaaaacggatacggcaaaacttttggtagaacaggccatttctcaactccagacaacttcttccgcgttagctgctctcaaacaggagatgcaatccctggcagcttctctgccggagtatcctgtagtgatggggatgtttggtgttggcccaaccctcggccctcaactcctggctgaaattggcgatgtacgccgttttcattccaaaaaagcgttggttgcctttgcgggtattgacgccccgccctaccaatccggtcaaatagatgtccgtagccgtagcatttccaagcgaggatctgcctcactgcgcaggacgctctttctggtgatgagcgtcatcctgcaatgtgctccaatagacgagccggtgtaccagttcatggacaagaaacgctctgaaggcaagccatatcgtgtctacatgatggcctctgccaacaagttcctgcgcatctactacgcttctgtgaaagcctacttggaatccctggagcacgactgatttttacactctataccatctggctggccgccgttttaattttgagatgctcagcggcttgattttgtattgcattttttcgcctccctaaaaatctgaaatttctacttgacttttattagcaggt

SEQ ID NO: 114 - DNA, 1555 bp, unidentified
  source 1..1555: mol_type = unassigned DNA; note = element_ISFnu4
tgtatgataaatatataaaatatttatctatacaacctcctttcatagtttattttatttattattttttatataatctatttatactgtggactttttatattcacttaaagagcttttgctacttttttagggagattactgccacactcttttaactcatatacttatagttggataagtctttaaactttcatttatcacaaggatgtattgtttttttagatgtggattccacagttattattttttaaggatgtgattttatgtttttactaggtattgatattgctaaacttaaccatgttgcttcttgtattgattcttccactaatgaaattgttttttctaattttaaattcaaaaatgattttaaaggttttagtactcttttagataaaatcaaaacttttgatactaaaaatcttattattggcttagaatcaacttctcattatggagaaaatcttatcaattttttatttaaacaacattttaaagttgcgcttattaatccattgcaaacttcacatctaagaaaagccaacattagagatgctaaaaatgataatttagactctcttaatattgctaaatctttaatttttgctaaacttaactttatttctgagaaaaatattaactgtttctctctaaaaaaacttactaggtttagaagtagcttaattaaacaaagaagtaaagctaaaattcagttaacatctttacttgatttactttttccagaattacaatatctttttaaaagtaaaattcacagcaaagctatttactctcttcttaaaaaatatccttcaacagaggagatagcagccctaaaagatgatgaaatttctaatcttttatatgcttcttcaaaaggacatttcaaaaaagaaaagtccattgagcttaagagtcttgctaaaaccactgttggaattaaagatacttcaatatcattacatgtaattcagttaatagaattaattgaattatatgataaacaaattaaagatattgtaactaaaatagctgatacagttgataaattagatacaaaattattatcagttcctggaataagtattattgcttgtgcaataatattaggagaaacaaataacttcaataatttttctgattctacaaaattacttgcgtttgctggtcttgatcctaagataagacaatcaggtaattttaatgcttcatcttgtagaatgtctaaaaaaggttctccatatttaagatatgctttaatttttactgcttggaacattgttagacattcagaaaagtttaacaaatactattgtttaaaacgctcacaaggcaaatcccattacaatagtcttggacatgttgcgcataaactagtgagagttatatttacactgataaagaagaatattgtttatcaggaagaaaatttagaatagtatttattaaatttcaactattgaaaaaactaagagtttaaaactctaattttgttatgccaaaaattcttatttaaatttttttaaaaaagttcttgacttttcatagttgg

SEQ ID NO: 115 - DNA, 1190 bp, unidentified
  source 1..1190: mol_type = unassigned DNA; note = element_ISFop3
gattgtaagttaaattcttagtataatgtgtttaccaaggagttaaatcaagactattttaatagttttgattataacccaagcgaccggttcaggatagatttaaacaatcgttgtcatcaaggtacttgggttatctccttaatacgtttgtatagttgcttggttttaacgaccgcttacaatcgcaaatatttgtaaacatactaaggagatatttaaaatgtatcataatttcatcggtattgatatatcaaagaatgattttgtagtagcaattcatggtaagaaaaagacttttaaataccttaataacttaactggctttgatgaacttttatcagatcatcctatactcaaggataaatcttttgtagttgttgaaactaccggaggctatgaaaaagctttacttgaatatttaataactaaaaatatagttgttcacagagctaatactagaatagttaaacattttattcgctctacaggtcaattaggtaaatcagataatattgatgcttttggactagctaagtatgggtatgaaagacaccgtgacctagaattttatcaacctaatgatgataaaatgcaaaagcttataaaatatattcttagaaaacaagatattaaaaaacagttaacagctgaaaaaaatagatatcaagcaccagaccaaaaatatacaaaagattctcaccaaagaatgatagagttctataaacaagaaattatgattatagaaagccttataaatgagttagtcgatgattgccaatacttagcaaaagctagagatctattagttaaagaggttactggtctaggaaatgctacagccacatctttacttgctttgatgcctgagttaggaaacttaaaccgtaaacaagtggcttctttagcaggagtagctccatatccgtatgaaagtggcaagaaagttggctatagaaagacttacggcggtagagctgatttaaaacctatattatttatgtcagcattaactgctgctagaagtaaaggtaaacttggaatattttatagagaccttgttgaaaagggtaaaaagaagatggtagcccttgtagctgttatgagaaaaattatagtcattgctaatgctaaaattagagatctaaaaagagatttgaagattttataaataaattagcaacatagtt

SEQ ID NO: 116 - DNA, 1162 bp, unidentified
  source 1..1162: mol_type = unassigned DNA; note = element_ISGpa2
cttgtatattaaaattatagtaaactagcaacataaaccataacgttatccacagcttgggtgtccctagagctaaaactcgttctgtagcgtaggcgtggataacttcatcagcaaaaccgaacagttgaaatataaacccgaatacaaggcaggttaccgatgaacgctccgatttattgtggtattgatgttgctaaacgcaatttcgtgattggtttttcccatcagaaaaagaccaaaaccgaaaccaataacgctaaaggtattcaacataccttggactatttaagccagtttaatgtggctctgataacgcttgaagcaacgggtggattagaaattcccgtggcaaaagcccttgctcgagcaggttatcgtgtatttattgctaatccactgaaagccagtgagtttgcaaaatctcaaacgagagccaaaaccgatgcaaaagatgcggttaatctcgctttctatgggctcacttgtgagcttaaaggcgaagtagagcatcagttgtatgttccgctttctgagcaagaagaacagctggaagcccttgtggttcgccgtcgtcagcttgtggatatgcgagtagcagagctaaatcgtttgcaacaaagccacgaaacccagttggacaatatccaacaacacattgaaatgcttgataaattaatcgccgaacttgataaagatatcgacgaccaaagtaagcattttagtgataaagctgaccttatctcagacatcaaaggcgttggcaaaaattgcgtcgccgtgatgatgtcaagcctgccggaattaggcaagctaagcagtaaaagaattgcctcactcgttggcgttattccgcatccacaggaaagcggtcaatggaaaggaaaatccttttgctatggtggtcgagcgattgttcgtaatgccttatatatggcagcactatcggcaattcgctttgaacctgtttttaaagccttttacacccgattggttgcaaaaggcaaagcgaagaaagtcgctattatggcgtgtatgcgtaaactgctaaccattatgaatgcgttggttagacgcaatgaaaaatgggatgctacacgctacttatccacagaatctgtgggtcaaaattgaataacttttttgtgtgtaaacacagttg

SEQ ID NO: 117 - DNA, 1625 bp, unidentified
  source 1..1625: mol_type = unassigned DNA; note = element_ISHaha5
tttcgtattataaggttaaccagaattctagatatttctggttgaccatttttaatatggtcttattattacagtagccagggtagaacgcccctgcccgtgggacttagatcccgtcagctaaaccgttcaccccctactggtagaaacatgtttgaggctggttgggacaagatcccgtataacaagcgaagctatgatactactaggaggactaggggttactggcaagatgaatctgaggaggagatatagaatgaatccagtcgtgggtctggatgtttcaaaaggagaaagtgaggttcaggcctttttagataaaggaaaaccttacggtaaaagttttagcatcaagcatgacctggatggactaggctcactacttgagtttatggaaggtgtaaaagatgcaacaggcattcaaccttcggttgtactagaagctactggacactatcacgcaccagtggtgcagtttctggagcaacataactatttattgattattgttaaccctttgatctctcatagagctaaaagctcaagtttacgaaaagttaaaacggatgccattgatgcttatcgtctttgtgagctttactacaaagaagatttagaaccttataaaagacgcggtactcagcttttaaacttgcgtaatcttacaaggcaacacgagaatattacgggaatttatgtgcaaaccaaattacaatttcaagcagtactggatcaaatattccctgaatataaaggggtttttggtgacttatactcagtggtgtctttacttgtgttaaaggaattcccttcatcagaagacattttagctgttagccaagatgcgttagctgataaaatcaaggaattctgtaagagtcggtctaagagatgggcagcggaaaaagctcaggaacttaagaaagcagctgcacggaacccattcaaaaagacactttatcagagtcatttactgagtcttggtatgtatatcaatatgcttcttcaatacaaagagcatctatccagattggactcagagatagatgctctcgcaaaagaagttgaagaatataagatcatccaatctatccctggtattggagaaaaaatcgctgccacgattatttctgagattggggagatagaccggtttaatcaccctaaaaagctagtagcattcgcaggagttgatccagaagtacatgaatcaggtaagtttaaggcgactttagttcggattacaaaacgtggttcaagccgactacgtcatgccctatatatggccgttagatctggtattcgtgattgtcgcaaacaaaaaacaacagccgaaattatccctagaaacagaaaattaagagcgttttacgacaagaagcgaaaggaaggcaaattatataaagtagccgtcattgcttgtgtaaataagctcttacattggatttatgctttattaaaaaacaaaaccactttccaagatatagcgtaatcactatttccatctaaataatacaaaaccttccaatcaaacatttgaggaaggttatttgccatgcgcatttttagtataacatgggttaccttaagtttttattgaaaaatgttgacaaactattagctgg

SEQ ID NO: 118 - DNA, 1387 bp, unidentified
  source 1..1387: mol_type = unassigned DNA; note = element_ISHar3
tactgagatggacccggcaccaccaacaggatcaaactaaggtttcatccaatttatgtggaggtgtgtcatggatatcgacattctcggaattgatttggctaagcgcgtgttccagttacacggtgcggatcgcagtggctgtgcaaagtatggcgctaaagtgatgcgcgcagagcttctgaccaccgtccgcaagctgtcacctcgaattgtggccatggaagcgtgtagttcagctcattactgggggcggcgcttcaaggaaattggcattgaagttcggttgatcagtccgcaatacgtcagccccttcgtcaagaccaacaagaatgatgccaatgatgcagccgccatcgttgaagctgccagcagaccgaccatgcggtttgtacccgtaaagtcgattgaacaacaagacatgaaagccgttcatcgcgtacgcgaattattggtgcatcaacgtacagcgttgatcaaccaagtcagaggtttgttaggcgaacgaggtgtgatcattgcgcagacgcctgcagcgttcaaacgtgcaatacccaccgttctggctcagtgtgagggcgacatgacacctaccttccaggccattttgatcgagctactggaacagatgcgtatcctggaagaacgtatcgcgcgtaccaatcaatggatcgctgcatttatgaagaattctgtcttgtgccagaagattcaggccatcgatggcgtgggaccgattaccgcgacggcgatggttgcagccgtgggtgacgcaaaggaatttaaaaacggcaggcacttgtccgcatggctcggtttggtgccacgtcaatattcctctggcggcaagtctcgcctgcaaggaatcagcaagcgtggcgatacgtacttgcgaacgctattaattcacggtgctcgggtggtattgcgctacgcgatcggtaaaaccgatgcgcgcagccgatggctacaagatctgatcgcccgccggggctataaccgggcagccgttgcgctggcgaataagaacgcgcgcgtcattcaagtgttgttgagccatccggatggttatcatttatcggaaggggcagtttgataaactgctgatttgcttctgtggttttgtttgtgaaggaaatagacctatttctcgttttgcgaagcttcttgaagtgatgacgaaactggtaagaccgatacccacaaacctgctttcgatgcggactgtcttcagggacaagccgatgatttgctaaggaatgggtgtgcgaatctcatcaaggctgcgggcacgtatttgacatgagcccacgagcaagccggatacatgcacgcaaactgtttcaacgttactaaaagaacttgcaaaaggtgtcgggtccataca

SEQ ID NO: 119 - DNA, 1359 bp, unidentified
  source 1..1359: mol_type = unassigned DNA; note = element_ISHar6
taatgagatggtcaccctccaccctacaaagtactaatcttgtagggtgttttcacttctgaggaggccatcatggaagacgttacgctcatcgggatcgatttaggcaagtataactttcatctccacggccaagaccggcatggcaaggcgctgttgcgcaagaagttcagccgcaggcagcttattgactttctcgccaactttcccgcatgcactatcgtcatggaagcctgtgctggcgcgcattggatggcccgcgaactggccggtttcgggcatgaggcgaaactgatctcgccgcaattcgtacgtcctttcgtcaagagcaacaagaacgatttcatcgacgctgaagctatttgcgaggcggcttgccgccccgccatgcggttcgtgacgcccaagaccgaggctcagcaatgcctgtcggcgctacaccgtatacgcgaatcgctggtgcatgaccgggtcaaagcacgcaatcagatccatgctttcctgttggagtttggtatcagcctgcccactggccaccccagcatccggcgcttgcctgctctgctggcagaacaagcgttgccgccaagattggtgagcgtgctgaagaagctgcacttgcatttcaaatatcttgaggagcagatcgccgacatcgagaaggagctaggccggcaactgcaggaagatgacttgggacagcgtctgatgacgattcccggtatcggtccgatcaccgccagcgtactttccgccgagatgggcgacggcaagcaatatggctgcgggcgtgattttgctgcatcgatcgggttggtgccccgccaatacagcactggtggcaaagtcaagctgctcggcatcagcaagcgtggcgataagacgctgcgacgtcttttggtgcagggcgcgcgttcctacatgcagcggctggatcggcacacggaccggttggcgcagtgggtacgcgccatgctgatgcgccgccacgccaacgtggtggcttgtgcattagccaacaagctggcgcgaaccgcatgggctatcgccgccaaacataccgaatttgaaaagcaggaggccgtcacgcacttgtgacggcctcctgagacttgcagtaccaagattacccacctggttttgcgacgactgacattggatgacgtgaacggcacaccggcctgacggataacctggaaaaaaaaccggctttcgaagccaatgcggtttttaggaccgacaggcgcgactctcatcgtggcgcggaggtttcaattctctaaacagacgccggatagatttaagcaagcctaaccacatcatacaaaatcagcttgcaaaaaggagggtgaccataga

SEQ ID NO: 120 - DNA, 1151 bp, unidentified
  source 1..1151: mol_type = unassigned DNA; note = element_ISHne5
cttgtcttatggcatttgcgtctgatctggtcagactggaaccgctgacgggagttaccgctcccgtcagcggcgagggtgggaccgtgacttcgcaggcgcctgggcgccgttcctgagtgaggtcgccctcgtctttcccatcggcctgaacggatacaggggctttgaggcccgcatgacaagcagaggcaggaaagatgacactgattaccatcggcgtggatgtttcaaaagacactcttgatgtccaccttcatcctgacgggttgcaccgtcagttcacaaacgatgccgccggctatcgcacggtcctcggctgggtcgcgggccggccggtcgcccgcctcgtctttgaggcaagcggagcctaccaccgagcctttgagcgcgcgatgggcgaggcaggccttgctctgtgcaaggtcaatccggcccgggcccggaggtttgcagaggcaattggccagagcgccaagactgaccggatcgacgccgccatgctggcccggatgggggctgttctggagccagccgcgcgcgccgcgccgtcaaaaacagcgagtgatctcaaagagttgcacatgatgcgagcggccctcgtcaaggacaggacggcggcgaagaaccgcgccggaacgctcaccctgccgcttttgaaacgccagttgcgccagaggctggcagccattgaccgccagatcacacagatcgagcaggccatgcaggcgctcatcgaggctgaccccgagcttgcccgcaagcgggacatcctcatctcgatccccggtatcgccgaacgctctgcctttgccctcctgaccggcatgccggagctgggcgacctcggtaacccagccgccagcgccctctcgggaaccgcgccgcgaacccgccagtcaggcaagtggaccggcaaggcgttcgtgcagggcggccgcgcccatgtccggcgttcactctatatgccagccctcgccgccgcccggttcaaccccgacctcaatcatacctacaggcatcttaccggccggggaaagccgccaaaacttgccctcaccgccatcatgcgaaagcttatcatcctcgcaaacacactcatccgagaaaatcggaaatggacaccaaaacccaattgaccaacacggata

SEQ ID NO: 121 - DNA, 1306 bp, unidentified
  source 1..1306: mol_type = unassigned DNA; note = element_ISKpn2
taatgggatggactacctactcccgctgcggttaactgtacgaaatgtgctcaccaggagaatcaccatgaatatcgtatttctgggtattgatctggctaaaaatgtttttcagctctgcgggttaaaccaggccggcaaaccggtttatacgaaacgaactggccgaaaagaattgctccagacgctggcaaatattcctgcatgtctgattgggatcgaagcgtccaccggggcattttactggcagcgtgagtttgagaaactgaggcacaaagtaaaggtcatcagtcctcagtatgtaaaaccctttgtccgcgggcaaaaaaatgatggtaatgatgcacaggccatcgcagtggctctgatgcaaccgacaatgcagttcgtgccaccaaaaagccccgaacagcaggatatccaggctttacaccgggcaaggcagcgtattgtcaatcgccgcactgctacagtctgtcaaataagagggctgttacttgaccgggggagccccattggcagtgctgtctccagagctcgccgggctattcctcttatccttgaagatgcagaaaacggtctaagttcccgtatgcgcagaacaattgccgagctctatgagctctttaacgatctcgggcgtcggatccatttttttgataaggaaattgaaacagtattcaggcaatcagaagcctgtcagcgtatcgccagagttaaaggcattggccctaaaacggccacggccattgttgctgctattggcaaaggaactgaatttaagaatggccgccactttgctgcatggctgggtctggttccacgccagcattcgagtggcgacagacaggcgctgatgaatatgatgaaaaaaggcgacaagcatctgcggacactttttattcatggcgcccgcgctgtcgtcagggttgccacgaataacaatgatggccatatgaatcagtgggttaaccagttaaaggaacggcgcggatttaataaaacgaccgtggcggtcgctaacaaaaacgcgcgaataatctggtcgatgctgagaaatgagaccgagtatcaggtagtgtgaaattaatcccctaccagaaaaagttgcagcgtactgagaaatggtgacaggtgcacctgcacaatcggaacctgatttttatactggcctcagaggccgtccagttgttgaggcgattgtgtgcgaattacccatttggcacagattttcctgatgccggataaatgtaagcaacaacccaaaaccagattaagtacttgcaaaacggaggtagtccataga

SEQ ID NO: 122 - DNA, 1166 bp, unidentified
  source 1..1166: mol_type = unassigned DNA; note = element_ISKpn42
cttgtatcttgaagactgattaaaattaatacgattagatttggcaaaacgtatgcagcccgatgccttccagggtacaagcccgtatatcagcgactggcgcatacgccgagccactcatctgaaacccgaacagttgtccgtattccataacgtatttgcaaggaggggtaaaaatgagtcagccaaatccactttgtgtgggcatcgatgtttccaaagccacactggacatcgctgccagcagtgatgttgctcagtttacagtcagcaatgactctgatggctttaacgcgattattaccggactgagacggcactccgttgctctggttctgatggaggccactggtgggctggaagttgcggtggcctgttcgcttcaggccgaaggttttgaggttgccgtggtcaatcccaggcaggcccgtgacttcgcccgtgcaatgggatatcttgcgaagaccgaccgaattgatgccagagtcctcacgcagatggctgaggttattaatcgtcaccctgagcggaaacgctttatcagggcactgccggatgctgaacgtcaggcccttgctgcgatggtggttcgcagacgccagttgattgcgatgttggtggctgagcgtaaccgactgcatccattccatccgcagaacaagaaaagcattaataccatcattaaagcgctggaagatgagcttgtcaggctcgagaaagaaatggacagtcacatccgtaaccactttaaagagattgctgagcgcctgagcagtatcaaaggtgtaggcaccatgaccgtttccgcgatgttggcggagattccggaactgggaacgctctcccgacgcgaaatcagtgcgcttataggtgttgctcctgtcaaccgggactcagggactatgcgtggccggcgaaccatttttggcggcagggctggcgtaagatcagcactgtacatggctgcgcttgtggcaacccgctttaatccggtgataaaaacgttttatgtgcgcctgcttgcagccggaaaggccaaaaaagtggcgctggtagcctgtatgcgtaagctgcttaccatcctgaacgcaatgctcagaaagaacgaagaatgggatgagtcgtaccaccacgttgctccataatttttaccttcaagacagttg

SEQ ID NO: 123 - DNA, 1470 bp, unidentified
  source 1..1470: mol_type = unassigned DNA; note = element_ISKrh6
ccgttaccttgtgagtgcctccgatggtcgggggtctggtcgctcggccgggtatggctttgttgccctgccattgatggtccggggggtgttgccgcccggtcgagagacacgcgttgaccgctgatagggacacggcccgccgccgtggtggcgaggtctcttcgtaacgtgggtgccggcatcgggtgtcaagactgcgaccagcgatggtgcgccaaggaggctcatcatggagaaccgtttcgcggtaatcatcggcctggatgtgggcaagaccgcccaccacgggtgcgcgctggatgcgaccgggcacaaactgttcgacaaacccctcccgcaggacgagacccagctgcgggagttgttcaccagcctgcaggagcgtggtgaggtgctgatggtcgtggaccagcccaacaccatcggggcgttgccgatcgcggtggccagagacaccggctgcgctgtggcgtatcttcccgggttagctatgcgaaaagcagcagacctgtatccgggaagatcgaagaccgacgccagagacgcgttcatcatcgccgacaccgcccgcaccatgccccacacgctgcggcaggtcgaccatgacaacgaggtcctctccgcgctgaaagtcctcgccgggttcgacgaggacctcgcccacgagaccaccagggcgttgaaccggatccgttcgctgctcacccagatccaccccgcactagaacgtgtcttccccggcgggaccctctccaccgacctcgtgctggagctgctagagaagttcggaggccccaccgggttcacgtccgctgggcgggggcgggttttgaggttcgctcgttcccattctcgccgcgatccctctgcgctggtcgagaagatcttcacggcgctgagcgagcagaccgtgacagtgccggcgaccgcggcggtcgagctcgtgatccccagggtggccgggcaggtcaaggagttgaaagcgcaacgggccacggtcgcccacgaagtcgaggccatgctggaggacttccctctcgcctcggtcttgatgagcatgccggggatcggcatcaagaccgcagcccagatcctcctcgcgatcggcgatggcaccgggttcgagaccgcgggccacctggccgcgtatgcgggcatcgccccgatcacacggcgatcagggacgtcgatccgtggtgagttccccgctcgttcgggcaacaaacgattgaagaacgcactgttctactccgcgtggatcgcctcgaatcgcgacccgatctcgaaggcctactacgatcgcaaacgagccgaaggaaaacgacacaacgccgccgtgatctgcctggcccgtcgtcgttgcaacgtcatcttcgcgatgctccgcaacggcacctactaccaaccgcccaccgcccctacccccgaaccaaccgctctcgcggcttgactcggaacatagggaca

SEQ ID NO: 124 - DNA, 1377 bp, unidentified
  source 1..1377: mol_type = unassigned DNA; note = element_ISMahy7
gaatgatatggactccccctgctccctcggcatcgatgtgccacattgaaggtgtcgaagtcttcaatcgaaagcaggaggagtcatcatgaatgttacaaccatcggcatcgatctggcgaaaactgtgttcagtattcatggcaccaatcaacacggcaaggtcgtggttcgcaaacggctcaatcgccctaaactgctggcgttcttcgcacaactgcctccgtgcctgatcggcatggaggcctgttccggtgcccattactgggctcgagagttaaccaaactcggccacgatgcccggatcattgcgccccgctttgtcgcgccgtatcgcaagagcagcaagaacgacgacaacgatgccgaggccatctgcgaagccgtcagtcggcccaacatgcgcttcgttcccattaagactgatgaccagcaagccgttctgtgcctgcatcgcatccgccgtgggctgaccaaagagcgcaccgcgcagatcaaccagattcgtggtctgttggccgagttcggactgattattcctcaagggcgctatcacgcccgacatcgaattcccgaaatcctggaagatgccgaaaatggtttacccatgctggcccggcgtttactcaacaacatcaaccagcgcattctccagctcgatgaggagatcctggcctatgaccgggaaatcgaagccatggcccggcgcgacgaacaggccaaacggttgatggccattcccggcatcggcccacaaacagccactgcgatattggccagtgcgccggatcccagacagttcaaaagcggacgacacttcgccgcctggctcgggctcgtacccaggcagtactcgaccggaggcaagccccggctgggtagaatcaccaagcgcggggacaagtacctgcgaatgttgctgatccatggcacccgagcggtgattgccaaactcgccgacaaacacgatcaactcagccagtgggccaaagggttggtggaacgtcgcggctacaaacgagccgccgtggcattggccgccaagaatgcccggattatctgggcactgttgatgaaccaaaccgagtttaaaacacagcctgcagagggctgataacgggcaacaacgacaggcagaacacgcctgccagccgagtcttgcaacggcaagcgatgacggaacggtcagaccgagagtgattgaacctgttaagccttgcggctgaaacaagccgactaacgaatgaggtcatcactcacacgcatcatcatcctggcccgggcaacaatgcccacacagaggccgaatgtagagctgcagtctcaaaccgcttcgaaatcaaatggcgttgcttgaccgcagggggagtccatgta

SEQ ID NO: 125 - DNA, 1379 bp, unidentified
  source 1..1379: mol_type = unassigned DNA; note = element_ISMch6
cagtcagaagatcggtgccagttcccgggcggtctgacccgcacagcgatggaccgtcggttaagctggcgccgcaaggcgtcctggtgtggcctgacccgcactctgatcgaccgaacgtgtccttccccggacctgtcggccgcccgggaacgccctgcggtggggttttacctcgccgatgcctgtgacccgagaagggcctgaccgtctggtctcgtgactgtcctgtccgcgcatccggtcgtggtgaagccgtcaggctcgatcgccaggaggatgggatgagtgcgcaggaagttcgggaacgacacgtcgtcgggggtgtcgacacacataaggatctgcacgtggccgcggtcgtcgacgaccgggatcgggttctggcgagcgccagctttgatgcgacccgccagggctatcggcagatgctggcctggatgcgttcgttcggatcgctgcaacgcgttggggtcgagtcgaccggcagctatggtgccggcctgctccgcttcctccagcaggccgggatcgaggtgctggaggtgaccgcccccgacgcccaggatcggcggcgtcggggcaagaacgacgacttcgatgcccagagtgcggcgcacgccgccttcgccggcacccgcaccgtgacgccgcgcacccgggacggcatggtcgagtccttgcgcatcctgagcgcgtgccggaagacggcggtcgcggcccgacgcattgccctgcagatgatccacaacaccatcgtctgcgcgcccgatgccctgcgcgagacgctgcgccggatgacccggatgcagctcgtgcggaccctggcggcgtggcggcccgatctgagcgcctaccgcgacgtcgaggccgcttaccggatcggcctgaagtcgttggcgcggcgctacctggaactgcacgacgagatcgccgatctcgatgccatgatcggcaccatcgtcgacgagcttgcgccggaactcgtggcccgcaactccatcggccgcaatggcgccgcgcagctgctcctgacggccggcgataaccccgagcgcctgcgctctgaggcaggcttcgctgcgttgtgtggcgtgagccccgtgccggcctcgtcgggcaagacggtgcgccatcgcctcaaccgaggcggtgatcgcgcggccaacagcgcactgcacatcattgccatcgggcgactgcggaccgacgcgcggaccaaggcgtacatggcccgtcgcatcgccgagggccactccaagctggaagcgatccgctgcctgaagcgctacatcgcccgggaggtgttcaccctcatcacccgcaggcagaaggcgatccgtcagacccgcatcgccgcttgacacatagaagggcgt

SEQ ID NO: 126 - DNA, 1405 bp, unidentified
  source 1..1405: mol_type = unassigned DNA; note = element_ISMlo1
tgttggtgtggacggcctcctgcacggcatcaatgtgccagaatgaggtcatcggagacctcaagcaaaggagaccgccccgtggagcaaattattcgaattggcatggacacgtcaaagcacgtctttcaactgcatggtgtgaatgcagccgaagaggtcgtgctgcgcaaaaaaatgcggcgtaaggagatggtggctttcttcgagagggcggcgccaacggtggtcgcgctcgaagcgtgcggcggatcgcatcattgggcccgcctgcttgaggcgcttggccatgacgtgaaactgatcccgccgcaatatgtcaaaccgtacgtaaagcgcggcaagaacgacgcggccgatgcggaggctctttgcgaagcggtaagccgcccgacgatgcgcttcgttcgggtaaaaaccaccgacaaccaggcggctttgatgctggtcggcatgcgtgaccgactggttcgcaatcgcacgcaacttgccaacgccatccgcggatacgctgccgagttcggattgatcgctgccacaggtacatcgaaggtcagatcattgctcgagcgtatcgcgactgatgaaacgctgcctgaactggcacgtgaactgtttgggctgcacggccgcgaatatgatcggctggaggacgaaatcgaaaaggtcgaagcacggctgatggcgtggcatcgcacaaacgaatgcagtcgacgcctgacacggattcctggcgtcggaccgatcggcgcattgatgatggtcatgaagaccccggcgcccgagacgttccgatcagggcggcacttcgcggcttggcttggcctgacgccgaaggatcactcgacagctggcagggtcaggcttggcgtgatcacccgagctggcgatgaaaatctgcgaagcgtgctcgtcgcgggcgccaccgctgtcctccggcatgttcgggaggaccgcgggaagaatgcgtccccatggctgctggacatgctcaaccgcaaaccgccgaagctcgtcgctgtggcgctagccaataaaatcgcccgcgtcgcctggaagctgatggtcaccggcgaacgatacaatcccaacgctgcattgtcggcttatggccaggcagcatagagatcagtcatccaggggagcacaatgtgacgcgaccttggtaggctgaacccgaacttgcgggaaacgagcagttggtgtgatcgatcgatccgaaacgtgagacaatccgtacgatgcaaggctctcaaaaggccgcaaaacctgtttggaactcatgttgcggaaaccatcttggcccgcggtcatgtacgaccgcaatcagaggccggacatatgatcgcaagcgatgggatcaaaccgctgcccaacatcttgcagggaggaggccgtccacata

SEQ ID NO: 127 - DNA, 1402 bp, unidentified
  source 1..1402: mol_type = unassigned DNA; note = element_ISMlo2
tgttggggtggacggcccccgcacggcatcgatgtgccagaatgaggtcgttgcagatctcaagcaaaggagaccgtccgtggaacaaattattcgaattggcatcgacacgtcaaagcacgtcttccaactccatggtgtgaacgcggctgaggagccggtgctgcgcaagaagctgaggcgcaaggaggtggtagcgttgttcgagaagctgtcgccgacggtggtagcgatcgaagcgtgcgggggctcgcaccactgggcgcgcctgctgcagtcgttcgggcacgaggtgaagctgatccctccgcaatatgtcaaaccgtacgtcaagcgcggcaagaacgatacggccgatgccgaagcgctgtgcgaggcgatgagccggccgacgatgcggtttgtgccggtcaagaccgctaaacaacaggcggcattgatgctggttggcctgcgcgaccggctgatccgcaatcgcacgcagctcgccaatgcgatccgcggctatgcggcagaatacgggctgatcgctgccagggggatgtgcaagatcgaaccgctgctcgagcgtatcgcggcagataagatgctaccggatttggcgcgggagctgttcgcgctccatgccaaggaatatgcgcagctgcaaacacaactgaaagacgtcgacgccaaattgatggcttggcatcgggccgaggcgtgcagccagcgcctggcgcaaatccccggtgtcggcccgatcggtgcgtcgctactggtgatgaagacgccggcacctgagacctttcgatcggcccgacactttgccgcctggcttggcctaacgccgaaggatcattcaactgccggcagggtcaggctcggtgtgatcacgcgcgccggcgacgaagccttgcgcagcgtgctggtggccggggctactgctgtcatccggcatgtccgacgcggccgaggcgccgtctccccctggctcgtcgacctactcaagcgcaagccgccgaaactcgctgccgtggcgctagcgaacaagatcgcgcgcatcgcctggaagctaatggtaagcggcgagatctacggagcgaagcctatgccgccagcctcggcgcgcgccgcatagagatcggccagacacggggaacatctctactgttaccgtgctgagctggtgccggaacttgcaagagaatgagcagttggtgtgatcgatcgatccgagacgcgagacactccgttgaccccattggtcgttgtagaccgccatgatgttgggaactcgcgtcgcggaaaccatcttggccagcggttatgtgcgaccgtacacaaaggccggacatatgagcgcaagcgatccgatcaaatcattgctcaacaatcttgcgagaagggtgccgtccacata

SEQ ID NO: 128 - DNA, 1490 bp, unidentified
  source 1..1490: mol_type = unassigned DNA; note = element_ISMlu12
cgttaccttcttcgtggctcctggatccggcaggatcagggagtgctgaccggccggtcctgggcatgatcgtttgcccccagtcatccatgatccggggggtgttgtcacccaggaccggtccggtggtcacggatcgctgatagaggcaggacccggctgacaagggccttcgtaacgtggatgccgagcgtgatcacctcccggccggccagcacacgccatcggcgcaccagaagggaacgatcatgacagcacagcagcacccggccgtgttcatcggccttgacgtcggcaaggccgagcaccacgccgtggccctcaccgcggccgggaaaaaggtctacgacaaggccctgcccaacgacgagacccgcctacgcggcatcctcgacgagctcgcccgcgcccacgggcccgcgctgctcgtcgtcgatcaaccggccacgatcggcgccctgcccgtggccgtggcccaggcctgcgacggcgttgaggtggcgtacctgcccgggctggcgatgcgacggatcgctgacctgcaccccggctcggccaagaccgacgccaaggacgcggcgatcatcgctgaagcagcccgcacgatgccccatacgctgcgctccatccgagtcgatgaggaacagatcgccgagctggccatgctcgccgggttcgatgacgacctcgccgcgcagatcaccgcgacctcgaaccggctgcgcggactcctcacccagatccaccccgcgctcgagcgcgtgctcgggcccaggatcacccaccccgccgtggcagaccttctcggccgctaccccaccccggcacagctcagaacggctgggccggggcatgtgcgggccaggctgcgcaagcacgccccacgcctggccgcttctctcacggaacagatcttccaagccctggacgagcagtccgtggtcgtggccggcacgcaggccgcggccaccgtggtcccgatcctggcagaacagctcgccggcctgacccgtcagcgggccggcctggcctcccaggtggaggctgcagtggaggcccaccctcttcacccggtcctgatctcgatgcccggagtagggatcaggaccgccgcacgcatcctcactgaagttgtgggcaaggacttcgtcgatgccgggcatctggcctcctacgccgggatcgccccggtcacccgacgctccgggacctcgatccgcggagagcacgtagcccggggcgggaacaaacgactgaagcgggccctgttcctctcggcgttcgcttcgctgtcacacccgccttccagggcgtactacgaccgcaaacgagcccagggcaaacgccacaaccaggcgctgatcgcgctggcccggcgccgcacggacgtgctctacgcgatgctccgcgatggcaccctgtatcaagatccgaccgccccgccagcaccatcatcagtcgctctcgcggcttgacgaaaaccatagagg

SEQ ID NO: 129 - DNA, 1419 bp, unidentified
  source 1..1419: mol_type = unassigned DNA; note = element_ISMno14
acatggggtaatcgcgggagcgttccccctcgggccggagtgacgcggcctacaatggaagcggtggttgttccccggcaggatgaagttgcgggctcacgactggacgccgggcccatgcatcgagcggagaacaaccatgggtgagtatatcggtctcgacgtgtccctgaaagagacggcgctcagcgtgcggcgggacggcaagcgtgtttggcgcggcaggtgcgcttccgatcctgccgtcattgccagggtgctgcgcaagcatgcgcccgaagcccaacggatcgtatttgagacgggtcctttgtcagtttggttctaccacgcgctgcgcgccgaaggcttgccagcgatctgcatcgacgcgcgccatgccaaggccgcgctcgacatggccgccaacaaaaccgacgccaacgatgccgacgggctggcccatctggccgaggtcggcttcttccgcgaagtgcgggtgaagggatacgacagcctgctcgtgcgaacgcttgtcgccgcgcgcagcaagctcgtgcaggtgacgaccgagctatccaatcagatccgcggcctgatgaagacgttcggcttgatcgtgccgggcgcaaagggcggatcgttcgaggcggaggttcgacgtctcctgtcgggcgatcacggtctggctcgcgtcatccttccgctgcttgaggcctggaacgcggttcgccgtcgagcagcggagctcggacgccagcttctggccggtgcacggcagagccaagcctgccagcggctgatggcgattcccgggatcggggcgatcaccgcgaccgccttcgtgaccgcgatcgaggatcccgccaacttccgatcgtcccgctccgtcgccgcctggttcgggttgacgacgcggcgctatcagtcgggcgaggtcgactatgacgggcatatctcccggagaggagacgcccatatgcgagggcttctctacgaggcggcgaccgttctcctgacgcgtagccaggtggacagcgacctgcgagcctggggactgaagctgcgcgagcggctcggcttcaagcgcgccgccgtggcggtcgcgcgcaagctggccgtcgtcatgcacgccatgctgaagtccggccactcctaccgtgcgaaggctgccatggcctgatcccagaacaccccagcttgtcgcgtcccgaaggcgcgtcgaggcgtccctgccgggacgtgggcgaaccattccgcctaggctgttgcaccgtgagatccagaccggtccatcgagtgcgcttcacacatcggaaggttcatcctgcgaagccccatcatgcggcggctcatgccgaccgcgaagacgaccgtgctcccggcaaacgacggcccgacaatccaaaaaggacttgctttatgcgaggcgattagacg

SEQ ID NO: 130 - DNA, 1353 bp, unidentified
  source 1..1353: mol_type = unassigned DNA; note = element_ISMno26
tgatggggtggacggcccctgctcacggcatcgctgtgccaggatgaggccgctggttctcatcatcaggagccgtccatggcacaggtcagcaccatcggcctcgatctggcgaagaccgtcttccaggtccacggcatcgacgctcaaggcgaggtcatcgtgcgccgacctttgcgtcgagccgaggtcctgcctttctttgccaagctttcacctggcctggtcggcatggaggcttgtggaccggcacacgactgggctcgccaactgattaagctcgggcatatcgtgaggctcatgccgccagcctccgtaaagccgtacgtcaagcgtggcaaatccgatgcggccgatgccgaggccattgcagaagccgtgcgccgcccgaccatgcgctgtgtcgccgtcaagaccgtcgatcagcaggccgtgctcatgctgcacaaggggcgcgatctgctcgtccggcagcgcaccctgctgatcaacgccttgcgggggcatctggccgagttcgggatcgtggcggcgcaggggcccgccggcgtgaagagcgccatcgcgcagttcaggaccgatcaggccagcctgccggagttggcccgatcggcgatccgccgcctcatcggccagagcgaggaggtcgccgagcagctgagaagcgccgagaccgagatcgtcgcctggtgccgcagcgacgctgcgagccgccgtctgctgaccatccccggcatcggcccgatcaccgccagcgcgatcgcggcggccgtgcccgaccccaccctcttccggtccggccggcagttcgcagcctggctcggcctcacgcctcgaccgcagagcagcggtggcaaggatcggctcgggggcatcagcaagcagggcgacggaacgatccgccggctgctcgtcgggggggccacggcggtgatccgagtggcgcgccaagacaaccccggtcgagcctgggccaagcggctcttggagcgcaagcccgcgcgggtcgtgtccgtcgccttggccaacaagaccgcccggattgcctgggcggtgatgacgcgcggcgacgtctacagagcgcccgccgtctgacaagatcccgtctgccggctctctcgccggcgacgggggtgcaagctgctgagaggtgatgacgaaccggtcgagccgggattgaggggagcccgctttgcgacatgcgcgtcacagcgcgctggcttgatggggacctcgatcgcggacttcatcagggccagcggccatgagcgccgcgtcgacaggccggacacatgactgcaccccgactgggcagcatccctttccacttgcaccgcaggggccgtccacaca

SEQ ID NO: 131 - DNA, 1500 bp, unidentified
  source 1..1500: mol_type = unassigned DNA; note = element_ISMpa1
ctaatggggatcgaacagtgagccttcggctgttgatcccttgttcgggggacgctgtttaccgagccgccggtcggtgagcgtcgttgccagctgaagcgatggccgacttctaaggctagatcacgccccggccggttggtgagggttcctgtagcactgatggggtgtcgtgccgttgagcactgatccattagcttgtcgccgggtgcccttgggctcgaacatgttcgatgaccaccgaggaggcgctacgtgatatttgtcggcgacgattgggcggaggatcatcacgacgtccacctgatggatgaatccggggcccggctggcctcgcgtcggttaccggagggacttgccggcatcggcgagttccatcagcttttggcccgccatgccgaagagcccgaccaggtcgtgattggaatcgaaaccgaccgtggtttgtgggtcgaggcgctcaccgcggccgattaccaggtgtatgcgatcaacccgatggcggccgcccgctaccgcgaccgccaccatgtgtcgggggccaaatccgatgccggggacgccaagctcttggcggatctggtgcgcaccgatcgccacaatcaccgccgcgtcgccggtgactccgctgataccgaggcggtcaaagtgctggcccgggcacatcagaatctgatctggacccgcaatcggcacaccaacgcgctgcgctcggcgctgcgcgagtactacccaggcgcgctggaggcgttcgacgatctgcacgaccgcgacgctctggcgatcctgggccgagcgcccacccccatgcaagcggcgaacctgagtctgtcgaagatccggtctgcactcaaagccgctgggcgacaacgcaacctcgacaccgtcgcccaggacattcaaaccgctttacgcgctgagcagctcgccgcccctgccgcggtcaccgccgcgttcggcgcaaccacccgcgccacggtcggcatcatcgctgaactgaaccgccagatcaccgaccttgaggccgaactggcaacacattttgagacacacccggacgccgacatctaccgctccctgccaggacttggtgtcatcctcggcgcccgggtgctcggtgagttcggggacgacccgaacaggtacaccaccgccaagtgtcgcaaaaactacgccggaacgtcgccgctgaccgtcgcctccggccgcaaacgcgccgtgctggcccgccacgtccgcaaccgccggctctacgacgcgatcgaccaatgggccttctgcgccctgaacaccagccccggcgcccgcctgttctacgaccggcgtcgcgctgccggcgacctccaccaccaagcgctacgcgccctcggtaaccgcctcgtaggcatcctccacggctgcctacgacaccgaacccactacgacgaacacaaagcctgggcacaccgccaaaccaaccccgactcccaggcggcttgacaacttacggacctgggatgt

SEQ ID NO: 132 - DNA, 1313 bp, unidentified
  source 1..1313: mol_type = unassigned DNA; note = element_ISMtsp7
ttatgggatggacgcctcccgctccgcgcccaggttgggcgagaccgagagggagaagagccatgcagatgctcgcgatcgatctggccaagcagtcgtttcacgttcacggcgtcgatgccgatggtcaggtgatctcccggcgcgtcgggcgcaccaaacttccggcgctggtggccagcctcgccccgaaggtgatcgccatggaggcttgcgccacggcccatcattgggcgcgagctttcctcgcggccgggcatgaggttcggctgatcaacccgcgcttcgtcaagccgttcgtgcgcggctcgaagaacgatgccgtcgacgccgaggcgatcttcgacgccgcctcacgtcccacgatgcggtttgtgcctgtgaagtcgaccgagcagcaagacctgcagtcgcttcatcgcgtccgcgatcggctggtctcgcaacgcacgaacctgatcaatcatacccgtgggctcctggctgagtacggcctcatctacccgaagggtgcggcccgctttccagcgcgtgtgcgggcggaactttccgaggcgggactgtcgccgatggcgcgagccaccttcgcggccctgctcgacgagttggagaccctggagacgcggcttgagcggctcgacgatcaacttcgggcgatctgccgcgaagacgtcgtctgccgccgcctgatgacgttgcctggcgtgggcccggtcgtcgccaccgccctcaaggccagcgtcggcgatgcccgccagttccgctcagggcgcgaactcgcggcctggatcggcttggtgccgcgacagtactccaccggcggcaagccgcacctcgggggcgtcggacgccgggccaaccactatctgcggcgccaactcgtgcacggcgcccgcgcggtcgccttgcgcctggccacgaagaccgatccgcgctcacgctggttccaggcggtgatcgaccggcgcgggttcaacaaggggatcgtggcgatggccaacaagaccgcgcggatagcctgggcgatgctgaggcgcgaggaggattacgcccgcgcctgacgcgggcgaccgagatcgtcgcgcgagcggcgatgcgtgcgaggtgaccgacgatggcgacacggcgtgggccgccgcttccgatcctgacctacgacacggccttcgaggccgctagcgttatgaggacggaagaagcggaccccatcgaggccaggggcgtgatcgctccaccgacaggccggatagattcacgcacccaaggtcgtggtcgtcgctgaggaataccttgccgcgggaggcgtccataga

SEQ ID NO: 133 - DNA, 1462 bp, unidentified
  source 1..1462: mol_type = unassigned DNA; note = element_ISMysp1
gtccttaagttcgtagttgcagttacttcgtgttgttacgttgggctgtgacccgggtgggtcgggtgaggctgcatggtcgtagccggccctggtggtgcggcttgaaaggactggccgcccggcctgcctggactcctctggccgctgattgagatctgcgatgtgatcgcttgtttaaggaaatgctggcggggttgtccatggggatcatgttggtagacaggcgaaaagaggggtgatgacgacgggccaggtgtgggctggagtggatgttggtaaagagcatcactgggtttgtgcggtcgacgacagcgggaaggtggtgttgtcgcgccggctggtcaacgacgagcaaccgatccgggagctcgtcgctgaaatcgacgagctggccgagcgagtgtcgtggacggtggacctgaccacggtgtatgccgcactggtgttgacggtgctggccgacgccggcaaaacggtccggtatctggccggccgggcggtgtggcaggcctcggcgacctaccgcggtggggaggccaaaaccgatgccaaagacgctcgggtgatcgccgaccaggcgcgcatgcgcggccaggacttgcccgttctgcatcccgatgatgacttgatcagcgagttgcggatgctcaccggccatcgcgccgacctggtggccgaccgcacccgcacgatcaaccggctgcgccagcaactcgtcgcggtctgcccggccctggaacgagccgcccaaccgagccaagaccgtggctgggtgatactgctggcgcgctaccagcgtcccaaagcgattcgacaaagcggtgtttcgcggctgaccaaagtcttgaccgatgccggtgtgcgcaacgccgcctcgatcgcggcggctgcggtggctgcagtgaaaacccagacgatgcgcctgcccggcgaagaggtggccgccgggttgatcgctgatctggcgcgggaggtgatcgccctcgatgaccgcatcaagaccaccgacgccgacatcgagggccgatttcgccgccatccactcgccgaggtgatcaccagcatgcccggcataggatttcggctgggcgccgaattcctcgccgccgttggtgatcccgcgctgatcggatcggctgaccaactcgcggcctgggccggcctggcgccagtgtctcgagactccggaaagcgcaccggacgactgccacacccccaagcgttacagtcgccgactgcgccgagtcatgtacatgtcggcgttgaccgcgatccgctgcgacccagattccaaggcctattaccagcgcaaacgagacgaaggaaagcggccgatccccgccaccatctgcctggcgcgacggcgcaccaacgttctctacgccctcatccgtgacaaccggacctggcaacctgattcacccccggtcaccgccgcggcttgacttcttcattgaga

SEQ ID NO: 134 - DNA, 1245 bp, unidentified
  source 1..1245: mol_type = unassigned DNA; note = element_ISOt5
cttgtatgataaaaataagtgaaattgcaataaaataaaagattatagcaatagcacaaaagaaagctagtatacagtagcgttcctaaggctaatagcctgttctatagataagtaactagcttttttaattaaaaaccggacggtattcttaggcaaaaagcctgtatttacaaggttggttttgagatatttaacataaaatttggtgattatgaatagtataattgtaggaattgacgtttctaaagagacatttgatgcagctgtgttaattaataataaagttcaaacaagaaaatttaataataattctgaagggtttaacaaattagtaacatggttaaaaagcagaggaactggacatgtttgtatggaagcaacaggtatctactggaaaaatttagctaaatatctgtacgattatggttataaagtaagcgtagtaaatcctgcccgtattaaaggttttgcaatgagtaaacttagtcgtacaaaaacagataaagcagacagtgtattaatagcagatttttgcaaagcaatgaaaccggaagcatggtatccacagcctctttatattcaagaactacagcagctagttaatcgcctgaatgttttaattaagcataaaacacaagaaacaaatagattagaaggagcttctaaagcaattgctaataatattcaaatgcatattgaatttcttgaaacacaaattaaagaaattgaacaactaatcaatgaccatattaaaaataacaaagatcttcataataaggctatgttacttgagtcaataccaggcataggagcaaaaacacaggctgtagttcttgcttttttagcagatattgagaaatttagttctgctaaacaagttgtagcttttgtaggtcttaatcctaagcatcgtcaatctggcagttccgtgcggggtgctagtagaatctctagaactggtaattcagatctacgtaagtctttttatatgcctgctatgtctgccttaagacataattgtattatcaagcaattttctcaacgtttgtctgatactggcaaacccaaaatgcttatccttattgccgctatgcgtaagttattacatatcatttatggtgttttaaagcataattctccttttaatcctaatgttttaatcaatcagaaataataattttataaaaacttacatcttttttataaaattattatttcttttcttgattcttatcacggtat

SEQ ID NO: 135 - DNA, 1372 bp, unidentified
  source 1..1372: mol_type = unassigned DNA; note = element_ISPa11
caatgaaatggactcctccctcctacggcgtcaagcgccagactaatggtgcagccacaagtcccggagggggagtcagcatgaaccttagtcgcattggtctggatctggcaaaacaagtattccaggtgcacggcgttgatcgtcacgagcatgtggtatgtcgtcgccaactcaagcgggcacaggtgcgggatttctttcgccaactgccgccgtgcctggtggcgatggaggcctgcggcagtgcgcactactgggcgcgcgagttgcgggagctgggccacacggtacgcctgatcgcaccgcagttcgtaaaaccctacgtcaagggtgacaagcacgatgcacacgacgccgaggcgatctgcgaagccgccagtcgtccgagcatgcgctatgtcccggtgaagagcgcagagcagcaggccgtgcagtcgatgcatcgggtgcgcagtcgtctagtgcgggcccgcacggcgttgtgcaatgaggtgcgtggcttgctgggtgagttcgggctgatcgcgactcgacgtgggcgagcggcgacgatggccttgctcgaaacggtcatggctaccgagccggcgcccttgccggccccgatgggcgagctgttgcgtgaattgaaagatgaattgcagacgctggaggcgcgcatcgctcgactggagcgacagattcaggctcacgtacgtggcgatgcccgcatccagcgcctgctggcggtggaaggcatcggcccgatcagcgccagcgcggtggcggcatccgccggtgatgcacggcaattccgcacgggccgccagtttgcggcctggctgggcctggtgccacggcagcactccacgggcgggcagcagcgcttgggcaacatcagcaagcgcggcgatacctacttgcggaccttgctcatccatggcgcccgtgcagtcgtgcgctgttgcgccaacaagaccgatgcccgcagccgctggctgcaaggtctgctgcaacggcgtcctgccaatgtcgtcgccgttgccctggccaacaagaatgcccggatcctttgggctttactcagccgggagacatgctaccggcccggttgagcgttcctgccacaccgtagttgaaacatccaccacgattgctcagtgaatgacaatgatgacgaaccggtcgaaccggcctgcatgaaacctggtttatacgtgggctccctgctgcagtgaagcaaagccgttagggcgatcaggtatgcaggcgcgcatttcatcagggctcgggagttgcaacaccactccatgaagccggatatacggatgcagtcgtacacaggtttgaaatcaagacaaacactggcaaaccgggaggagtccatata

SEQ ID NO: 136 - DNA, 1417 bp, unidentified
  source 1..1417: mol_type = unassigned DNA; note = element_ISPa49
aaatgtaatggacgcctccctcttacatccttccggctccagcctcgaggcggatcaggcctagagggccgtgatacatctggagctccgtagcccacctggagagatcatcatgagcctttcccaaaccatcgttggcatcgatatagccaagagcgtcttccagattcacgaggtagacaaagaaacaggagaagttaccagccgccagattaagcgcgctcgtctcctgcagcacttcatcaatcgcgagccatgcttcatcggcatggaggcgtgtggtggggcgcagcattgggcccgccagtttgtagccatggggcacaccgtgaaactgctcccggctcagtcggtgcgccccttcgcaggcggtaacaagaatgacgttgcagatgcacgagctatctggatagccgttcaacaaccgggaatcaaagccgttgcaatcaagaccgaagcgcagcaggccgtgctcgcgctccatcgtatgcggcagcaactggtgaaatttcgtaccgcacagatcaatgccttgcgtgggctactcgctgaatacggtgaggtcatgcccctgggccgcgatgcagtagccaaggcgctgccttcggtattcgcccggctcgtcgatcgccttccgggagtcttgattgaatcactgcgcgagcagtacacgcgaatcgctcaattggacaaagaagtttccaacatcgagcgtcggctgcgggagtggcaccgcgacgacgaaagttgccggcgcataacggcaattcccggtgtggggttgctcaccgctaccgccacggttgccgccatgggggatccaggtgcattcagctctggccgcgaattcgctgcctggctgggcttggttcctcggcagaccggaacaggtggccgggtaaaactcctgggtatcagtaagcgaggcgataggtatctacgcacgcttcttatccatggcgctcggtcagttctgatgacgagcaaaacaccgcccgcatgggcagcgaatttggctacgcgacgcccactgaatgtagccgtggtggcactggccaacaagatggctcgtacgctgtgggccttactggctcaccaacgagtgttccaacctgagtacgtaagtcgacccgcttgagccggtcacgcttgcatttatttacttcgatatagggaggacagctgaaaggttgcgcaaggtacgtaacaagtgatggcaaacaggtcggaccgcgacccaccaagtctgaatcagtagttggacctcgagtccatggaggaaatgagacgtgggttggcgaattccatcaaggccagcaggcatctgacctgcgccaaaggccggatataaaactgcagccgtgtcctgtcacaccatcaccgaagacgttcttggcaaacgggaggcgtccatata

SEQ ID NO: 137 - DNA, 1382 bp, unidentified
  source 1..1382: mol_type = unassigned DNA; note = element_ISPa62
atgctgtaatggactctccccacaccacagttctataccaaggtgtcgaggttttctgagcgggagagtcgttatgaagcgcattgccgttgatctggccaagtccgtttaccaagttgccgagagtgtccgtttcggccaggtggtgcagcgcaagcggctgaaccgagaggcgttccggcgatatatacaggagcagtccgagccggtcgagtgggtgatggaggcctgtggtacagcgcattactgggggcggttggcgcaatcgctcggtcatcaggtgaagctgctgcacccgcgctacgtgcggccctatcgccgtcgtaacaaaaccgaccgtaatgactgcgatgccatgctcgaagcggcgcgctgcaccgacattcatcccgtgccggtgaagagccacgatcaacaacagctccagcaattgcacgggctacgtgaaacctggaagaagagccgcacccagcgcatcaacctgctgcgcggcatgctgcgtgaagcgggtatcgaagccccaacgtcgaccgcagccttcatccgagctgccagtgaacttgtagaccaacctgaactcgcttccttgagccgcctgctgcatatcgtcctggccgagatcaacttgtacgaacagtgcatggctgaatgcgaacagcaactcaagcgctggcatgctgatgatgacatcgtgcgcaaactggatgaagtcagtggcattggcctgctaaccgccagcgccctgaccgccgctgtcggcaagcccgaacgctttgccaatggtcgccagctcagcgcctggctgggtatgacgccgcgtgagttcagcagtggcaatagccgcaagctcggccatatcagccggcagggcaatgtctatgtgcgcacgttactgatccacggctcacgtgcagccttgctcgccgcacaacgctgccaggctcgaacgccggaaaagctgacgcagttacagcgctgggctgtgcagacggcggcgcgtatcggtcacaacaaagcggcggtagcactggccaacaagctggtgcggatctgctgggcggtgtggtgccacgagcggcggttcagtggcaattggcaaagcgttaggcccgcctgacggcgggggtaatcagtaaaggggtgatggttttcttgtggttgtggtgagcagcagcactgtcggaacaggcgagtcctgcagcggagcaaggccgataacaatgatgatccccgtgatcgattgaacgcttggcccccgctgcgcgaactacagaatggccagggcttgaacgtccacaacaggccggatatacgaatgcaaccgcgctgacgacaggtgcaaaagcaaagctttgctcactgcttgtggggagagtccatat

SEQ ID NO: 138 - DNA, 1357 bp, unidentified
  source 1..1357: mol_type = unassigned DNA; note = element_ISPath1
taatgagatggtcacccccaccctacacgcgggttacgctgtagggtgtttttctttctggaggccatcatgcagaatgttacgctggttggaatcgatctaggcaagcactcgtttcaccttcatggtcaggaccggcacggcaaggccgtgtttcgcaagaaggtgagccgcaagcaactggtcgagtttttcgctacgtttcacgcctgcacgctggtcatggaggcctgtgccggggcccatcacatggcccgccaactggccgggttcggacaccaggtcaagcttatctccccccagttcgtgcggcccttcgtcaagagcaacaagaacgacttcgtggacgccgaggcgatctgcgaggcggcgtcgcgcccgtccatgcggttcgtcacgcccaagacggagtcgcagcaaaccttgtcggccctgcaccgggtccgtgagtcactggtgcgcgatcgcaccaaaactatcaaccagatacacggcttcctactggagttcggcatcagcctgccggttggcaacgctgtcatcacgcgtctgccggctgtgctcgccgaacatcggttaccgccgcgcctgatcgcgatcctcgaacgcctgcacgctcacttcaagtacctcagtgagcagattggcgaaatcgacaaggagatggcccgccaactcgccgatgacgagctcggctgccgcctgctgtcgatcccaggcgtcggccctattacagccagtgtgcttgccagcgagatgggcgatggtcagcagtacgggtccagccgcgatttcgctgcgtcgattggcttggtgccgcgccagtacagtactggcggcagggccaacctgctggggatcagcaagcggggtgacaagaatctccggcgcctgctagtccagtgtgcccgctcctacatgcagcgactcgatcggcacagcggtcggctcgccgactgggtccgcgccatgctgaggcgacggcactcgaacgtggtggcctgcgcgttggcgaacaagctggcgcgcaccgcgtgggcgctggcgactcgtcgcaccaccttcgatgcgggcgcgagcgccatgcctgcctaagtacccgattgcacaacacgctttaccgaagtccacccacctggttttgcgaccgctgaaattggatgacgtgaacggcacaccggcctgacggacaacctgacataaagaacggctctcgaagccgcgggcgttttaaggaccgtcaggcgcgactctcatcgtggcgcggggagtgatccccaaaacgacgccggatagatttacgcaagccaatcacaacgtcaaaaatcagtgttgcaaaaatgggggtgaccataga

SEQ ID NO: 139 - DNA, 1439 bp, unidentified
  source 1..1439: mol_type = unassigned DNA; note = element_ISPfa1
atgatatgaacgcctcccacccgtgagcggtaggagctagcagaaaggaatcgaaggcggagcctcacgggccaacggcaacagagtgcccagatggaagaccatagaggttttcctagcaaaccggaggctccgaaatgaagcatacgacagtgggtgtggacattgcaaagaacgtgatgcagctccattacatcgacgcagagacgggcgaaatcgtgaacaaaccggtgagacggggcgcgtttctcgaacacttcgcgaatctggctccgtgcctggtcgggatggaggcgtgcggtggctcacagcactgggcccgcaagctcacgacgatgggccacgaggtgaagctgatgccggggaaatttgtgaaggcgtttgtgatgggcaacaaaaacgacgcagccgacgcgaaagccatctggctagccgtgcagcatgcaggcaaatcggttgcggtaaagacggaaacacaacaggcggtactgggactgcaccggatgcgcgaacagttggtgaagttccgcacaatgcagattaatggcttgcgcggcctgcttgccgagtacggcgaagtgacgggcaaaggccgggctgcgctggataaggcgatccccggtgtactggagcgactggtcgatcgtctgccggcgattctgatcgacacgttgcgcgagcaatggaacgggttggcggagctagataaacagattgcgagcatcgagcgacgtctgcagacgtggatgagagaggacaaagcgagcaaagcgattgcggcgataccgggcgttggtctgctgacggcgacggcggctgttgcgacgataggcgatgcgaagacgttcaaatctgggcgagagttcgcggcttggattggattggttccgaggcaaacgggtacgggtggcaaggtgcatctgcacggaatcagtaagcgaggcgatatatatctacgcaagctgttgatccacggtgcgcgcagcgtgctgtgtctggcgaaagagccagggccgtgggccgaaggaatcaaaaagcggcgaccgctaaacgtagcaatcgtggctcaggccaacaggattgcccgcacgatctgggcgatcctggcgcacgacaggcagtacgaacggggttacctgagcgtgaagccggtttaaccgatgagcactgggtagcaggacgattaatttttacaggatgacacgtcgaaaggttgcgctggcaatcgtatgtaatgacaagacaggtcggaccgggactcgctaaacctgaattttcggatgagcttcgagctcgctaaggaaatgaggtgcgggtccgcggatttcatggtgggccgcagcgtatcgggctgcaacaagcccggatataaagctgcaacccctcctgtcacagtcggaacacacgaaaaaccgtcgcaaacgggaggcgttcatata

SEQ ID NO: 140 - DNA, 1427 bp, unidentified
  source 1..1427: mol_type = unassigned DNA; note = element_ISPfa2
agaatgaaatgaacgcgtcccaccccgtgaccgagtgagcaaaggaaggtggatcctcacgggccaacggcatcgatgtgcccaaagtggaaaatacgaagttttccaaagcaaccggaggatccgagtgaattgtacggcagtgggtgtagacatcgcgaaaagtgtgttccaagtgcattacgtcgatcaggaaactggcgagatcgtgaacaagccgatcaagcgggcaaagttccttgagcattttgcgaaccgagcgccgtgcctgatcgggatggaagcgtgcggtggtgcgcaccactgggcccggcaactcgcgaagctgggccacgaggtgaagctgatgccgggggagttcgtaaaggctttcaacatcaggaacaagagcgatgcggctgatgcgaaggcgatctggctggccgtgcagcagccgggcaagccggtcgcagtaaagaccgaaatgcagcaagccatgctggggctgcaccggatgagacagcaactgatcaaatttcgcacgatgcagattaatgctctgcgagggctgctaacggaatacggtgaagtgatgggcaagagtcgggcgaagctcgataaggaaatacccgctgtgctcgaacggattgcggagcgtttgcctgccgtgctgatcgatacgtttcgcgcgcagtggaacggactggagaagcttgatgagcagatcgctgagatcgagcgtcggatgcgcgagtggaagaaagaggataaggcggtcaaggccatcagcgagattcccggtgttggattactgacggcaacagcagctgtcgcgatgatgggagatgcgaaagcgttcagttcgggacgagagtttgccgcgtgggttgggatcgtgccgaagcagacgggttcgggcggcaaggtgaacttgcatggcatatcaaagcgcggcgacacatatctgcgcaccctgctgattcacggtgcacgatctgtgctgacgcatgcgaaagagcccggtgagtgggtcgaacaaatccagaagcggcggccaaaaaatgtcgtaatcgtcgcgttagccaacaagatggcgcgaacgatctgggcagttcttgcccatgaccggcagtaccagaagggatacgtgagcgtgaaacccgtctaaacgggcagcgcttgcgtagaggattaacgtttaaacacagggtgaacgtcgaaaggttgcgcagcaatcgagtgtgatgacaagccaggtaggaccgggactcgctaaacctgaatgatgcctcgagctttgagctcgccgggagaatgaggtgcgagtcagcgaatttcataggggcccgcagcgactgtaccgactgcatcgaggccggatatagagctgcagcccatcctgtctatcaaaacacgcgaaaactgttgcaaacgggacgcgttcatat

SEQ ID NO: 141 - DNA, 1342 bp, unidentified
  source 1..1342: mol_type = unassigned DNA; note = element_ISPfl1
taatgagatggtcagcccagtacgggaaccccgctaaatctaaacttatcggggttctcactgacttgcggagacctctcatggacaccttgaacttgctcggcctggatattgggaaaagcacctttcatcttgtagggcacgacgttaaaggcaaggaagtgttgcgcaagaaattcaatcgcaaccgcttgctcgagttcgcagcaaggctgaagccctgcaccatagcgatggagtcttgtggcggttcacactggcttgccagaaagctcttgtctttcggtcatcaagtgaaattgattgcgccgcagcatgtaaaaccttacgtcaccggcaacaagaacgactacatcgacgctgaggcaatttgcgaagccgcatctcgccctaaaacacgttacgtcgccatcaaaaccgttgaacagcaggtgctatcaacccagcaccgccttcgtgaggcgttggtaggacaccgtactcaaacgatcaatcgcattcacgggttcttgcttgagttcgggatcgaactgcctgcaacaaaagcggctatgaatcaagttcatcaaattctggatgaccctgccgccgagttaccgcaacagctgaagtcttttattgaacatctactggaagagatgaagcggctcaacgacgagattaaggcgattgaccggagtatcaaggagcaagtggacactgatgacgcgggaacacgcctgatgagcatccccggcatcggcccgatcatcgctagcgcgctgctggccgacgtcggcgacgcttccaattttcactcatcgcgagacttcgccgcttcgctgggactggtgccaaggcaatattcaacaggcgaccaaaccgtccttttgaacatcagcaagcgtggtgataaataccttcgaaagcttatgattcaaggctcgcgtgcagttctggtgcacatagataaacgtaccgatgctttgggaacctggtgcagagacctgctgatacgaaagcacccgaataaagtcgcctgcgctttggccaataaattggcaaggatcgtatgggctgttttagctcgcggaggtagctacaacgcacaatccatggcttgaccgaaattcactaccggcttttgcgacgacaagatgatgacgataaacagctcaactcctgcttgaaaacctggcaaacgaatcagctttcgaggctggcacccttttcaaggacaggcaggagcgactactcatcaagggccaggtggcaacactgccgaccatgagcccggatacattagcgcaagcatgctttaccgttcatcgctcgtgattgcaggagatgggctgaccataca

SEQ ID NO: 142 - DNA, 1358 bp, unidentified
  source 1..1358: mol_type = unassigned DNA; note = element_ISPpr8
taatggtatggaccctctccccccaatcggcttcaaatgagccatattgaagttgatgttcaatagcgaagagagggtcacatgaatagtttaacgattggtttagatactgcaaagtctgtctttcatgccgttgaaaaaaacagtagagggcgtgtactgagcaaagccaaactaacacgagctaagttatttacttattttgcgaataaaccaccctgtacagttgctttagaagcttgcggagccagccattattggtgtcgagtaatctcagcctatggtcataaggctgtcatgattgctccccagtatgttgcaagtcatcgtaaaggcaataaaaatgattttaacgacgcgaatgctattgcggatgttgcccagcgggatgatataaggacagttccgtacaaaagtattgaacagcaagatattcaattactgcatagagtaagggaacggcttgtaaggcagagaacagctttaggtaatcagactcgaggattattatcagaatatggcattgttcttcgccaagggttagcccatcttcgcaaagaattaccgtttattctggaagagagtaataatgagcttactgagttagcccgccgccagttctttttattacatgaagagctccttgttttagatgagaaggtaaagcaagccgataatgaaatacagcgagttgcactttcacaccctatatcacagcggttaatgacaatgtcaggtgttggaccgattatctctacaatacttttggttgcgctaggtaaaggtgagcacttccgaaatggtcgccacttttccgcttggtgtggtttagttcctaagcaacattctaccggagataaggcgcgtttattagggataagtaagcgaggtaatacttacattcgaactcaattgatcaatggcgctagaagtgcattgagaaatgcgagtaataaaaatgatcaagttagccgttgggcagcgagcctggcagagcgaataggttttaacaaagcctgtgttgctttggcgaataaaatggcaagattcgcttgggcgatggtacataatggacaagattatcagctaaaaccttaacccacataatgtaagttaaggctaaatacatccacccactgaattgcacaagacatgatattgatgattaaaggctcataaccaccttataaaactcaggtaataccaaaggctgtaaggccgttagaatgatatgaagataaggtgcgaaatccatcagggctagagaattcacattctcaactaagccgaatatatggcagcaaacgagtttcattaatcttcatcattatgccttgcaatgcgagagggtccatata

SEQ ID NO: 143 - DNA, 1316 bp, unidentified
  source 1..1316: mol_type = unassigned DNA; note = element_ISPpu10
cttgtatggtaggacttgaagggaggaggagggccataactcgcttctgactgttcgcgcagtacagaccgtaggagaaatcacccctcctcctttcaacacccaagcgccgataaggaatgcctcgcgagcaagcgacaatagaagcaagcctgcgccagggtgtgcccttcaagtcacactacgctacaaggagcagctattcatggcaatgtccgcaatcccaatcgaagctggcgtggacacctccaaagatgaactggtgattcaagccgctccgaataccaaatccttcgccatccctaacactccgaaagcaatcaaagcctggctcaagacgctgcccaaaggctcagcgctggccatcgaagcgaccagtacctatcacatggaaatggcggagcaagcccatgctgcgggcttcgcggtatacgttatcgatgggctgaggctgagtaagtaccgggaaagtgttgctatacgggcaaaaacagatgcccatgatgccgctttgctcgcccgcttcctgagcaacgagcggggctctttgaaggcttggactccgccaccagccgggcatcgtgagatccaggtgctgctgcgccgccgcgccaaacttgtagcagtgcgcggcatgctgcggatgagcttgtcgggcgacaaattgtttgcctcagaactcaaacgtgttgaggaagtgctcgaacgcatagagctttcgctggaaaaacagctgcgtgcggtgatcaagaaggcggggctttccgatcagatgcgccgtgttcagaggcttccgggtgttggtttcttaacggctgccggcctggtgatgtccttcatgcgcggcgagttcaagaacagcgacgcctttgtcgcttatctaggcatggatgtaacggtttcccaatccggtaaatgggcaggcagagggaagttgagcaagcgcggagactcggaggtccgtagactcctgtacaacgcctcgatgagcggcagtcgaaccgcgacctggaagcagtattacgcccatcaccaagcccgggggaagaaaaccactcaagccttggtgatccttgcacgtcgcttggctcggctggccttcggcctgatgaggcatcaggccgactggaagcccgagatatataccggaggtgccaagccggccagctgaggctggggctgcaacgcagcccgcccaaactgacgggcagtatccaatgctggggagaaattctctggcacgctgactcgtacctcgaggttgctgagagaggccgatggcgtttttactgaaaatttgcctccggccatagaat

SEQ ID NO: 144 - DNA, 1378 bp, unidentified
  source 1..1378: mol_type = unassigned DNA; note = element_ISPpu31
caatgagatggactcctccctcctacggcgtcattgcgccagactgaaggttacgaaacaaacaatcccggagggggagcccgcatgaaacttaaacgcataggcgtggatttggcaaagcaggtttttcaagttcatggtgtcgacagccatgagcaggtcaaatgccgcaagcaactcaaacggcatcagatgctggattttttccgccaactggagccgtgtgtggtggcgatggaggcctgtggcagcgcgcattactgggcccgtgaattaggcaagctggggcatgaggtgcgtttaattgctccgcagttcgtcaagccttacgtgaaaggcggcaagaacgacgcgaacgatgcgcaggcaatttgtgaagcggccagcaggcccaccatgcgttatgtcgaggtcaagacagtagagcaacaggcgagccagtcggtgcatcggatcagaggtcggctgatcaaggctcgaacagcattagtcaacgaagttcgtgggttgctggccgagtttggtttgatcgaatcacgcaaaggcgttgcggcaacccgcgaactactgtgtcgggcgatcgatgattcagatagcagcatgcctggctcgatgcgagagctgctgagggggttgagcgaagagttgcaagggtatgacgagcgcttgaaaaagctggaacaactgatccagcgcgaggcgcgcgaggatgagcgggtcagacgcttaatgaagatcgaggggctcggcccgatcagtgccacggccatcgtcagtgctgttggcgatgccagacagtttgccagtggcaggcaattcgcggcctggctgggactggtgcccagtcaatactccacagggggcaaggagcgccttgggggtatcagcaagcgcggagacaaatacttgcgcacgttgctgatccacggatcgcgctcagtgctcaagcactgccagagcaagacggacaagcgcagtgattggctgagccagctaatgtgccgacgcaacaagaacatcgccacggtagccttggcgaacaagaatgcccggattatctgggcgatcctcagcaagggtgaacagtatcagccttgctgaacagcaaagcgcaacacctggagacgcaacgtagtagagatccactcgattgcacagtgacatgaactgatgacgaaccggtcgcaccgacctgtgtgtaacctgctgcatccatcggccctctgctttgcaaggccgctagcccggttaggcgcacaggagcgaaattcatcatggctcaaggctaacgccttatcagaagtcgaatatacggaagcagtcgtacctaggttcagaggcagattatttcactggcaaaacgggaggagtccatata

SEQ ID NO: 145 - DNA, 2107 bp, unidentified
  source 1..2107: mol_type = unassigned DNA; note = element_ISPpu9
acccgctcctacaggtacggcgcagaattcgaaatctgtgggggccctgtaggagatcacccagcccttccgggctgcgctgtcgcgcagcaaacatgaggtgtacggcttcagttccgcagcgacgctgacattttgaaaaagaaaaggcggttggcccggtagggccagccgccttttgctttgttagggttcgtgtgcgcgggacagagatcgtagccagcactggtgtgtgtctgcacacccgcgtaggagagtgatccgcacggtatcggcgtgaagtccctgtaggcatcagctgattcagctgtgaccacgtatgagagagtgaaccctttcgccaccgtgtgccccgcgcgccctttatcctgcgaggattcatcatggcgcgcaagccttccaagcaacgctttaccgtcgtccatcccgattgcgcggcgatcgatgtcggtggtcgagagcatttcgtggcggtcgatccccggcacgaaaatcccgtccagtcgttcacgtcctttactgacgacctgctcaagatggctaactggcttgaaagcctggggatcaaggtcgttgccatggaatccacgggggtttattggattccaatttacgagattctcagcgagcgcggttttgacgtttatctcgtcaatgccagagcaactcggcaaatcacgggccgtaaatcagatgtgctggattgccagtggatctggcagctgatgactcatggactgctcagaggcgcattccgccccgatgatctgacctgctgcgtccggtcattggtcaggcagcgtgcttccaaagtgaaagaccaggcgcagacgctgaaccggatgcaaaaggccatgagccaaatgaacatccagctggccaatgtcatcagtgatatttccggtgtaactggcatgaagattttgcgggccatctgcgcaggtgaacgggacccagtgcaactggctgaactaaccgaccgccgcatcaaggcaggcaaggaggctgtcgctcggagtcttcatggcaattggcggcgcgagcatttgcatgcgctaactcaggaattggctgcctatgacttcctggagcagcaaattgcagattgtgacgacgccataaaagccgcgttagagcagttgccggtgctgcaaaacaagccagagccatccaagaagcctttacggagcccacaccgaaacggcgcccaacagactgtattgcatcagactttgtggaaagttcttggcgtggacctaaccgcaattccaaccattggggtggacactgcattagtgctggcaggggagatcggtacagatctatcacgcttcccgtcctcacagcacttctgctcttggttgggactggctccccctacccgaatttccggcggtcatcgactggcaggtggtgggcccaaaatagtcaatcgagcagcgcaagcactcaagcaggctgcatccaatgcccgtaacgacaagggtttcattggcgcatcgcaccgagccagactgactcgaatggataccagctgcgccatcaaggccactgcgcatcagttggcacgtctggtgtacaacctgttaaccaagaagcaggcttatgttgaacaaggtcttgaggagttcgaaaccagaagccaagaccggcaggtccgggctttgcttcgcaaagcccggaaactggggtatcaactggtggccgcttgagtgcttagaaaacaatgggttgcattttgtttgatgagagatcacccagcccttccgggctgcgctgtcgcacagcaaacaggatgcgcatgacgtcagatctgcactgacatcgagatctagaaaagcattcgccgactgatccgggtaggtcagccgccgaatactttgctatggttcccaatgcgcgggaaagaggccgtagaccgcactggtgtgctgctttgctcccgaatgagagagtggcccaaatggcatcggcgttaatccctgtcggcacagcttgctgtgaccacgtatagaagagtgaacacttcgccgccattgaccccgcgcgcctgtttttttcgctagaaagaacagtgggttatcttttgtttgatagaagcgggttc

SEQ ID NO: 146 - DNA, 1348 bp, unidentified
  source 1..1348: mol_type = unassigned DNA; note = element_ISPsy7
taatgagatggtcagcccgatccgagaaacccggagtgtctacactttccgggtttctctctaacgtcgaggagatcactcatgaaaaacggcctcaagctcttaggcatcgacattggtaaaaacagttttcacctcataggccatgatgcaggcggccaccaagtattacgcaagtgcttcaatcgcaatcgccttctgcagtttgcggctcagattgaaccctgcaccattgcaatggagtcgtgcggtggctctcactggcttgccaggaaactcgcctcgctggggcaccgggtgaagttgattgctccgcaacatgtgaagccctacgtgacgggcaacaagaatgacttcatcgatgccgaagctatatgcgaggcggcctccagaccacgtactcattacgttgccgtcaagactgtggagcagcaggtactttctgtacaacatcgtcttcgcgagtcactggtttgccaccgtactgaagccatcaacagggtgcatggttttttgcttgagttcggaattgccttgccagccaccaaggcagcgatcgccaaagtgcctgagctgattgacgattcacgtagcgacctgccgctgcagttcaaaagggtcatggagcatttgctggaggatattcatcgccttgataccgaaataaaggcctgtgatgcgcaaatcaagcagcaactggcgcaagacgatgctggtacacgcttgatgacgattcctggcattggtcctattaccgccagcgcatttgtagcggatctgggtgacgcttccaattttcgagcctcacgagacctttccgcttttctggggctggttcccagacagttctctacaggcgggagacccgtattgctgggtatcagcaagcgaggtgacaggcacctgcgaaccctgttggtgcaaggttctcgagcgctcatgattcgaatagaacgccgcgatgatgcccttgggcagtgggtaagagacttgttggcacgcaagcatccgaacaaggtggcatgtgctttagcgaacaagctggcaagaatcgtatgggcggtgctcagacgaggtagcacttacaacgcatcaatgatctgagtaggacataggcgtaccggcttttgcgacgcagtgatgatgacgataaacagctcatggccagactgaaaacctgataggcaaagcagccttcgaggctttagggatttttgaggacagtaaggcggcgaatactcatcaagggccgggcagcgaaattgcccagaatgagcccggatacattagcgcaagcatgctttaccgctcatcgaactgcgattgcaggaggtgggctgaccataca

SEQ ID NO: 147 - DNA, 1355 bp, unidentified
  source 1..1355: mol_type = unassigned DNA; note = element_ISPye16
taatgggatggcccgccccgcgccccggcgtagcatcgtggcaccaccatcaaacggagagaaaggatgcgcacaaaacctgaccctcaaacggcggccttcggcatcgacatcggcaagaaggtgttccacgtcgtcgccctgaacgccgctggatcggtgattcagcgcgcgaagttctcgcgcgacacgttgctggccttcttcgatgccgcgccgaatgcactcatcggcatggaggcctgcccgggctcgcaatggctggcgcgtcggcttgtcgcgatgggccatgatgcccggatcattccggcgcgcttcgtgaagccttatgtcaaatcgaacaagaccgacacggtcgatgcggcggcgattgcagaggcggtgacgcggccgacgatgcgcttcgtcgaggttcgcacacccgagcagatcgatctgcaagccctgcatcgcatccgcgaccggctcgtggggcagcggacggcgctgatcaaccaggcgcgagccttctgccttgaatatggactggcgatgcgcgtcggcgctggcggctttcatgccgacatccgtcggcatctgggcaatgtggagaatgacctgacccccgccatgcgggtgctgctcgaagagctgctcgatgacctcgcctacatcgaagggcgcatcagggctgtgaccggcaaggtcgaagcctatgccagccagcacgacgccgtcagtcgcctggtgaccatcccgggcatcggagctctcggcgcgaccgcgatcgtcgcagccgcaggggacggacggcaattccgcaaggctcgcgatctggctgcctggttggggctggtgccggcagagcattcgaccgggggcaagcagacccttctgggcatcagcaaacgcggcaatcgctatgtgcggcgactgatcattcatggcgcccggtcctgccttctgcatctgaaccgggcgaaccatgccctcggtggctggctctcagcccttgaggcacgaacccaccgcaacaaggccgtcgtcgccttggcaaacaagctgacccggatcgtatgggctatcctcacaaggcccggcgccatctacctgccgtcgagaggcgcagcgttaagctgacccttcggccgcagaaccgattgcaggggaaagtgatgaccaaacggttgatcgacctggggtaagccacgcgcaaaaaagcgggacgcgatcccgcaccactaatctggaacccgaggggcggatctcatcaaggccttgccgccaaaagcggctgactgatcagaggccggatacatttacgcaagccggacggccacgcacgaaaaccttgcaatagcggggcggaccataca

SEQ ID NO: 148 - DNA, 1364 bp, unidentified
  source 1..1364: mol_type = unassigned DNA; note = element_ISPye47
tgatggggtggacgcccccccgacggcatctttgtgccaaggtgagtcgttgaaaatcacctaagggaggcgcccgtgaaggaagttatcacaattggactggacatcgcgaagcatgttttccacgcgcatggagctgacgttgatggccgcatggtcttcagccggaagatccggcgtgcgaagctgctggagttctttgcctcgcagcagccatgcgtggttgcactggaagcttgtggcggcgcgcaccactgggcccgtcagattacgcagcagggccatgaggtgcgcctgatcccgccgatctacgtgaagccctttgtgaagcggcagaagaacgatgccgcggacgccgaggcgatttgcgaggcagcacaacggcctagtatgcgctttgtagcggtaaagaccgagcaacagcaggcctcagccatgatcttccgcacgcgggatctactggtccgccagcgcacccagctggtcaacgctctgcgaggtcacctgactgagtatggctgggtggcaccacaaggccgcgggtatgtcaccatgctcgccgatcttctcgaaggcgagatggggcagtcgctgccggaggcagcactcgcgatgttcaaggttatgttgacgacgcttggtcatcttgatcagcagatcgacgcgttggatcacgagatcaagaagcgcgcacgtgaagacgaagttgcgcggcggctcatgacgatcccaggcatcgggccgattgcggcgacagccatcgctgccctggcgccgccgcccgagcacttcaagcgcgcgcgggattttgcggcttggctggggcttacaccgcggcaaatgtcgactggtggcaagcaaaagctgggctccatctccaaaatgggcgagcggacattgcgacggctgctcataatcggcagcagcgccgtcgtgctgcatgctaactgtcggggtgcagcccccggctcgtggttgggccgcatgctcgcgcgcaaggcacgcatgctggtcatcgtcgcgcaagccaacaagacagctcggatcgtatgggcggttttgatgaagaaagaggactataggactccggtggcagctgcggcataacgccaaaactgcgccagaggctgtcggggacgtaggaggtcgaaggaaagcagggcacaacagtcggcgagacggggtcgaacaaaccagaatcttgcaatgtgccaagagcacgcaaaacctgatctggcttcgatccgcgaactcccatgcaggccagcggccataacgctgcaatcacaggccggacagatgacagcatccgactacgagcccagttgcactttacctcttgcatccaacggggcgtccacaga

SEQ ID NO: 149 - DNA, 1156 bp, unidentified
  source 1..1156: mol_type = unassigned DNA; note = element_ISPye59
cttgtcttatgagatttgaggctcctgaggcaaaagggagccgctgcccagcaccgcaaactgcggggcagcggcgggggtggcgccgtgcggagcttggtcttgaaggaccgcggtcgagtttgacgagcccccgtcttttctaacgacctgaacggatacgtgggctgcgggcccgaacgacaagcataggtaggaagaaaagatggccaaggataccatcggcattgacgtgtcgaaagaccgtcttgacgcattctggcattcccggacggaggcgtgctgcctgcccaatacgcctgaaggtttcgggcaattgtgcgcctggctgggaaaggaggaagacgttctcatcgtcttcgaggcgaccggcgcctatcaccgggggcttgagcggcatctgggtctggcggggctgcctttcatcaaagtcaatccaaagcaggcgcggcgctttgcgcaagcaatcggacgattggcaaagactgatagcgtcgacgccagaatgctggcgcgcatgggcgttgtgcttgacctgacgcctcaagtcgttgaaggcgaagatgttcatgatctcagagagttgctgactgcccgccgcgctttgatcaaagatcaggtgaccgcgaagacgcggcttgctactgcactgaacccgctcgtgcgagaacagcttggtcgccgcattgaggacattggtgccgatatccaagcgcttgatgaggtcatcgcgcagatcgccaggcagcgaggcacccttgaagagcgcatccgccgtttgatgaccattccggggattggtcgtctgaccgcgaccaccatgctgatcgacatgccggaacttgggcacctcgagggcaagaagatcaccgctctcgccgggcttgcgcccatgacgcagcaatctggaaagtggcagggcaaggagcggatcaccggcggtcggtcatcaattcggcgcgcgatctacatgcccgcacttgtcgccattcgtttcaaccgggacctccacgacaagtatcagcagctgctaaaggccggcaaagcgaagaaagtcgccattaccgccatcatgcggcgcatcatcatccttgcaaacaccttgctgcgcgagaggcgagattggctgcctgaccgcccttgaccaagacggata

SEQ ID NO: 150 - DNA, 1344 bp, unidentified
  source 1..1344: mol_type = unassigned DNA; note = element_ISRel7
tgatgtggtggacggcctccgcacccggcatcgcaatgtgccaaagtgtggctgtcgaaagtcacataagggagagccgtccatggagaagattaccacaattggtctggatatcgccaagcatgtatttcaggttcacgggatcaatggtgccggcgcgacggtgaaccgccgcaagctgcgccgcgacgatgtcgttggattcttcaaggcattgccgccatgcctgatcggaatcgaggcatgcgcgactggacaccactgggctcgggttcttatggcgctgggtcacgaggttcggctgatgccggcgtcttacgtcaagccatatgtgaagcggcagaagaatgacgcgacggatgccgaggcgatttgcgaggcggtgacgcggccgacgatgcgcttcgttccagtgaaaagcgaggagcaacagggtgtgctgatgcggcatcgggtccgcgagcttttgatccggcagcggacaatgctggtgaacgccttgcgcggccacttggcggagttcggcatcgtaacgcgacagggcattgccggcgtcggaatgctgatcgcgttggtcgacgacgatgatcacgatctaatcccgccgcttgcgcggtccgcgcttcttcccctaatcgggcagttgcgggaggtgcacgagaaggtcagagagctggatcgccaaattcatgcttggcatcgctcgaacgaactgagccgccgccttgagacgatccctggaattggcccgatcactgccagcgcaattgccgcgacggtgaccgacgcgtcgttcttcaaatccggccgacaattggcggcatggataggcctggtgccgcggcagaactcatcgggtggcaaggaccgcctcggaaggatcagcaaacaaggcgatccctatctccgccggcttcttgttgtgggcgcgcatgcggtgcttcgtttcagcggcaaggctaaagttgcaccgacgcgttgggccgccgaacttctgccgcacaacttcgtcgctgttgctttggccaacaagatggtgcggatcgtctgggcgttgatgacgacgggcaggcgctttgaggcgaccgctgccctttgaatgctcacagaggatgcagaaattggtgaggtgctgatggcgtgatggcgaacggtcgagccgggatcggacaaacccgatcagtgggtgccgcttgaaagcattgacctgtctgggatccgatcagcggactacatcagggccagcggcatgaacgcgccgcaatcaaaggccgtatacatgcctgcacccgaccaatctgccagaaacactaactgccccttgccacggaggccgtccataca

SEQ ID NO: 151 - DNA, 1149 bp, unidentified
  source 1..1149: mol_type = unassigned DNA; note = element_ISRfsp2
ctagtataatctaacgggacacggtataccgttctgcgccaggttcacgagatcgccgcggagtgttgggtagccgtgtccttcaacgcgaccaagccgaacagttatctgggccctcaaacccgcatatgctagcaaggctggcgccgttttcctcaggaggttctgtgtatggcttcccgtgagtcgctctttatcggcattgatgtctccaaacagacgctggatgtggcgtttggcgccgacccgcacgcgccacgcgagacgataccgtctaccgacgaaggtgtccagctcctggtcacgcgactccagcgcctgcagccgaccctgattgtgctggaggcgaccggcgggctggagcgcatggtgttcgcccaactgctccaggctggcttgccgacggcgcgggtgcagccacgccgcgtgcgcgccctggcgcacgcggaaggacgccaggcgaagaccgaccgcctggatgcccggttgctcgcccgctttgccgaacgggtgcgcccgccgcaccaccaagcgacggacgagcagcgcgcatccttgcgcgacctgctggtccggcgggagcaggtgattcagatgcggacggctgagatcaatcggttgacggctgccgcgccgaacctccgcccgggcatccagcagcatattgattggctggatcaggagatccgtgcgcttgagcaggaacgcgacaacgaggcggagcgcaccgacgaggtgcgccggaaacgggagctgctcgaaagcgtgcccggcatcggcgcgatcaccgcactgaacctgctgctccgcctgcccgaactggggaccatcaatcgcaaggaagcggcggcctttgtgggcgttgcgccgtatgccaatcagagcggcgcacagcacaaaccccggcatatctccggcggcaggagggatgtgcgcagcgtgttgtacatggcgaccctggcggccacgcggcgccgtctggtcaggcgcgccttcgatcagcgcctgtgtcaagctggcaagccgcgcaaggtcgccatcgtcgctgcgatgcgcaagctgctgactattctcggcgcaatattgcgtcagcaaaagccctgggatccggctgtgcatacgagcgccccttgacaagcaacacagtta

SEQ ID NO: 152 - DNA, 1431 bp, unidentified
  source 1..1431: mol_type = unassigned DNA; note = element_ISRhosp8
ccgttacgttatttacggtccttcacagaagggctacggtcgccagacccggtatgactccttgcccctgtctcacgcatgatccggggggtggtgtcgccgggtgtggtggcgtcgacggaccgctgatagggacacggccaaccgaagtttgggtaggtccctttgtaacgtgggtgccgggcgtcgatgccggatcggcgaccgaccgaccggagacacaaggggcgaaccctgaatggactcgaactatgcggtgtactgcggcatcgacgtcggcaaaggtgagcaccacgccgtcggactgaccgccgccggaaagaaaatctacgacaaggccctgccgaacgacgaagcgaagctgcgggccagccacggatcggtgctggtggtcgtcgaccaacccaatacgatcggcgccctgccggtcaccgtggcccgcgcctgcagccacgaggtcggctacctgcccggactggcgatgcgccgcatcgccgacctataccccggacaagcgaaaacagacgcccgagacgccttcatcattgccgataccgcccgcaccatgccgcacaccctgcgccgggtcgacaccggcgacgaggccctcgccgagctcgaggtcctcatcgggttcgacgacgacctcgccggcgaggccacccgggtcagcaaccgcatccgcggactcctcaccggaatccatccagccctcgaacgggtcctcggcccccgcatcgcccatccggcggtcctcgagatcctctcccgctgcgggggaccggccggaatccgcaaggccggcaagcgcaagctcaccgcgatcgcggtcaaacacgcgccccgcatgggcacccgactcgtcggcgagatccttgccgccctcgaagagcagaccgtaattgtccccggcagcacggccgccgagaccatcctccccaaactcgccgacaccctgaaagagactctccagcaacggaaatcggtcgctgaggacgtggagggggccctcgatgaccaccctctttcccgagtcctgacctcgatgcccggcatcggtttcaggactgcagcccggatcctgatcgaggtcggcgacggctccgccttcgcctccgccgcccaccttgccgcctacgcaggcatcgcaccggtcacccgcaaatcgggctcctcgatccgaggcgaacacccggcccgatccggcaacaaaaagctcaaacgagcgctgttcctctccgcgttctccgccctccacgaccccaccagtcgcgcctactacgacaaaaagcgtgccgagaagaaaaaacacaacgcggccctgatctgcctcgcccgacgccgctgcgacgtcctctacgccatgctgaagaacaaggaactctaccgggcaccactcccctcggcggcttgacgggaaccatagggaca

SEQ ID NO: 153 - DNA, 1381 bp, unidentified
  source 1..1381: mol_type = unassigned DNA; note = element_ISRhru3
agatgcggtaatgggccttggccaggagtctagccaggcaaggtggccatccccgaagatggtgttgaagaaccacggggtccgaagcgatcggccccaagcatcgacggggatagccatggactactatgccggcatcgacgtttcattggaactgagcagcgtgtgcatcgtgaaccaggatggcaagatctttcgggaagtgaaggtggcgagcgatccggaagcgctgattggcctgttcggcgggcttggtgtggcgctgagccggatcggcctggaagccggaccgttatcgcagtggctgcacgccggactgacggctggcggatacgatgtggttcttttggaaacccgtcatgtcaaagccggactgtcggcgatgacggtgaagaccgaccgcaaggatgcgcgtggcatcgcccatttgctgcggatggggtggttccgtccggtgcattgcaaaaccaactcggcccaggaaatccgggtgcttctggtggggcgcaagcttctgcaaagcaagatgggagacctcgagcaaggcattcgcggcctgctgcgcggcttcggcctcaaagtcggggtcattagcaaggggcggttcgccgcccgcatccgcgaattggtggccgggcaagccatgttggaaacggtcgccgagccgatgctgcgcgcccgcgatgccttgcgtgcggaattcacccttctgcatcgccagattttggcgattgtgcgaaaggacgacctctgccgccgcctgatgacggtgccgggcgtcggccccctggtggcgcttaccttcaaaagcgggattgatgatcccagtcgctttacctcgtcaaagacggtcggcgcccatttcgggttgaccccgaagaaatatcaatcgggcgaaaccgacattaccggaggcatcacccgcaccggcgatgccatggtacggatggcgctctatgaggcggcgcaggtgctgctaaccagatcccagcgcttctcaagcttgaagcgttgggccttggaggtcgccaagcgacgcggcatgaagcgggccaaggtggccctggcccgcaagttggccacggtgctccatcgcatgtggatcgatggcagcgacttccgttgggggaaggagatcacctcggcgtaaaaggaaatagctttcaggtgggactgaacggttccgccttccgaggtcccgtcgccgggacgcggagtccgttgaagccgcaaagggttgtgctttggagcacgcgggtcagatcggctcacggattccctctgatagcatggtgtggcggccacgtgccgaccacggacggaagcgtgagacggcgacgagacaactctcgggggttgacaccagaaggcccattacgga

SEQ ID NO: 154 - DNA, 1398 bp, unidentified
  source 1..1398: mol_type = unassigned DNA; note = element_ISRsp4
tgttgaggtggacggctcccaacggcatcgaatgtgccagaatgagttcgttgaagttctcaatcgagggaaaccgtccgtggaacagattatccgaattggtatggatacgtcaaagagcgtcttccaattgcatggtgtgaatgcggttgagcagccaatccttcgtaagaagctgtcgcgccgggaaatggtgaagttcttcgagaaaacaccgccgaccattatcgcacttgaagcgtgcggtgggtcacatcactgggcacggctgttaagttcgttcggccatgaagtaaagttgatagcaccgcaactggccaagccgtatgtgaaacggggcaagaacgatgccgcggatgcggaagcattgtgtgaggcaatgagccgcccgaccatgcgcttcgtgccaatgaaaacggctgatcagcaggcggcgttaatgctggtcggtatgcgagagagactcatccgcaatcggacacagctcgccaatgccattcgcggttttgccatggaatttggcatcgttgcggccaaaggcatgtgccgcatcgaagcgctattggagcgcattgccgctgacccgtccctaccggaactggcgcaggatctcttcgcgctgcatggacaggaataccgcgagctagcttgccagatcaaaacgctcgatgaaaagttgatgaagttgcatcgtgctgatgaatgcagcaaacgcctggccgagatcccgggtgtcggcccgataggcgcctcccttctcttgatgaagacaccggatcctcgaatgtttaaatcgggccgcgactttgcagcatggatcggtctgacgccgaaggaccattcaactgccggaaaggtcaggcttggtgtcattacccgggctggcgacgaaatgttgcggagcatcttggtggttggcgcgacatctcttctacagcaagtcagaacaggccgcagcaggcacgcctctgcatggcttatggggctgctgcagcggaaaaggccaaagttggttgccgtagcgctcgccaacaagctggcgcggattgcgtggaagcttatgacgagcggcgagtcatatcgccaggcagaaggccaagcgcagacatcataaaagttcagccaccacggtgagcaaagacaaaatgctaccgtgtgagctgatgctgtgaacttgcaagcgaagagcagatgatgcgatcggacgatccaagacgcgtgaaactccgttaggcccactgaccgctaaaggtcgagaccatgttaggaatacgcgttgcggaaatcatcttggccagtggtcatgtgcgaccacaccaaaaggccgcacatatggaagcaagcgatccggtcaaaaatatctgcagaaaacacttgcaagcgggagccgtccacata

SEQ ID NO: 155 - DNA, 1478 bp, unidentified
  source 1..1478: mol_type = unassigned DNA; note = element_ISSam1
cgttatctttttcgcggtcctgcaagagggccgctggcctccgggcccggcatgactgttgccccctgtcgatgggatgacctggggggtggtgtcaccgggtccgaggggtgccgtcggagacgctgatcagaggtccgaccaccgtccggccgggcgcaatgccaggccgctcgcgggcggcaggtctgcataacgtggatgcgcgagaacggctcccgaccttgaggccggcacgcatcgacacatgtgggggcacggtgatcagcatcgacggggtgggcgtcttcctgggcctggacgtcggcaagcagacgcatcacggccacggcctgaccccggccgggaagaaggtgttcgacaagcagctgccgaacagcgaaccgaagctgcgggctgtcttcgacaagctcacggccaagttcggcaccgtcctggtgatcgtggaccagcccgcctccatcggcgccctcccactgaccgtcgcccgggacgccggctgccaggtcgcctacctgcccggactggcgatgcgccggatcgccgacctctacccgggcgaggccaagaccgacgcgaaggacgccgcggtcattgcggacgctgcccgcaccatgccccacaccctgcgcaccctcgacctgaccgatgaggtcaccgcggagctgaccatgctggtcggcttcgaccaggacctcgcaggcgaggccaaccgcacctccaaccgcatccgcggcctgctcacccagttccaccccagcctggagcgcgtcctcggcccgcgcctggaccatccggcagtgacctggctcctcgagcgttacggatccccgcaagcactccgcaaagcgggccgccgcaagctggtcgaggtcgtccgcccgagagccccgcgcatggccgagcggctggtcgacgacaccttcaccgcactcgacgagcagaccgtcgtcgtcccgggcaccggcaccctcgacgtgatcgtcccgtcgctggcgaagtcgctggccgccgttcacgaacaacgccgggccctggaaacgcggattgaggcactgctggaggcccaccctctttcccaggtcctgacctcgatgcccggcatcggcgtcaggaccgccgcagtcctcctggccaccgtcggcgacggcagcagctttcccaccgccgcccacctggcctcctacgccggcctcgccccggtaacccggcagtccggcacgtcgatccacggcgagcacgcccccagaggcggcaaccggcagctgaaacgagcgatgttcctctccgcgttcgcagccctccacgaccccgcctcccgcacctactacgaccgctgccgagcccgcggcaaaacccacacccaggccctcctccgcctcgcccgccatcgcatcagcgtcctgttcgccctgctccgcgacggaaccttctacgagccgaggagccctcgactcgcttgacgaaggacatagagg

SEQ ID NO: 156 - DNA, 1349 bp, unidentified
  source 1..1349: mol_type = unassigned DNA; note = element_ISShes7
atgatgggatggacacctcttgtgaagtaggcgtcatttacgccatattgaatttgcacgttcaataacaacaaaaggtgtccaaaatgaaagttacactaataggaattgatctcgcaaaaaatatcttccaagtatgtggggtaaatcaagctggcaagagtgtttttaaccgttcgattaaacgtgctcagctccttacttttctgcgtacttaccctgatgccactattgcgatggaagcctgcagtggctctaactattggggcagagagttactttctctcgggcatgacgtcaaactgatcccgcctcagcatgttaagccatttgtcaaaggcaataagaacgatcgcaatgatgccttcgctatctgtgaggcggcgcagagaccgaacctgattttcgtccagccgagaaccttagcgcaggttgatatcatcattactcacagaattcgcgagcgccggatcagaatacgcactgcactaaccaatcaaatcagaggtttactaagtgaatatggaatagccctccctaaaggacgtaatccattgaatcttttactgccggaattacttgaggatgccagtaatcaactcactacgattgcacgccaatacatgcgtgagctgatggaagagttgcgtgcgatcaacgttgcaataggttcactggaaaaagacatcaaactgcaggcaagaacgcacccagatgccaagcgactaatgggtataagaggcgttgcagaaatcattgccactgccgcggtgtcatttgccggagatggctctggctatcatggtgctcggcatttttctgcaaatttaggactggttcctaaagagttttccagtgggggaaaacagaaattaagcggcataaccaaacgaggtaacagctatctgcggcggcaactgatccagggagcttggtcgattattcgctatgcaagtaagagtaatgacaggatctccgtatgggccttaaaggtgattgagcggcggggtaaacagaaagcggcagtagcaattgcaaacaaattggcgcggatcatttgggcgctgctgtttcatcgcagcgaatatcggtcttgttaatttgtaaaaatcgagtattaaactcaccccaaaaacacgactacagataatgaagtaacaggtaataccggcctttgcagatgctgagagagtacaaggagcatatgactccggacggacgataagctgcaaaggcgcggttctcattaaggccagagagcaaagattctcataaacaggtcggatatacgtacgcagtattactttctgttacttaaaaagtggttgatctattcgaggtgtccatat

SEQ ID NO: 157 - DNA, 1404 bp, unidentified
  source 1..1404: mol_type = unassigned DNA; note = element_ISShsp1
tgttggggtggacggctcccaacggcatcgcaatgtgccagagtgagtgcgttgcaagactcaatcaagggagccgcccgtggagcaaattacccgcataggcatggatacgtcaaagaacgtttttcaactgcatggcgtcgatgcagcggagaaggcagtgctgcgcaagaagttgacgcgccgggaaatggttcggtttttcgaaaagctgccacccaccgtcgtcgctatcgaggcatgcggcagttcacatcattgggctcgtcttctcggatcgctcgggcatgacgtaaggttgatcgcgccgcaattagcgaagccctacgtcaagcgcggcaagaacgacgcggcggatgccgaagctctctgcgaagcggtgagccgcccaacaatgcgcttcgttccagtaaagactgcagaacaacaggcggcgctcatgttggtcggggtgcgcgaaaggctcatccagaagcgcacccagctcgtcaacgctatacgagggtatggcgcggagttcggcatcactgcggcgacgggtgcatgtcgcgtcgtaccgcttctcgagcgcatcgcggcagatgaaacgatacccgaattggcgcgcgaactttttgccctgcagggaaaggaatatgcgcagctccagtgcgagatcgaacggatcgacgcgaagctgatggaatggcatcgcaacgacgaatgtagtcagcgactggccaaaattcccggcgttgggcctatcggcgcgaccttgctcatgatgaaaacgcccgatccgcatctattcaaatccggtcgggattttgcggcatggatgggcctgacccctaaagatcactcgaccgccggcaagacaagacacggcgttatcactcgcgctggtgatgagcttctcagaagcacgctcgtggtcggagctaccgcagtcgttcagcacgcccgcaatgggcgaggtaggaatctcacaccatggcttatcggcttgattggacgaaaatcacctaagctcgttgcggttgccgttgctaacaaagccgcacgtgtcgcgtggaaactcatggtgagcggcgagcgataccaatgcgtcgcgccgcccgcccttactgcggtagcagcataagaattagccaggagcgatgagcagaatatcaatgctatcgtactgagctgatccgtgatcttgcatgaagagagcagatggtgcgatcgatcgatccgaggcgtgtgacactccgtcagttccagtggccatcacaggccgctgccgtgttgggaacacacaccgcggaaaccatcttggccagcggtcacgtgcgaccgcaccgaaaggccggacatatggaagcaagcgatccgatcaaattttccgttcagcccttgcaagagggagccgtccacata

SEQ ID NO: 158 - DNA, 1342 bp, unidentified
  source 1..1342: mol_type = unassigned DNA; note = element_ISSlo1
atgatgagatggacacctcttgtgaagtcggcgtcaaaagcgccatattgaatttacaaggttcaatgtcaacaaaaggtgtccactatgaaagttactctaattggtatcgatttggcaaaaaatgttcttcaggtttgcggtgtcaatcaagtcggtaaaacgctctttaatcgcaccgttaaacgcactcaactgttgaaaacgctcgttcagtatccagatgcagtgattgccatggaagcctgtagtggctcaaattattggggccgagagctgttgtcgcgtggatttgaggtaaaacttatcccaccacagcatgtgaagcccttcgtgaaaggcaataaaaatgaccgcaatgatgcctttgcaatctgtgaggctgcgatgcgccccaacattatcttcgttaagccaagaaccttagcgcaggtcgatatcattatttcccatcgaattcgcgagcgtcgtattcgtgtcagaaccgcgttgaccaatcaaatacgtggattgttgagtgaatacggcattgttattcccaaaggccgcgacccgctcaaccttgctctacctgagttactcgaagatgccgataactcactaaccaccaccgcccgcaggtatatcagagagttacttgatgagctatatgccatcaatgcttcgattaaagcactggaaaaagagattcgactacaggcaagaaatcatgaagataccaagcggttaaccgccatacgaggtgtcgctgaaattattgctacggcgtcggtatcgttcgctggtgatggttctgggtatcaaaatgggcgacatttctcggcaaatttggggctggtaccgaaagaattctcaagtggtggaaaacagaaattaggagctatcaccaagcggggaaacagctatctaagacgacagctgattcaaggtgcttggtctgtcatacgctatgcaaagaataatgacgacaggttatctgtctgggcaagaaaggtcattgaacgaagaggcaaacagaaagcggcggtagctgtggccaacaaactcgccaggataatttgggcgatgctttactacaaaacggagtacagacctagctaaacaacaagaacaattacataccctaaaaaccgaacacaattaatgaagtaacaggtaataccggccttcgtaaatgctgagagagcacaaggtgttgtaacaccgaacggacgataagcagcgaaggcgcggttctcattaaggccagagcacaatgatgctcacaaacaggtcggatatacgtacgcagtattactttctgttactcacaaaatgtttgatctatccgaggtgtccatat

SEQ ID NO: 159 - DNA, 1168 bp, unidentified
  source 1..1168: mol_type = unassigned DNA; note = element_ISSm3
cttgtatctcgaaagtggattactatgaactggcttagatttggcaaggtctgtgtagtcagattcctcccggggttattgaagcccgcagcatagcgattgacgcacaggctgagccattcatctgaagcccgaacagttgtccgaacttcaaatcgtatttgcaaggaggggtatagatgagcgtgtcaaatcaacgttgtgcaggcatggatgtttcaaaaggaactctggatattgcaatcagcaatattgccagccagttcactgtaccaaatggaactgacggttttactcaaattatcggagaattaaagaaaaatgagacaagattgatcctcatggaagcaacaggaggactggagtcaggtgtggcttgttatcttcaatcagaaggctttgacgttgtcgtcattaacccccgtcaggctcgagattttgcccgtgcaatgggctatcttgcgaagacgaatcgtattgatgccagaatattgcttcagatgtcggaagtgattagccagcacccagaacgggaaaaatacatccgtcccttgcctgatgcacagaggcagattctggcagcgatggtggtcagatgcagacagctaacagtcatgcttacagccgaacgaaaccgattacacccctcgcatcctcagagttatgaaagcattagatcaattatttcggtactgaagagtgatctgactcgcattcaaggtgaaatgtcgattcacatcaagagccatttcagtgagttatctgatctactgagtgcagttaaaggtattggggctgcgacagttgctgtattgctggctgaagttcatgagcttggttcgctctctcgacgtgaaattagcgcccttattgggggggctcgagtaaacagggattccggtacgatgcgcggtcgccgaacagtattcggagggcgagcttccgtccgtacagctctctatatgtcagccctggttgggacgaggcacaaccaggtaattaaagagttctatacatgcctggttgccgcaggaaaatccaaaaaagttgcactgacggcctgcatcagaaaattgctgaccatcctgaacgcaatgctgaaaaagaatgaagcatgggatccgatgtatcaccagcctgcttcgtagtcgcactcgaaagacagttg

SEQ ID NO: 160 - DNA, 1439 bp, unidentified
  source 1..1439: mol_type = unassigned DNA; note = element_ISSod14
tgctgagatggtcacctcggtctcggcatcgcaatgtgccatgatttaggtgcacaaaatctgactcgaggtgaccgatatgaactataaactcatcagcattgatttggcaaaaactgtcttccaagtcgcagcctttaaccctgataacaccattgcttttaaccgtaaaatcaatcgcccagcattacttgacatgcttaggcaatgcgagccgacactcgtggtgatggaagcctgctacagcgctaattactgggggcgtacaatcgaaaaactcggccataccgtcaagcttatccccgccagaatggtgaaagccatgctggttggtaataagaatgacgccaatgatgcggttgccatcggagaaacggctggccgccctaaagtgagtctacttcgccctaaaacggtcgagcagcaggatattcaatctttactgcgcattcgtgagcgcttggtggagaatcgcacggctaactgcaatcaactgcgtggttttctcgcggaatacggcctgattgtcgcaaagacccgccgccagttgatgttagccattccgctcattcttgaagatgctgacaacgaattatccacggttgccagagggtttattcaacgactctatgagtttcagttgtatttaaatgaacaaatcgaccaggttgcacaggacatattagcccttgcccaagccatgccacagtatccattattgctaaccatccccggtgtcggccctatcgtcgcatccacattattagccagtattaatgaagttaatgattttaaaaatggccggcaattggcggcatggctagggctcactccttcacaatacagcagtggcacgaccaatcggctcggcaagataaccaagcgcggaaatcaaacgctccggcggttacttatccatggcgcaagaaccgtggtgaactggtgcgataagaaagacgactcacttagcctgtggttacaacggcttaaacagcgtcaacacgtctgcaaagtgacggttgccttggccaataagatggctcggatggtgtttgtagtgatgagccgcggacaagcatttgatatgaataaggcctgtaaattggcaacgtaatgcagtgttttttgcgtaaatagactcaaaatgtaaatagataaatgtccatcaaagcacaacagcggtaatggtattaatgagttaaacggtttgtcttacccaaaacctgatgaggacagtggcctttgaggccatgtgggtgccaaggagggtaagacgtcaatttggatctcattagggcgcaacagacgccggatatatgtcgcaagaccgcaaaccattaacgaccgataccccgttgtgaaaggtgaattatcgattagcacaaattaatttgaacaaaataggacattgaccttgctaaccccgaggtgaccatata

SEQ ID NO: 161 - DNA, 1373 bp, unidentified
  source 1..1373: mol_type = unassigned DNA; note = element_ISSod19
ataatggaatggacccatccacttttaatcggcctcgcaatgggccacgatgtagtcgctaaaactcatcagaaagaggacgggtccacctatgaagattactacaatcggtttagatatcgcaaagtctgtttttcatgctgttggcgtcgataaagcgggtaagttaatcaaaaagaaaatgcttagacgcaaggacttacttccctttcttgctcaaattgagccgtgtctgattgtgatggaagcctgtggtggggcaaattattgggccagagaatttgagctgttgggccacagcgtcaagttaattgctcctcaatttgtagtaccttttcggcaaggtaataaaaatgactacaacgatgcgctagccattgccgaggctgcgcagcggcccaacatgcggtttgtaaaacccaaaagcgtcgagcagcaagatgtgcaactgctccaccgtatgcgggaacgattaactaaacaatcaaccgccttaatcaatcaagtcagagggatgctagcagaatacggcattgtgatgaccaaaagtaaatcggcttttaaagtacagttcccagatattttagcggatgaagccaatacactgaccactaaaggtcgggccattttttatcagttatatgaagaatttagtgatatagaaaaacggcttaagagttgtgatgcacaagtgctcacagaaactaaaaacaatgtgatttgccagcgtttagagactatccctggcattggtccagtcaccgctaccgccttttatgccgccgcaggtgatggtaaagatttcagtaatggcagacacttttcagcttggtgtggcttggttcccaaacaacacagcagtggaggtaaagataaccttcttggaataagcaagcggggaaatgcgtatttacgcaccctgttcatccacggcgccagagcggtgttgcaacacagccagaataagcaagataagtttagttgctgggcaatccagttagcagagcgccgaggttttaaccgagcctgtgtagccgtcgccaataaactcgcgagaatggcatgggttatcgcggcgcatgacgaagaatatcgacttccagtatagtgctgaatagattcaataaacgttaataattaaccaaccagcaagttgctaagacacttgaattgatgatgagacagtcagactgatctactaaaaaccttagctcgccataggctcataatgaagccgcaaggatgataaggacagtagaagcagatatccatcagggccagaggcatacctcaataacaggccgaatatatgggtgcaatgaactcttctcaaaattgatatcgaatgtcttgcaaaccggatgggtccatat

SEQ ID NO: 162 - DNA, 1383 bp, unidentified
  source 1..1383: mol_type = unassigned DNA; note = element_ISSpe2
taatggaatggacccatccacttttaatcggcctcacaatgggccacgatgtagttgcttaaactcatcagaaagaggacgggtccactatgaacattactacaattggtcttgatatcgcaaagtccgtttttcattttgttggcgttaataaagccggaaagcttgtcaaaaagaagataattaagcgcaaagagttagtgctttttcttgctcaaatagaaccttgccttgttgtgatggaagcctgtggcggtgcaaactattgggctagggagttcgagaaagttggccatcaagttaagttaatagcaccccagtatgtcgttccctacagacaaggaaataagaatgactataacgatgcacttgcgatagctgaagcagcacaacgccccaacatgcgctttgtagagcctaagccagtagagcagcaagatattcagatgctgcatcgaatgagagaaagactaaacaaacaatctactgcactgataaatcaagtgagaggtatgctcgctgagtacggcattgtcatcacaaaaggaaaagcgtcttttaggacaaagctaccagatattctagaaaatgccgataacgaattaacagtcaaaggccgaagtgttttttatcaactatatgaagagtttaatgacattgagaagcgacttaaaaactgtgatgcccaagttcaacaagaggtgaaaagtaaccaagtatgccagcgcttagaaagcgtaccaggcattggccctgtgactgccacagcattttatgcagctgttgggcaaggtaaagattttaccaatgggagacatttttcagcatggtgcggtctagtacccaaacagcatagtagtggcgggaaaaataatttgcttggtattagtaagcgaggaaacgcttatttgagaacgctatttatccacggggcaagaactgtcttacagcatagttctaataaaactgacagatttagttgctgggctagcgcacttgcagaaaggcgtggctttaacagagcttgtgttgccgtagctaataagcttgcacgaatagcgtgggttatagcagcaagagaagatgaataccgtatcacagtataaattaatcattaacgcgtcaacttaacgagataatcataagttttgctaaccaccaagttgccaagataattgatttgatgatgagacagtcagactgttctgcttaaaaccttgcttcgccacaggctctaaagaagccgtaaggatgataaggaaagtagaagcaaatatccatcagggccagaggagtacctcaataacaggccgaatatatgggtgcaatgaactcttctcaaagtcgatattaaataccttgcaaaccggatgggtccatata

SEQ ID NO: 163 - DNA, 1325 bp, unidentified
  source 1..1325: mol_type = unassigned DNA; note = element_ISSpe4
agataattggactccccactctttaattcgttacggtataagtcaattctcacgagatttcggagtttaaaatgaaaggtacgattgttggcgttgatctggctaaaaatgtaattcaagtttgtgtcttcacaaataacaaggtgcactcaaatactgaaatgacaccgaatgaatttatcgactggctggctaactttgccaccgtaaccatcgtgttcgaagcttgtggaatgtctaattactggaaacaaaaagcaatgacgtttggccatgaggctaagttaatttcagcaaagttagtctcagctgtcaggcaaaatcaaaaaacagacaaaaatgatgctttagcgattgttcaggcggcactcttgcccgaggtcaacttcatcacgggtaaatcagtcgagcagcagcaactgcaatctattatgagactacgagagctggctattaaacaaaaaacggcgatgactaaccagctcacttcattattagcagagtttaatctgatgacgtcaaccaaacatggcggcttacgcggtgtgattgaatcaacgttagaagacgctgaaaatgatttttcttctgagtttcgtaacgctcttgcggcggcctggcaacagtatttagctgtcgtcacatctatagcaacttatgaccagtgcttggaaaagtcacttaacactcatcctgaggctaaaaaactattaaaaattgaaggggtgggtactctcaatgctattaatctttatatcgcattaggttgcgctgatattggtgttgtttccacaggaaaagatgcatctgcctgtattggattaacgccgattcaatattcttcaggtggaaaggccaaactggggtccataggaaaacacgttaagaatagcattctcagaagccagttaatcacaggtgcgttgtcagcggttagtcaaatggtcaaaagagaacccaaaacgacgaaggagcgctgggttcaggctttggttgagcgacggggtaagaaatgcgccgcggtggcgttagccaataagacggtcagaactgcctatgccatgcttacacagggtacagaatataaagcagagttaatttcagcgtaaaagcgttcaaacaacaaaaatgcacaatcgaagattaaaatcagccagttaaggtagcccgtatcaaagagtcttgaactcgtcgtgtagaattatcaactggttcgcgtaaatatcatagagcctgagttcgctactcaattgagagctcgtacataagttcgcatttattctttaagagtgcctgtttgttgttgacacaggggagtccacata

SEQ ID NO: 164 - DNA, 1356 bp, unidentified
  source 1..1356: mol_type = unassigned DNA; note = element_ISSph14
tatgggatggcccgccccttttcaccagcatcaggtatgatgctggtgcttgaaagggaaaggagcggaccgatgtctattgtgatccttggcgttgatttgggcaagaatgcctgcagtgtcgtaggcgttgatgcagcaggcgctgtcatcgtgcgtaagtcgatgcgccgacagacacttatcgattacgtgaccaagcttccggcttgcgtgattgcaatggaggcgtgctgtggtgcccaccaccttggtcgacttttcgccgcgcaggggcacgaaatcagattgatgtcgccggagtacgtgcgcccgtatgttaaagcgcagaagaatgatgatcgtgatgcggaggggattgccgaggccgcctcgcgcccgacgatgcgcttcgtcgaactcaagactcaggagcagttggacatccagaccctccaccgcgtcaggtcccgcctggtagccgagcgcacaaacctcatcaaccaactgcgggcgatcctgctggagcgggggaccattttcccggccggacggcgcaagctggagctgggcattgatgccatgctggccgccgaagatacgaccctatcaccacgcttgaagcaactggtgggtgaactgcgtgccgaatggcacgaacttgataccaaggtcgaggcactgaacggcgagtttgtcgaactggctcgcaatgatgcagctgcccggcggctcacgtccatccccggcatcggtacattgaacgcaaccgctttgattgcagccgtgggcgatgccagcagctttgccaaagcgcgagacttgggtgcctggctcggcctggtacccaggcaacatactaccggcggcaagccccggctgctcggcatctccaagcgtggcaacacctatttgcgcactttgctcatccatggcgcccgggcagcattaccgtcactggcgcgcagcgaaaccccgctgggacgttggttaacaggaatgatcgagcgaggagttcatcgcaacgcaatcgtcgtcgcattggcgaataaactggcgcggatcgcttgggcagccctccgcaaagaagtgagcttcgaacgcggctatccagcagcggcataacggatcggctgcgtgcttctgcacgcgtagcccaacgatgtttgcaggaaggatcgtgaagatggcctgacagtcgatcggcgtctggaaagcccgggcaaaaaaatggcacctgttgccggttcccttattgtggctccagacgtgcggatgtccatcttggccacgggatgctcccgtgagaccgcatacgttgacgcagactgatcagaacaccgtaaaatcctacttgcaaacggggcgggccatacg

SEQ ID NO: 165 - DNA, 1399 bp, unidentified
  source 1..1399: mol_type = unassigned DNA; note = element_ISSphsp16
tgttggagtggacgacccccagcggcatcgaatgtgccagaatgagttgtcaacgctcaaacaagggagccgcccgtggaacagcttatcagaatcggaatggatacgtcgaagagtgtttttcagcttcatggagtgaatgcggccgaggaggtcgttcttcgtcgcaagctgcgtcggaaggacatggtgacgttcttcgaaaaactgccgccgaccgtcgtggcgatcgaggcgtgcggtgcctcgcatcactgggcgcgcctgctcacctcattcggtcacgaggtgaagctgatagccgcacagctggttaagccgtacgtcaagcgtgggaagaatgacgcagccgacgccgaggccctgtgcgaagcaatgagccgaccgactatgcggtttgtgccagtaaagacggccgatcagcaggccgtgttgatgctgatgggtgtgcgtgaccggttgatccgcaaccagacgcagctctcgaacgctatccgcggctttgctgcagagttcgggctgacggccgcccggggtatcgatcatctcggtcgattgcttgatcagctgcaagccgacaacagccttccttcattggcccgcgaattgttcgcggcccacgcggaagaatataagcagcttcaggcaaaaatcgcggaggtcgatgccaagctggcagcctggcagaaaactgagcctcactgcaatcgcctagcgaagatccccggtatcgcagcgatcggcgccgcattgctcgtgatgaagacgccggcaccagagaggtttgcctcagggcgccagttcgctgcctggatcggcctgacaccgaaagatcactccaccgccggcaaagtcaggcatggcggcatcacccgcgcaggcgatgaagggttgcgcagcgtcctggtggcgggcgccacagcggtcgtcaggcacgtcgccgcgggcaccagcaaaaatgccttcgcgccttgggtggaacagttgctcaagcgcaaggctcccaaactcgtcgccgttgctctcgccaacaagatggctcgcatagcctggaagctgatggttaccggccaaagctacgccggcaagactgcaccggtcgagatagccgtcgccgcatagaggtcagccaacgcggggagcaaagagatgcaaccgcgctgagccgatgcccgaacttgcaaggaaaaagcagatggtgtgatcgatcgatcccgacgtaggaaaatccggtagccccaatggccttcgaggtcgcacacttggctggaaccgacgtcgcggaaaccatcttggccagcgttcactcgagcgcgcaaaaaggccggacatatggaagcaagcgatctgatcaaattaatgcccaagaaagaccttgtaagagggggtcgtccacata

SEQ ID NO: 166 - DNA, 1310 bp, unidentified
  source 1..1310: mol_type = unassigned DNA; note = element_ISSpi6
ttaattagatggtccgcctcacccctaagctaaccttagggttaggcaatcaaagaggcgaaccatcatgtctactattaaagtaattggaatcgatttaggcaaatcttcttttcatcttgttgctcatgactatagcggtcgagagctatttcgaaagcacctttctcgtgcaaagcttattgagtttctatctcaaacgcctgcaaccgtcatcgctatggagtcatgcggtggctcacattggctagctagaaagtgtcaatctcttgggcacgaagttaaactgatcccccctcagtacgttaagccttacgtcaaaaccaataaaaatgattacatagatgccgatgcgatagctgaagcgtcaacgcgcccgtcgatgcgttttgtgggtgttaaaacagaatcatcccaagttatctcagtgattcaaaggatccgttcaagctacgttaaagagcgtacagcgtgcatgtcgcgtattggcgctatcttgcttgagtttggtatgagctttcctaaagggcatgccaaaatgaaggtgttgtttcaatggcttgcagataaaaaagagcctattcctcccatgttaatgcaggagctaattgaacatcacgagtactattcacagcttaataagcgtatagcagggcaagataaaaaactgaaacagcttgtcgagcaaagcgaagaggctcaacagcttaagtcaatcccaggtataggagatctaacggcgagtcagtgcttagctgatatttctgatgcaaataactttaagaacgggcgacagttagccgcatggataggattagtccctcatcaatactcaacaggtggtaaaaccacgttattggggataagtaagcgaggtaataaagcgttaagaacgctgtttatccatggcgcacgctccatattatcgcggccagaagttgcggttgcggtgtttggtgaatggattttagagctcagagcaaggaagccatttaacgtagccgttgttgctttggcgaataagttagtgcggatagcatggtcggtattatcgaccaagcaagcatttgaagtaagagtttaaaccgagtttgcagatgatagagaagatgacagaacggtcagaccactagattgaagacctgacataaaaaacagcaacgcagtatgctttgggctttttgaggacaatctagcgcggaactcatcgtggagcaggtggtaagcacctaatgaagactccgaatacattagcgcaaaccaacctcgttatcgaaaatatcatttgcaataacgaggcggaccataca

SEQ ID NO: 167 - DNA, 1373 bp, unidentified
  source 1..1373: mol_type = unassigned DNA; note = element_ISSpu22
taatggaatggacccatccactttaaatcggcctcgcaatgggccacgatgtagtcgctaaaactcatcagaaagaggacgggtccacctatgaagattactacaatcggtttagatatcgcaaagtctgtttttcatcttgttggtgttgataaagctggcaagttaatcaaaaagaaaatgcttagacgcaaagacttgctgccctttgtcgcgaaaattgagccttgccttatcgttatggaggcgtgtggcggcgcgagttattgggccagagaatttgagcaatttgggcacatagttaagttaattgccccgcagtatgtggttccttttaggcaaggtaataaaaatgactacaacgatgcgctagccattgcggaggctgcgcagcgacccaacatgcggtttgtaaaacccaaaagcgtcgagcagcaagatgtgcaactgctccaccgtatgcgggaacgattaactaaacaatcaacagctttaatcaatcaagtcagagggatgctagcggaatacggcattgtgatgaccaaaagtaaatcggcttttaaagcccagctacctgatattttgatcgatgaagccaatacactgaccaccaagggtagagccatcttttatcagttatatgatgaggttatcgacattgaaaaacggcttaagagttgtgacactcaagtactaaacgaaactcaaaacaatgtgatttgtcagcgattacagactatccctggtgttgggcctgtcaccgctacggcgatttatgctgcagtgggtgacggtaaagactttagcaatggccgacatttttcagcttggtgtggcttagtacctaagcagcacagcagtggcgggaaagataacctcctcgggataagtaagcggggaaacgcctatttacgtacgctgttcatccacggcgccagagcggtgttgcggcacagtgggagtaagtcggataagttgagttgttgggctatccagctagcggaacgccgaggtttcaatcgtgcgtgtgtggccgtcgcgaataagctcgccagaatgtcatgggttatcgcggcacgtgaagaagagtttcggctcgctatgtaacaacatcaaatgtacttattatgttaacgattaaccaaccagcaagttgctaagacacttgatttgatgatgagacagtcagactgatctactaaaaaccttacgaaaacacaggctctgatgaagccgcagggatgataaggacagtagaagcaaatatccatcagggccagaggaatccctcaataacaggccgaatatatgggtgcaatgaactcttctcaaaattgatatcgaatgtcttgcaaaccggatgggtccatata

SEQ ID NO: 168 - DNA, 1224 bp, unidentified
  source 1..1224: mol_type = unassigned DNA; note = element_ISStma4
tcttgtgtcttggatcgtgccctgatcaggcacaatcccccggtgacccgggaggctccgatgacgctgcctcggctcttaagccttcgagcttgcaaagtagattcagcgcgtcggcggcctgacaccgccatggaacttgaacggtatcttaggcccgccatcgggtgagagcctgtactcacaagggcaagtctggcggcttccgatcacgatcgtaagttcaagctggagcgaaatcatgcaatttatcggcatcgacgcagccaaggcgacttttgacatcgccctgcctctatctcacggcaagtatcgaaccaaggccaaactccccaatacgccaaagggttttgatgagcttctggcctggcgcgccaaacatgcgccgaacgcggcggtaggtatggaggctacaggcatctatcacgaggccttggctcaagcactggtggaagcgggggtagtggttcatgtggccaatcccgcccgagtaaaggcgtttgggcaggcggaggggatgcggaccaagactgaccgcagcgacgccaagctgattgcccggttttttgaggcacaacgctcggaaaagctgtatccctacgttccaccgacgccctcggaggtgaagctgcgcgccttggtacggcgtcgagatgacctccaggaaatgctgcagatggagcacaaccgcctggacgttgccgatatctcggtccagcaagggatcaaggatgtgatccggacgttggaagagcagatcaagcaggtccagaaggcgattgaggaccatatcgataacgatccggacctgcgccggcgtcatcaactgcttaccagcatccccggtgtaggcaacaccagcagtgcccagctgttggccatgctgggggatctaagcaaatacagcgacgtgcgccaggtggttgcccacgcgggcctgaatccggcccagcgtcaatcaggaaactacgaaggcaaatgccggatatcacgcgtcggcgacgccaatttccgcaaaaagctgtacatgccggcgctgaccgggaagacccacaaccccacactgaagtcctttgcagaccggctcagcgcgaaaggcaagcccttcaaggtcgtcatgtgtgcagtgatgcgcaagctcatccatctgatttggggcgtactgagaagtggccgaccctttgagcctgacgtcgcccttgcctaggcgagggcgacacggta

SEQ ID NO: 169 - DNA, 1134 bp, unidentified
  source 1..1134: mol_type = unassigned DNA; note = element_ISStma6
cttatctcttgccaatctggcaccttgggtgccgagagcctggcgtgggcgaccgtgtggatccagtcttgcgaccgagaagtagcttgggtccccacgccggattctccctgaaccgcccgaacagttggttgagttggcgctcgaactgataagactgggcaagcggggagagctctcgaccctgtcagcctagcggagttctgccatgtttgggatcgggatcgatgtgagcaaagccacgctggatgtggccgtccatggagagcagtttcgccaattcagcaacgacaagcgcggctttgtgcgcttgattcggtggctgaagacgtggccgatcaagcaggtcgttcttgaggcaagcgggggttacgagcgtgctgctctggatgtattgcacgccgctggcctgccgatggtacgaatcaatccggcgcgtgcacggcgatttgcccaaggcacgggccgtgccgccaagaccgatcggctcgatgcgacagtgctggcacagatggcccatttgttgccgctgacccgctacgtaccgcctgctccttggcagcagcgtctggctgaatttgcgcaatgccgcaggcaactggtgcagatgcgggtcagtgagatgcagcgcttgcggcgattggtcgatccggatctgattgcgatgaagcaacgccatatagctcagctatctgacgacctgaagcagttggataaagctattgccgagcagcttgaggggcagcctggctggaagaatatcggcgcgctcaaaggcgtcggccccatcctgatcagcacactggcctgcgagttgcccgaactgggcagcttgggaagtaaagccatagcatcgctggtggggttggccccgatgaaccgcgaaagtggcacctggcagggccaacggcggatcagtggtgggcgcgcggtggtacgcgaagccctttacatggcggccctgacggccatccggtacgagccaaggctgcgcgcgttttacgctggcctgaaggccaagggcaaagcgagcaaggtggcgctcgtggcggtcatgcgcaaaatgctggtgatcctcaacgcccgtaagcgagacgccgaggtggccctcggctgcccctgacaagacagttg

SEQ ID NO: 170 - DNA, 1220 bp, unidentified
  source 1..1220: mol_type = unassigned DNA; note = element_ISStma7
cttatctgatgaaaatctgtcagcgtaggtgtcgagagccggcgtgggccgccgtacgagcctggatctcgacgatcgccatgtagcttggcgcccacgccggaatctcccttgatccgcccgaacagttgctggagctgacactcgaagcgataagactgggcaagcgggggagctctcgacccttccagactatacggagtcgggcaatgaacgggatcgggatcgatgtgagcaagcgccgattggatatcggcacgacagacggccagaccctgcaggtcagcaatagcccctctggctatgccgagttgagcacttggttgagtacgcggccggccattcagatcgttttggaagccaccggcggctatgagcagactgtcctggacttccttcacaaggccggccatccggtgatccgtgccaacgcactgcgagcgcgtagactggctcaggggctgggtaaagtggccaagacggaccgcttggacgctcttgtattggcgcagatggccgcgctggtggaattgccttcctatcagccgctggagccctggcagcggaaactgcgtgagtttgtgcgggcgcgtcgacaaacgatgcaggcactgaccgtagcccgccaacagcaggaaatggtgactgaccgcgagctacgccggcagatgcaaggcaacatcattcgcctgcaaacactggtcgagcggctgggcaagcagatctctgaacaggtcgcgcagcagcctcaactggcagtgctgaagtcaatgaaaggggtcggcccggcattgcaggcggtactggccagctacctgcctgagttgggtcagatcagcggaaaagccattgccagcctggtcggcgtggcgccgatctcccacgacagcggagccatgcgagggaggcgaagcatccatggcggcagggccgagatccgccaggtgctctacatggcagccatgtcggccatgcgacatgagccacgattgcgggacttttaccggtcgctgcgggcccgcggcaaggaaggaaaagtagcgatcgtggcggtgatgaggaagatgctggtgatcctcaacgcccgggtgcgcgacgctgaaaacgggctggtccctgcctaaggccagccagggcgcaagaccaaaggctgccggccagcggccggcactaccgtgcccgtctcatggaggggccaagtccctccatcaacacagttg

SEQ ID NO: 171 - DNA, 1221 bp, unidentified
  source 1..1221: mol_type = unassigned DNA; note = element_ISStma8
cttatctgatcggaatctggcagcgtaggtgccgagagccggcgtgggccgccgtacaagcctggatctcgacgatcgccatgtagcttggcgcccacgccggaatctcccttgatccgcccaaacagttgctggagctgacactcgcagtgataagactgggcaagcggggggagctctcgacccttccagactatacggagtcggatgatgaacgggatcgggattgatgtcagtaagcgccagctggatatcggtacgacggacggagaaaccctgcaggtcagcaacaaccgctccgggttttctgaattggatgtttggctgaagaagcgtccgaccagccagatcgtgcttgaagccacaggtggctatgagcagccggtgctggatttactgcacaaggtcggtcatccggtggcccgtgccaatgccttgcgcgcccggaaactggctcaggggttgggtcagattgccaaaaccgaccgtttggatgcctacgcgttggcgcagatggccgccctggtgaagctacctccctatcagccgctgcagccttggcagcagaagatgcgggagttcgttcgggcacgtcggcaggcgatggacgccttgaccatcgcgcggcagcagcaggaaatggtgcttgatcgtgaactgcgccgactactgcagggcaacatcacccgcctacaaacgatggttgagcgtctgggcaagcagatcgccgagcaggttggtcagcaacctcaactgaagacgctgaagtcaatgaagggcgtagggcctgcgctgcaggcagttctagccagctatctgccagagcttggcaggatcactggcaagcgcatcgccagcctggtcggggtagctccgatgtcccacgacagcggcacgatgagaggaaaacgaagcatccacggtggaagagccgaaatccggcaagtgctctacatggcggcaatgtcggccatgcggcatgaacctcggttacgcgacttttaccagtcgctacgagcccgcggcaaggaaggcaaggtggccatcgtggcagtgatgcggaagatgctggtcatcctcaacgcccgtgtccgcgacgctgaaagcggactagtccctgcctgaggcgagccagggcgaaagaccaaaggctgccggccagcggccggcactaccgtgcccgtttacctgaagggcacgagcctcccatcaacacagttg

SEQ ID NO: 172 - DNA, 1181 bp, unidentified
  source 1..1181: mol_type = unassigned DNA; note = element_ISSto5
cttatataaaacatattagtcagatctgcgtaatacagatctgactggggttgaggccgttgacttccttgggctcaaagctcgacggggagcttggcccgcctccaaattcgtaccggaagttgggcttgaagctcgaataaaacataagggtgagtatatatggaggccccagttgcaggaatagatatatcaaaagataaattagtagtgtatttccaaggtaaattatatgagtttcctaataataagcaagggtttgagggagtaaagcaaatcttgcctaagggttgcaagataggtattgaaagtactggagtttaccacattaacttggttaagtacttgggtaatgagtatgatgttaggattattaaccccttagtactcaagaggtttaaggattttaggggtaaaaagagtgataagaatgatgctaaaaagcttgcggaattagttgttaatatgggtagtgtaactaatgaggctagggagttaacaagccaatgggattttgtgacaagaagtattgttagggttaagaataggttgaggagggatttaatcctcttgggttatagggatagtttgtccaaggagaacttgaatgaggtattgagaggggaggataatgtagtgttgtctgaggttaggtttcttttaggggaactggagaggcttgagggtaggaagagggagattgaggaggagcttgagaattttgttcccaaggatagtttgattttcactattccgggtattggtaggacgctgggttgtattattttggctagggttggtgatgttaggcgtttttctgataagaggaggtttgttgcttattgtggtcttgatccggttgttgagtctagtgggaagggtgttgtttcaaggggtatttctaagaaaggtgatgctgttttgaggagggctttttatcttgcagctttaactgctattagggttaaccctgttattaagcgtttttatgaggagcacaagggaaggttgaggggtaataagttgattattgcttgtgcaaggaagcttgctgttattacttgggctgtactgtattataataagccctttgatgctggcgagtgataaggagagtcttgtttttcagaagtagtgtggactatgcttgattttcgatggaaaggtttttataccggaag

SEQ ID NO: 173 - DNA, 1319 bp, unidentified
  source 1..1319: mol_type = unassigned DNA; note = element_ISVpa1
ttaataagatggtacgccccacacctgcactacactcagctatgtcgctgaatattgggaggtgccatcatgtcggcaatcaaagttattggaatcgatttaggtaagtctacttttcatctagttggccacgattatagtggtcgtgaacaatatcggcacaaattatctagaagtaaattactacagtttatctctgtgcatgaaccaacattgatagcaatggaggcttgctgtggtgctcactggcttgcaagaaaatgccaagaatacgggcatcaagttaaacttatcccacctcaatatgtaaaaccttacgttaaagctcataagaatgactttatcgatgcagctgctattgctgaggcatctacaagacctaatatgaggttcgtttctccaaagagtgagcaggctcaagtaggcgtcgttattcggcgtgttagaactggttatattagggagaggacagcaacgatgaaccgtattggttcgatgttaatagagtttggcatcagctttccacggggtcatgcaaacatgaaaaagctgtttcaatggttagcggacaacaaagaaccgatccctccgttattggttcgggaactacaaaatcagctcgactattacaatcaactgaatgaacggataaaagagcaagaccgaaaaatagaaaaactgagttccgaagacgaactttacactttacttcaaacgataccaggtgtgggtcccatgactgcatcttgctgtttatcgtgtgttggaaaaccttcagatttttctaatggtagaaactttgcagcgtggatcggacttgtaccattccagtactcgactggagggaaacaacggatgctgggaatttcaaagcgaggaaataaaaagctgagagaactctttgttcatgccgcacgagcagtgatgtggagggaagaaactgctgaacgctatttcggttcatggttattagatttgaaacgtcgaaagccttttaatgttgctctagttgcgttagcaaataagctagcgaggattgcatggtcagtaatgacaagtcacaagccctttgaattaagagtttaatctagatttgcatatggtaatgaaagatgacaaaacggttagaccaccagattgaagacctgatggacagaacagcaactagagtgctttcacgtttttgaggacaatctggcgcggatctcatcgtagagctggggctaactaatcagtgtcccaattagactctgaatacattagcgcaaaccaacgccgttatttggatttttcacttgcaaaacggggcgtaccataca

SEQ ID NO: 174 - DNA, 1490 bp, unidentified
  source 1..1490: mol_type = unassigned DNA; note = element_ISWen2
tcttgtatcttgaaaaaagcatctagtgtttttaagcttaagcattaggtggagaagggaagaactctggaagattccttagatataaaatctgtagaaaagaaaagagttcccttctcaaaagtagaggctggacggtatcgtagaaaggcctaaatggttctaattctgtattcacaaggtaagccttacttttcatttttaatagtagtatatggagttatatatgatcaacaactttttaggtatagatgtttcaaaagaacgctttgatgtttctctctcattcataagtaaaaaaggaaagcgtgaaactaggaaaaggaaatttaaaaatgatgatactgggtttcaaggtctactgaactttctacaaaaacataacgtagaagaagtaaaagcttgcatggaatccactggttgttatagcgaagctttggctgagttcctccacaacgctggatatttcgttagtgttgtaaacccagcttgcataagattttatgcaaaaagtaagcttacacgacaaaagaatgaccagactgatgcagagattattgcagattattgtcaaagacaggaaccttctcgttggacaccaccttctcctgaaaagaaaaaattaaaacatctttatcgttgctcaaatgcgttaaaggatgagttaacattagcaaataatcatttagaaaagaaagagagactgcctaaagaagttgcaaatgcttgggaagaccttgcaatgaacatagagcaaaaaatagaaacaataaaaaactccatacgcgaactattaaaacaacacaaagaattgttggaagattttcaactcctattaactattccaggaataggagaggaaacagcaatagctattttagctgaaattcctggtataaaagcctttataaatgctaggcaattggcagcatatgctggaactataccacaaaatataacatcaggctcatccgtacatgccaagcccagattaagtaaaaccggttcacgaacattacgtaaagcaatgtactttcctgctatagcagctaaaaagcataatcctatcattatggcttcttgcgaaagattaaaagagaaaggcaagcatgctatggccatagttggtgctgcaatgcgtaagttacttcatatagtttttggtgttttaagttcaaaaaaggcctttgatccagatcatatcaagaactatagggctaaaaggttaactgaaggtttagtactttaaaatcaaaaaatgcttctaattcatcttatgtaaaatggcatcttacacaaatttattgaatgttgttggttagtggatatgttgataagtaaatttctgctgttttatatgtaactaatttacttatcaacatatccactaactataatctgtatactgctacacagttggaagtattttttgattttattatgcaatttggagaatttttatgacttttttgttgactaacaagacggta

SEQ ID NO: 175 - DNA, 1378 bp, unidentified
  source 1..1378: mol_type = unassigned DNA; note = element_ISWpi12
attgtaagtcaaaaatatgatataaaggaaataagagggaaagataaccctactcactataggaatagggttatcacgggcgtgtgcgaccggcagaatattggtattacaaccgtgtccatcaaggtacactagcccatctctcgatacgtttgaatagttgtgtgggacatgtatatgcacccgtttacaatcttaaattaattaaactatcgaggttataatgattacatcttatcaaaattttattggcattgatatcgggaaatttaaaaatgttgttgcagttcacgaacagaagaatactgtaggatttgacaataatacttctggctggcaacaattgtttcaaaagttttcagatatcctacctaattctttagtaactttagaaaatacaggaaagtatgagcttggtttattacattttcttgttgacaaaaatattgccacacatcgagctaatacccgtaaagtaaaaagctttatcttgtctcacggaactttagcaaagtctgataaatcagatgcaagagctcttgctcaatatggatttgaacgccacagcactatctctctatttgtacccacttttgaaaatcaatcaaccttggttgcactttgtcaacgtcgtgatgacattacgcaaatgagagctcaggaaaaatgtagactggcagcacctgaaaatgaccatataaaagaaagttgtcaaaaaactatcgaattctttaatattcaaatagatgaactcaataatactatacaaaaaattattgatgaaagccgtgagttacaacaacgtcaaaaaatcctaaaaacagttcctggaataggtccaaagttatctcaagattttctctgtttaatgccagagcttggttacttaagcaggagagaagttgcaagccttgctggggttgcaccttatccaaaagaaagtggtaaaactattggataccgaagaataacaggtggtagaagcaatgttcgtgcaaaactttttacatctgccatggctgctgcaaagtccaaatctgtacttggtgccttttattctaagcttgttgaaagtggtaagaagaagatggtagctataacagctctaatgcgtaaaattatagtaattgctaacgcaaggcttaaagaagcaattaatttgaatatttaaaatttacatagcagtaattgaaatgaatattgtgaataagcacgtccgcacaaacttaaagtgcttattcacaatagcttaaacggaaattgttgcagcagctgtttgatatagaattctgtttctatgacaaacgggtttttattatctatatggttgggtaaagttgcaaaattatacaaataaaaaatttaaaaaacatagttg

SEQ ID NO: 176 - DNA, 1433 bp, unidentified
  source 1..1433: mol_type = unassigned DNA; note = element_ISXne4
agaatgtaatgagcgcatcccaatcacttagccctcggcaccgtgctgaaattgagaggtgaagcatggatcctctcagatttccggccttatagtgcctaagcgggaagcctgttgctccctgatgactggaggatccacccatgaaatttactcctgttggcgtcgatattgcaaaacatttgatgcaaattcattttgttgatgaatacaccggcgaactcattgacaagcaactaaaacgaaatgattttttaactttctttagtaaccgtgagccttgcttgattggtatggaagcgtgcggtggcgctcactattgggcacgggaactgagaaagctgggacatgaagtgcgtttgcttaaggctcggtttgtcagggcatttcggatgggaaataaaaacgatgttcaggatgcccgggcgatttggctggccgttcagcaacccggtaaatccgttgctatcaaaaatgaagaacagcaggccattctgtcattacaccggatgcgctatcaactcgtcaaattcagaaccgcgcagatcaattcgttacatggtttactgctggaatttggtgaaaccgtacataagggcagaaccttgctggataaagccatgcctgaagtccttgagcgactaaaggaaaaactggcaccattcctactcaatctgcttgaaaagcaataccaccgtttgaacgaaatcgatgaacaaattgaacaggtggaaaaacaactgacgacgtgggcaaagcagaatgctgattgtcagcgaattatgaaaattcccggcgtcggtgtcttaattgcgacagccgccatcgcaacgatgggcgatcccagagcgtttcggtcgggcagggaattttcggcctatttgggcctggtgccgaaacaaacgggaacgggaggccgggtcaaattactgggcatcagtaaacggggagatacctatctgagaaccctgtttattcacggtgcaagagcggccaccttactgacaaaaaccccgctgccgtgggtgacggagctgaaaaaacgccgtccggtctgtgtagtgatagtggggatggccaataagctggctcgtaccgtttgggcattggtcgcccatcagcaggaatatcaaaaagattacgtcagtgtcagaccttactgaggtgtttcactgatcaactttcacttttaacgacaaggatgaatgtagaaagattgctaaggcaatgataatgatggcaaagacaggtaagaccgtgacttgctaaacctgatttatgctctgagcgtcaagctcgttaggagagtgaggagtcagtcagcggattacatcgaggcccgcagctctggctgtaataaggccggatatagagctgcaacctaccgtcgatgtcagagtaatttttgtcttgcaaacgggatgcgttcatat

SEQ ID NO: 177 - DNA, 1421 bp, unidentified
  source 1..1421: mol_type = unassigned DNA; note = element_IS116
tccctaagaatgtgaggcggtccgggaggaccgggtgtggctgatggtggtttgccattgatggctccaggagaatggccgcccggtcctccgggatgctccgactgctgattgagaactgcggtcatcgctggttagggacctgtcggcggggtgttctccgggccacggaatgctggtcacggtggtggaacggagcgaggcggttgagcacgcggcatgatcggatatgggtcggcatcgacgcaggcaaggggcatcactgggcggtggcggtcgacgccgacggggagacgttgttctcgacgaaggtgatcaacgacgaggcccaggtcctcaccctcatcgagacggcccgcgagcgtgaagaggtccggtgggcggtggacatctccgggcgggcctccacgctgctgctggccctgctggtcgcccacgggcagaacgtcgtctacgtgcccggccgcaccgtgaaccggatgtccggggcttacaagggcgagggaaagaccgacgcgaaggacgcgcgggtcatcgccgaccaggcccggatgcgccgggacttcgccccgctggacaggccccccgagctggtcactacgctccgcctgctgacgaaccaccgggccgacctgatcgccgaccgggtccggctgatcaaccggctgcgcgacctgctgaccggcatctgcccggccctggagcgggccttcgactactccgcggccaagggcccggtcgtcatgctgaccgagtatcagacccccgccgccctgcggcggaccggcgtcaaacggctgacgacgtggctgggacgccgcaaggtccgcgacgccgacaccgtcgccgccaaggcgatcgaggccgcccggacccagcaggtcgtgctgcccggggagaagcgggccaccaagctggtctgcgaccttgctcaccagctccttgccctggacgagcggatcaaggacaacgaccgcgagatccgcgagaccttccgcaccgacgaccgcgccgagatcatcgagtccatgcccggcatgggtcccgtcctgggcgccgagttcgtcgccatcgtcggtgacctgtccggctacaaggacgccggccgactcgcctcccacgccggcctggccccggtgccccgggattccggccgccgcaccggcaactatcaccggccccagcgttacaaccggcgcctgcgctggctgttctacatgtccgcccagaccgcgatgatgcggcccggcccatcgcgggactactacctcaagaagcgaggtgaagggctgctgcacacccaggccctgctctccctcgcccgccgacgggtcgacgtgctctgggcgatgctgcgtgacaagaggctcttcacccccgctccgccggtcacacagacggcttgacacgatcattgagat

SEQ ID NO: 178 - DNA, 1225 bp, unidentified
  source 1..1225: mol_type = unassigned DNA; note = element_IS1663
ggtgccttgtatctttcctccggtggtgattagctatcaccaccgcgcgccgatgaccgcgagttggtgcccaaagcgaggactttgtgggacagatagcggctcggcagcgcactgctgggccggcgagacactggacggtatcgtagggcgaggaccctgtatgtacaaggcaagtgggcgcagtggctgatagcagtttgttatctgcaggaggccaagtccatgttttcataggtattgatgtatcaaaggccaagctggattgcacgttgctgacggctgaggctgacaagtgtaagaccaaggtggtggtcaacaccgccgcgggcgtacaagccctgctggcgtggtgcgccaaacacggcgcacagccggcgcagttgcacgccatcctggagcctacgggtctgtatcacgagcaagcggccacggcgctgccccaggtccgggtctctttggtcaatcccgcccaggcccgggactttgccaaggccttggcgctgcgctccaaaaatgatgcgctcgacagctacgtgctggctcgctatggacagacgctgagcccggcgctgtggcacccggcgcccttgcatgcgcgtcaactgcgcgccttgttgacgcgacgcgaggcgctgagcaaggatctgttgcgtgagctcaatcgcaaagagaagagccagttcagcccctcggcgcccttggtcgatggttccatcgacaaggccatcgcgttcttgcgcgaacagatcaaacaaatcgagcgggcgatcgatcagcacatcgacaaccaccccgacctcaagcaagactgcgagctgctgaactccatccccgccatcgggcctcaggccggcaacgccatcctggccgtcatgcacaatcggcatatcgactccgcccagagcctggccgcctatctcggggtggtccctgtgcagcgccaatccggcagcagtctgaacagctgcgcacgcctgtccaaagccggcccctcccaggtgcgcgccacgttatacatggcggccctggttgggacccgccacaacccccacatccgcgccctttaccagcgcctgctcaaagcaggaaaaagcaaaaaggccgcgctgggcgcggccatgagaaaactggtgcatctgtgcttcggggtcctcaaaaaccgcatcccctaccagcccaattacgccatgaatggttgactgccaagacggtatctgtcccc

SEQ ID NO: 179 - DNA, 1202 bp, unidentified
  source 1..1202: mol_type = unassigned DNA; note = element_IS492
atggataataactcaggtaaatcatcctgattttaatcggggtgaggtaaagtgagacccaagctttagcagcaactaaagccttcttttgtggtagttcgattgagcgatggctcctcagttgagagaccgataacaagaaagaacaccacaaaggactccaagcaaaacactcgaatagtctactgggtctcaacccgcattatgcaagcaagagttagcttattatgaatccaaaaacaaatcaaagcgttaacgtcggtgtcgatacgggcaagtttcaattggatatttatatccgccctcacgatatttatttcactgtttctaacgatgaaaagggtatcaaagaagccattaaaaaaatccaacagcattcgcctgggcgtatcgtcattgaagcaactggccgattagaaatgccgtttattatcgcgtgtgcaaatgctaatttacccttcgttgtcgccaatcccattcacattaaacgctttgctggggcgataggtcagcgagctaaaacagacaaactagatgctcaattgattgctcattatggtgaagctattcagcctaagttatctcaactaaaaccagatactatgcaggctatgagtgatttagttgcaaggcgaaatcaattgctcgtcatgcaaacaatggaaaaaaaccgcctgcaaattctaccaaaagaactcgccatgaccatcaaacctattctcactgcctttaagaatcagataaccaaaatcgagaataaaattgtcgcgctcattgaatcttgtcctgattatcaagcgaagaattgcatcttacagagcatgaaaggaataggaaaaatagcctccgcttccatcatcagtaacctgccagagttaggttacatgaccaacaaacaagcctctgcgttagtcggtgtggctcccatgaatcgagaaagtgggcgctataaagggttgcggaaaatccaaggtggcagacatcaagtcagaaccgttttgtacatggcgatgatgtcagcgatacaaagtaaccccgtatttaaggaaacatatcaacgattagtcgcagcaggaaagcctaagaaagtggctattattgcgtgcattagaaagatggttgttatcttaaattcaatgctcagagacggggtcatgtgggaagcgccgaagactacaaattagctattgacgccatagtct

SEQ ID NO: 180 - DNA, 1929 bp, unidentified
  source 1..1929: mol_type = unassigned DNA; note = element_IS650
aggagcattcctgtaatgaagaaatttgaggattgaacaaaaaagagccctcttggtatgatacgaggtgtccaaagcttcgatgcaaaaatggacccttaaattagtaaccaaggaggactcgaaatgaattatacacaaaatcaaaaagtctcgcaaatcacaccatcaactctcattattggcattgatattgccaaagacaaacatgtcgcacgagctcaggatgatcgtggattagactttggaaagcgtttgatctttgaaaatcgaatctttgcctttgaagccctcattgagtgggtaaagcaacaccaagcaaaacacaagaagaatcacgtcatttttggtgtagaaccaacaggacattattggaagagccttgcttactatctaacggcaaaaggttacgactttgtcgtcgtgaacccaatgcacgttaagaaaagtaaagaacttgatgataattctccaacgaaaaacgatacgaaagatgcgaaagtgatcgcccagttaattaaagatggccgatactctgtacctaacctcttagatggcatttatgccgaactaagagaatgcgtaaaaattcgagatcagcttactgaacaattaatgatcacagaagggcgcattcaaaatgtgattcaacgctactttccagagtttttcgatgtatttggagattgggaaggaaaagcagctctctgtacgctaaagatgtttccttttccttctgatgtacagaaattgacaccaaaaatcgttctggaaaaatggaagccctttgttaaacgaggcgttggtatcaagcgagcaacgaaacttgtagaaacagccaaaaagagtattggggttaaggtaggtctttcatttgccaagcttgagcttacctatcttattggacaatatgagttgtataagaagcaactagaagagttagacggagaactagaagctatagttgaaacattacctggcgctacacaaatgatgaacatttctggcttaggggcggtgactgttggattattctttgcggaagttggggacatttcaaagtactctcatcctcaacaattagtgaacttagcagggctatcattacgtgagcacagttcaggtaaatttaaagggcaaacaaggattacaaagcgaggaaggaaacgattacgccgagccttatatttagcgattcgtccccttgtcgctcataattcaacatttaaagccctgcatcactattacaccaaacgccctgaacgccctttgaaaaagcaacaatctttgattgccttgtgttgtaagttactacgtgtgttgtttgtcattggtcaaaaacagtgtgaatttgatggttcaagattaataaaagatattcctcaaatggacggattacaggcagtgtaaccttagaaagcagatcacccaaagtggcttgacacggagcctctgtgggcatggctccttggcgaagcggcgagtcatccaatgattcgcccatggctaaggaagcctaccatgcccgccactccatgtaaagccgtgcatcatctgtatacttacaaataacaaacaccaatagtgcagagtcggagtttattttcaccatacgggcttatgacccagcaaaggagcttatccgacctccacctcatggatacgcaggacgaaggaaggtatggataccaatccggagagacatgggagggttagcgaccgtgagttgtgtggagatttataagcacggtcataccttttcgttaccagacactaccagtttggtcgttaggatggtcctccccctgtaaggaattagaataatataaatttatatccagtgaatgcggtggttttactatttggtgcttatgaaattttaagaataagtgagtattcgtaagaaaattaaactttattgagggaggt

SEQ ID NO: 181 - DNA, 1805 bp, unidentified
  source 1..1805: mol_type = unassigned DNA; note = element_IS653
taggagcattcctgtaatgaagttatttgagagttgaacaaaaaaagagccccttggtatgatacgaggtgtccgaagctgtagcgcaaggaccctgaaattagatacccaaggaggactcacttatgaattatacacaaaatcagaaaatctctcaaatcacaccatcaacattagttattggcatcgatgttgccaaagataagcacgtagcacgcgcacaggatgatcgaggcttagaattcggaaagcgactgatctttgagaacagaattcacggctttgagctattactagagtgggctttgcgccatgcaaaagaaaactctaaagatcatatcatctttggtgtcgaaccaacaggtcattactggctaaaccttgcttattatctgacggcaaaggattttgactttgtattggttaatccgatgcatgtaaagaaaagcaaagagcttgatgataactccccaacaaagaacgatacaaaggatgcgaaagtcatctcacagctgattaaagatgggcgatactccgtaccaaatctcttagatggcatttatgccgaattaagggaaggcgtcaaattaagagatcaactcatccaacagctattgattacagaaggacgcatccaaaatataattgatcgctattttcctgagttctttgatgtgtttggcgactgggaagggaaagcagccttttgtacattgaagcttttcccgttcccttcacagattgtgaagatgacaccagaagaagtgcttagacaatggaaaccattcgttcaacgtggtgttggaatcaaacgagcaacaaagctggtagagaccgctcataagagtattgggataaccatcggaagtcattttgcccaacgagaaatgagtagtctccttgatcaatgggaactcttcaaaaagcaactcgaagaactagatcaagagctagaaggtgttgttagaacgataccaggtgctaatgaaatgattgatattactggtttaggagtggcgacagtcactactgtcttatccgaaattggggacctgaaaaagtataaacatcctcaacaattagtcaatctagcagggctctctttacgtgagaatagttcagggaaattcaaagggcaaacaaccataacgaaacgagggcgtagtaagttacgcagagccttgtatttggccataaggccactagttgcacataaccctacgtttaaagccctgcatcactattatacaaaacgccccgacaaaccgttaaagaaacagcagtccctgattgccttgtgttgtaaattactacgtgttttatttgtgattggacaaaagcaatgcccatttgatggttcaaaactattacaagggatacctcaagaaaagacattacaggctgcataacaaacagtaacattcttcagatactcaaagttactcattagacaaataccaatagtgcagagtcggagcacatttattccattcgggcttatgacccagtataggagcatatccgacctccacctcgtggatacgcaggacgaaggaatgtatggacccgatccggtgagacatgggagggtgagcggccgtgagttgtgtggagaatctaacgcacggttatacacttaatttccaaacaaatccagtttggtcgttaggatggacctcctcttgtaaaaaaaatatatccttaccatatataactattatccaaggtgtgtctactatttgatgttaatgaaattttgagaatacatgagtattcggaagatattttaactatatagagggagg

SEQ ID NO: 182 - DNA, 1396 bp, unidentified
  source 1..1396: mol_type = unassigned DNA; note = element_ISAar16
tgtgagtcttgtagtggctggtctgggatcagctggcagggtagatgccaggcttccctccgacgtgggcatgactcaaagtaaggctgacccctgaggtgtcgtttgcgagaattgtctgtctacgttgttgggcggccggcgccaacccggcccacctcggtagcctgatcagaagaatgtccacctatcagggtgtgacccatcacagtgttgctccaacggtgacttccttcccggactggtaccggccgcacggccgaagatcctgtccgtgaaaagaagaaagtaccaagccgtatgactatcctcccgcagaccgttgccaagacctactcctatatcatcggagtggatacccacgcccgtaagcatgtctattccatcatcacctataccggcgaacacgtggaaaccagggattttcccgccaccagttccagcatcaaacgcgctatcgcttgggtcggcaggcgcaccggagccgatgccagcaccctgtggataattgaagggacagcctcctacggtgccgtagtcaccggtgcggtcaccgatgccggctacacggtcgccgaagcacctagcggctaccagaaagccgggcgcggcgtgggtaagactgatccgttggatgcccagcgcatggctgccgccgcgctacccatcgaggtgcagaagctgcgtgttccgcgactcaatgacggtgcccgcgctgctttgcgcgtgctggtgacggcccgtgacatgctggctgtggagcgtacgaaatacgtcaacgcgctcaccgcactgctgcgtgtgacctcgcttggcatcgatgcccgcaaacccttgagcagcactcagttcctcgaggtagcggggtggcggagccgggaggaaaccatcgaatcgcaggttgcccgtgccgaagccgtgcggttggcccgacgcgtcggtgaactggacacgcatatcaaggaaaacacgactcagatgactgagctggtcaagctcagcgaaggcaaggaactacttgagctcaccggtatcggtccggtggtggcggcggtctgcgtggccgcgtggtcccatcagggcaggttgcgttcggaggctgcattcgcttctcttgcgggcgtgaatcccatccctgcatcttcagggaacacggtgcgccaccggctcaatcgtcgaggtgaccggcggttgaacaaggccctgcataccgctgcgatggtacggatgacccatgacgaggagacccgggcctacgtggtcaaacgcacggcggaaggcaagacgttgaaagagatccgtagatgcatcaagcggtttttggcacgccgaatatacaagattctggaatctgcggaagtgctaccgctgacggcttgacagatatagaagagtc

SEQ ID NO: 183 - DNA, 1751 bp, unidentified
  source 1..1751: mol_type = unassigned DNA; note = element_ISAcp5
atgacatgagaagccgaagcttggattgcggcgacacggtgagattctcgtcgccaacggttacgaatcaaggactcggataatggcttcttatgtcagtgccgccgcaggcgccgcgtgagcggtcggagcgaagcgcagagccttgacgggttccgaccggctctgccataacgccgcatgaagcgggggcacttgaacgaagaagaaaattgggctacttccttattgctgaacgcttatacgcacgtggacggagacaaaacgtaagctgcaattatcgcgctgttgcgcacaggaggttcggaatgaatagagtgatagggattgacctcggagacaagaagagccattactgcgtattgggtgaaggcggagttgtcgtcgaggaaggaactgttgttagtacgccagccgcattcaacgagcacttcggggtgctgacatcatctctgattgccatggaagtgggagttcattcccgctgggccagtcgtgtgttgcgggaactcggtcacgaggtagtcgtggcaaatccggtgcgtctgagactgatccacaagagcagcaaaaagagtgatcgagtagatgcgtgcgctctggcgcgtctggtgagggtcgatcccgagttactcggtccagttgagcatcgcagcgacgaagaccagagcatgttggcggttttgcgggtacgagatttgctggtgcgcacgcggacgagactgattaactgtgcacgcggcttggtgaagcccaccggaaccagattgccgagttgttccccagtgagcttcgccaatcgtgcaaggccggcggtaccgtcggatttgctgctggcgctcgatccgcttcttgatcagatccaaagcctgacgaacttgatcaaacgctacgatcgtaagattgccagaatcgcggagacgagttatccggcaacccagcatttagagcagattcgaggcgtggggccgctgaccgcgctcggttttgtactgaccattggacgcagcagtcgtatggttcacagccgcaatgcgggagcatattttggacttagacctcggtgctaccaatcaggggaaagcaatccgcaattgggaatcagcaaagagggggatggattcatgcggcgaatgctggtgcagtccgcacagtacatcctgggtccgttcggtccggacacggatctgcggcgatggggcgaacgcttgatcgctcgaggcggccggggagcaagaagtcgtgcggttgtggccgttgcccgcaaactcgctgttcttctgcatcacttgtgggtcacaggcgaggtctatgatccgctgtataacagcaggatcaagcaacgcgctctggaaccagtctctgcataacgttgtttgtaaggtacgaaatcgtcgaaaccggaaacgaatgactgcgggcgcgccctggcatcacagagaggagctctcctcctgtagaccgaagtcaaggtagcagcattcgccagtatgacaaggtgcaccggaccgcatggtccatttcagagtgcggatggaaggctggcgggcgaaatctaccaacgtaaggctacagcggctgcttttcttttttgctgggtgatctgtgtagtgcgttgcgcagaacccgtcaagggttcgcttcgccgcgcaacaaacacgcgcccctgacggaacctacgcaacgcacggagaactttccttgccagcaaaaaagaaaaaatagttgacatcggagtggcttctcatgga

SEQ ID NO: 184 - DNA, 1560 bp, unidentified
  source 1..1560: mol_type = unassigned DNA; note = element_ISAfe3
ctaacggacattgcgactcgcgccaccccagaggatgaaagagaatggggggtgaggagatggcggattgaggtcgagcaagtttttggtgattccatcccgactctaacgtgacccgccaggccgactcgtaccccggattgcctcccttgagagcgcacattaaaagggccgcctgaggcttgccacaggctggtgatttcggcgctggcattcgccatctctccctttgatagtaattggagagacgtcgttatggaactgcaatccctctttcaccgggttatcggactggatgttcatcaggcccaggtcaccgcctgtgccattctcacggaccctgacggaaacgttacgattgagcgccggcaatttggtgcttttcagaaggaccggaaggcattggccctgtggtgtgcctcccatcggcccgatacggtggtcatggagagcaccgggatctactggaagagtccctatgcggccctggaaaaggtggggatccaggcacaggtcgtgaacgccaggcacgtcaaacaggtccccggtcgcaagaccgatgttggggatgcagagtggctcgccaccctggctcgagccggactgctgcggggttccttcgttcccccggcacaactgcgggagctgcggctgatcgcccgacagcggcaaaatctggtgggcatgctctcgtcggagaaaaaccgcttgcacaaggtgctgaccgatggcggaattcgactgggggtggtggtcagcgatatccatgggcaatcggcccgggccatgatccaggccctgattcaggggagtcccccggaggccgtactccgactggccagccgacggctcaaagccagccaggaggagatcctggatgccctgcaaggcgagttgagtgccagtcaccgctttgtcctggacgagacgctccgccatatcgagtctctggaggcccaaatcgcgcgcttcgatgtccaactgctggagggcttgaagccgcaaaagaatgctctcgaactcctgcagaccttgccgggcatcgataccgtgggtgctgccttgctgctggtcgaaatcggagacgacatgagcgtctttgggagcgccgatcgactggcctcctggaccggcctttgtcccgggaacaatgagtctgccggaaaacggaaaagtgggcgaacccgcaagggcaacccgtatgtccgtcggatcctctgcgaatgcgcccacgccgccagtcgtacccactgcgccctgcgctccaagttccagagtctggtcgtccgtagggggcacaagcgctccatcatcgccctggcccacaaaatgctgcgcatcatctacttcatgctctcacacggcaagtactaccgggatgccgatacggactatgaggcactgagtgtgcagcgcaatgcttctcgctggatcaagaaactgatcaaattcggcttcctgccgcagcatcagccagcgtagagcgtcacttcgatcccaatatggccacccgatggccagggattgccgtgcccattccacggatttctttcacattaa

SEQ ID NO: 185 - DNA, 1614 bp, unidentified
  source 1..1614: mol_type = unassigned DNA; note = element_ISAisp4
ctaactgtcatgacccttgcggttcaccctggatgatggaagacactgggggcgtgcgggccagcgcgggtagaggtcggtcaattctttgatggcactcgaccgcgatcgctaacttgacccgctgccgaccactcgtacccaggattgcctgcgggcgttgcccagacccagccgggtcagagcgcgcctgacagcccacattaaagagagccgccgggcttgcccggcaggccgttggtcggcggcaccttggctggtccgcacgcttgtgattgtcattcaagctgcaggagagccgcaatggatttgaccccgatgcacaagcgcgtcattgcgctggacgttcaccaggccaagatcacggcctgcgccgttgtcgaacatgacgatggccgggtagaggtcaccaagcgagacttcggcgccttcaaacgcgaccgccgcgccttggcgcagtgggcgctggagatggcccctgaggtcgtggtgatggagagcacaggggtgtattggaaaagcccgtttgcggcgctggaggcggtgggccttattgcttgggtggtcaacgcgcggcatgtcaaggctgtgcccggtcgcaagaccgacatggccgatgcacagtggctggccacgctggcgcgtgcgggtttgctgcgcgcctcgttcattccaccggtgcagatgcgccagcttcgcctggtagcgcgccagcggcaaaagctggtgggcatgtgcagcgccgagaagaaccggctgcacaaggtgctggtggacgcgggcattcgcatcaacgtgctggtggccgacatccacggacagagcgcgcgtgccatggtcaaagccctgatcgagggacagcccatgcacgaggtgctgaaccacaaggggcggctgcgagcgagcaggcaagaactgtgcgaggccctgagcaccgagcagttcagcgcagtgcaccgctttgtggcccaggagatcgtgcagcacattgagcagatcgagcagcgcatcgcccgcatggaccagtacctgctgcagggcctgcaaccctggcagccacagctcaggctgctgcagaccctgccgggcatcgacgagcagggggcggccatgctgctggtggagattggtgcggacatgagcgtgtttggcagtgcagagcgcctggccagttgggtgggcatctgcccaggcaacaacgagagcgcgggcaagcgcaaaaccgggcgcatccgcaagggcaacgcctgggtcagaaggctgctgtgcgagttcgcccaggctgcagcacgaacgcgctgcgcactcaaggccaagttcgacgcgctgaccatccgaaagggccacaagaagtcagtggtggcgctggcccacaagatgctgcgcaccatctacgccatgctcagcaacgcaagccactaccaggacaaggaggtcgattacgaggcgctgaacgttcagcgcaacgcgccgcgctggatcaaaatgctgcgcaagcacggcttcatcgccacgcccgctgccgcctgagacgcgcttgcccgctgaccatcggccttggccagcctcaggtcaggtgtcggcacgtccggtggcgggtgtcttccacattaa

SEQ ID NO: 186 - DNA, 1151 bp, unidentified
  source 1..1151: mol_type = unassigned DNA; note = element_ISAli8
tgtatctggaatgggtcccagtttcgtgatggaacttggatagcgccgggtccggtggccaccggacccggcgcgaggcggacggcgcccgatgcccctcaggccacaaccgtgggtgagccatgggaccgctgcctttgtcacgcacgaccgaacagtcgccagatcgtccatcgcacgcgcaaggcaggttaccgtggcacacctcatctgtggagtggatgtttcgtccgagacgctggatgcccggatcggcgacagcgggccgatgaagcggttcgaccgtacgtcggaggggatcgcggcattggccgccttctgccgcgacaatgatgtcaccctggtggcgatggaggccaccggcggatacgaacggctgcctttcggcctgctgtggggccatggcttgccggtggcggtgctcaaccctcgctcggtgcggcagttcgccgaagcgatgggcttcctggagaagaccgaccggatcgacgccggcctgatcgcccgctttgccgaggtcaagcgcatcacgccccaaccgccggccagccagagccagcaacgcctgcaagcgctggtaacccgcctgcgccagctcacccagacgcgcacggtgcagactaaccagcgccgcttggtgaccgagcctaccgtgctgggctcgatcgacgagctcgtctcgctgctcaaccgccaaatccgggccttcgagaccgaggtcgctgccatgatcggaaaggacccgctctggcagcggctggacgaggcgttccgaaccatcaagggcgtcgccgaccgcaccgtcgcccggctcatggccgatctgcccgagatcggtaccttgaccggcaaagccgtcgccaagctcgtcggggtcgccccgctggcgcgcgacagcggaaaggcaacaggaaagcgacgggtacgcggcgggcgtgatagcgtccgctccatcctcttcgtcgtcgccgaggtcgtccgaagacatgaccccgacttcgctgccttccacaaaaagttgagcgacgctggaaagcctaaaaaggcaatccgcgtcgccctcgccagaaagctgctcgtcaggctcaatgccaaagcccgcgaggttcgtgctggactcactgtggaggcttgacaggccagacagtcgc

SEQ ID NO: 187 - DNA, 1596 bp, unidentified
  source 1..1596: mol_type = unassigned DNA; note = element_ISArsp3
aagtgagtttctcaggggcgctttcgctccgccgtgggggccgaaaatgtactgctgtggggaacctttgcggtgtcggggctgccggagcagactgaagagtgtgttccggtcgaccccggtctctctttagtgccggtgagcctgtaagtgagtttggtggtggagggcgcagcttttgtccgcgggaccgtggaatgttgccgttgagcacgaatgtcagatttgttgtttatccgccttccccgggacacagacgccatctgttggactgttcgaggaagggtgagctctcatggaggtcattcacccgcgctgcgcgggtgtcgatatttcaaagaaggacgcgaaggtctgtgtccgcatccagggccgcggcggccggtccaccacatccaccatcacgacctggggttcgatgacggggcagatcctggggctaaaggaacacctcctggacgagcacgtggatctggtggtcatggaggccaccggtgattactggcgccccttctactacctgcttgaagacgacggactgaacatcatcctggtcaatgcccatgacgccaggaacgtcccgggccgcaaaaccgacgtttccgacgctgcctggcttgccgacctgggcgcccacgggctggtccgggcctccttcgtgcccccgcctccgatccgtgaactgcgggacctgacccgggcccggaccatcatcactcaggaacggacccgggaaatccagcgcctggagaaactcctcgaggacgcctgcatcaaactatcctcggtagcttcgaacatcaccggggtctccggacgactgatcctccaagcactcatcgacgggcagaccgaccccgcggccctggcagagatggcccaacgccggctgcggtccaaaatccctgaactcacccaagccctcaacggccggttcaccgaacaccaccgctacatgaccggactctatctgcaccggattgatgcccacaccgccgatatcaacgacctcagcgccaggatcgaggcggcgatggagccctttcgtttcgcccgggagctcctcgtgagcatcccggggttcagcaccaccatcgcggaaatcttcatcgccgaaaccggcgccgacatgagcgcattcgccaccgcagggcagctggcatcctgggccggtacttccccgggatccaacgaatccgccggacgggtcaaatccaccaaaacacggcccggcaaccggtacctcaaaggtgccctgggcatcgctgctctgtcctgcgcgaaatcgaagaacacctacctcggtgccagataccggcgcattgcctcccggcgcggacccgccaaagccctcgtcgccgtcgaacactccatcctcaccgcagcgtggcacatgctcaccaccggcgaactctacaacgaccccggcgccgactacttcacccggcagacacccgttaaaaccatggcccgggccgtcagacaactagaatccctcggctatcaagtcattctcgaacccctgcaacagaccggataacaccgctcaccccacgcaccccaccgcactcacctaattttcatgtcagagagcgt

SEQ ID NO: 188 - DNA, 1472 bp, unidentified
  source 1..1472: mol_type = unassigned DNA; note = element_ISAtu7
tatcgggcatgttgccatcggcgctccacgaacgctcggcaatcctatcctgtcatgttagaattgtcgtgtcgggacaggggcgtcggagtgcgaagaagcgggcaggccgaattgactttgagctgcgagctcgcgttgttatctggccgcccctgcgactatcccgtctgcgctgcgagcgcgtatccgtagatgtcgcccagcccgcgcactctcccattaacaacatggaggattgtgaatgcggtcgatcggaatggatgtacatcgaagttttgcgcaggtcgcggttcttgaccggggcaaggtcacagaagaattccgggtggaactggattacgacgctgtggtggcctttgggcagaagcttcgagaagatgacgaagttatactggaagcgaccgggaacacctcggccatcgtaaggttgctgacgcctttcgtggccaaggtcgttatcgcgaacccgcttcaggtgaaggccatcgcccacgcgcgcgtgaagaccgacaaagtcgacgcgaggattctagcgcagcttcatgccgccggctttttgccagaggtctgggccgcggatgacgataccctgaacctgcgtcgtctcgtctcggagcgcgcggcgctcgtgcgatcagtgcgacgggtgaagagcagggtccaagccgttctccacgccaatctcgtgccgaaatactcgggacatctgttcggaaaaggcggcagggactggctctcgacggccccgttgcccagggcagagcgcgacctcctcgcccgccatctcgatgaactggactggctgaagggcaagcttgaaaagctggatggcaccatggcgcgaattgcgctcgacgacactcgcacgcgcaagctgatgacgatcgccggaataaattctgtggttgccacggcggtgatagccgccattggcgacatctcccggttcccgacgcccgaccggcttgcgagctacttcggcttgaccccgcgggtgcgccagtccggcgatcgcggggcaatccatggccgcatctcgaaacagggaaatgcgattgccagaacgatgctgattgaagctgcctggtcggccgcgtcggttccggggccgctgcgtgccttctttctccggattaaggaccgcaaaggcctcaacgtcgcggcggtcgcaacggcgcgcaagatcgcaaatctgatctgggagttgctgaccaaggaagctccctacagatgggctcggcccgcctttgttgccatgaagatgcgcaagcttgaactgcgtgccggcgcagccaaagcacatgggccagctggtcccgcccgcgattactggatcaaggaaatccgccatcgagagatggagctcgttgcacaggcggaggcagcctacgcagctatggtcgaagcctggagagataggccacctaaaccacaaaaaggctgagaaaggggctgttcaacaacatccg

SEQ ID NO: 189 - DNA, 1763 bp, unidentified
  source 1..1763: mol_type = unassigned DNA; note = element_ISAzo22
ccgttcgccctgagtgggatattcgcccgatggtcgaaaggcgttggcaagaaacagggcggtggtagtgttcggggagttgcttgtggacaaagaccgactgagcactggtgccctggagcccgtcctctgagtatggttgaggcatcgtcggcgagtatggtgagtcccctggcgcgttggtgctggccaccggcgggtctgtccgacatcccgattgagagattgagcgtatcgacatgcccacgtccgcgagcgaccttgactcaaggagagaacatggcgcaacgagttggtccgacccgacgcggagttgacggcacaccggtcgagccgttgagcatcaagcatcccaacgctgccggcatcgacatcggcggggcaagccactatgtggcggtgccgcctgatcgggtaggcaaaggcgagcccgcggtgcgcgaattcggaccgcacaccgaagacctggtcgcggttgccaattggctttgcgcgtgccgcatcgataccgtcgcgctcgaatcgacgggggtgtattggatagcgctgtacgagcttctgcaagcgcgtggctttgaggtgtggctggtcgatgccaaaagcgtacgccacgtcaaggcgcgcaaatccgacgtgcttgattgccagtggttgcaacaactgcacagcttcggactgctgagtcaggcgcatcggccggatgagcaggtttgcgcgctgcgcgagatgtcgcggctgcgcgacatcaccatcgatgagcgcgcccggcatacccagcgcatgcaaaaggcgctcacccagatgaatgtgcaactcaccaacgtgattaccgacatcaccggcgagacgggcatgaacatcatccgcgccatcgttgccggcgagcgcgaccgcatggccctcgcgcagttgaggaactaccgggtacatgccagcaccgagcagattgccaaggcgctcgaagggcgttggagccgcgagcatctgttcagtcttgcccacgagctcaaggcctatgactttgccagcgagcagattgcgcggctggacgccgagatcgaggggcggcttgaggcgatgcgcgtcttcgacaagaggccggaggcgaacgcgaacaagggacgtcgcaagaacacgctggccttcgacggacggcgggcactgatgaactggtgcggcgtggatttgaccgaagtgcccggcatcgacgtgggcaccgccctgaagatcctctcggagttggggagctcgctcacccgcttcgccacggcaaagcatttctgctcgtggctgggactgtgccccggcacgcggatttctggcaacaagaagctctccggcgccagcaaacgaatccccaaccgtgtcgcgcgggcgttgaaactcgccgcgctgggcttgtcgcgctcgcgctgcgccatgggggcctattaccgaaagcttgccctgcgcatgggctcgcccaaggccattaccgccgtggcgcataagctcgcgcgtattgtccatgcgatgctcagcgggcaggccagctacgtcaaggaggatcaggccaggcacgaagcgcgctaccgcgaacgcgccatcaaagcactgcagaagcgcgcccaggagctcggcctgaccctctcgccgcaggctgttcccgctcaaccataatgccgatcgttcctcgctgcacatttttaacccattgaatcaagatgcgaaaattactgtttcttgagagcttgtcgaagggcactgccagggcttcgacaagc

SEQ ID NO: 190 - DNA, 1486 bp, unidentified
  source 1..1486: mol_type = unassigned DNA; note = element_ISAzo28
tcatttcagttgctccaccgcgctgcacgcgtcccacgacgcatgaaacgggcgttaaatagtggggcggcgtccggcacagaggtcggttcatccttggtgtcttgaacccgtatgtcagttggacccgcggccacacgagcaccccgtactgtcgcctggagcttcgcgcccctgagcacgcatcctagagttcgatgacgtgggccgcacgccgatgtcgccgcgacatggaggcgatcatggaagtcatctatccgcgctgcgcgggactcgacgtgcacaaacaaacagtggtggcctgcgcccgtatcgctggcgacggcccgccgttgcagcaagtgcgcacgttcgtcacgaccacctcggggctgctggccctggccgactggctcgagagctttggcgtcgagcaggtcgcgatggaggccaccggggtgtactggaagccggtgtggcacgtgctcgaaggccacttcgagcaggtactggccaacgcggcacacgtcaagaacgtgcccgggcgcaagaccgacgtcaatgacgcgacgtggctggccgacctgctggcccatggcctgatccgcgcgagcttcgtgccgcccgtggcggtgcaggaactgcgttcgctcacccgcacccgcaaacagttcgtgcgcgagcgcagtgcgcacatccagcgcatcgagaaagtgctcgaagacgccaatctcaaactcggcgtcgtgctcagcgacatactcggccagagcgggcgcgcggtgctgcaggccatcatcgcggggcaggacgatcccctccgcctgctcgcgtgcgtgagcacgcgcgtgaaggcgactcgcaccgagctgctcgaagccctgcgcggccacgtcagcccgcaccaccgcttcatgctcaagctgcacctcacgcacatcgatgcgctcgatcacgccattgccgccatcgagaaggaggtcggccaggggctcgaaccctttcgacaggcggccgcgctgctgagcacgatgccgggtttgagcgcggtcagcgcccacgtggtggtggccgaaatcggcatcgacatgtcgcgcttcgccacgcccggccatttgctgtcctgggcctgcctgtgcccgcgtaacgacgagagcgccggcaaacgccgcagcacccggttgcgtcgcggtgccaactggctcaagaccacgctggtacaagcggcctgggccgccatcaaggtcaagggcagctacctgcaggcgcagttccatcgcctgcgcgctcgccgcggtgccaagaaggccatcatcggcgtggccgcctcgatgctcaccgccgcttggcacatgctgcgagacggcaccgaatggcaggacctgggcgccacacacttcgatcgtgccgatgctcacaagaccgccaaccgactgatccgaaggcttcaacagatcggttacgccgtgagcgtcgtgcccgtttaaaagactgggtttcatcctag

SEQ ID NO: 191 - DNA, 1601 bp, unidentified
  source 1..1601: mol_type = unassigned DNA; note = element_ISAzs32
gatggggtgattggggtcacgccgagaaggtggctgctccagacgagatgagggaacgtggtccgtgtgcaacggccacaagcatcacggaggagccgccatggagtattatgccggcctggacgtttcgctggaagagactgcggtgtgcatcatcgatgcgcagggtgcggtggtgaaggaggccaaggttgccagcgagccgaaagcgttgatcggcttctttgagggggtcggcctgtcgatgggtcggatcggtctggaagcgtgttcgctgacggcttggcttcacgatcggatggcggcggcgggtctgcccgtcgtctgcatggaaacgcgccaagccaaggcggcgatgggggcgatgccgatcaagacggatcgcaacgatgcccgcgggctggcgcagatcgtgcggaccggctggtttcgaccggtgcacgtcaagagcgcgcaatgccggtcctggcgggcgttgctgagtgcccggcgcctggtgctgaacaagttgcgcgacatcgaaaacggtgtgcgggcgctgctgcgcgaggtcgggatcaagctcggaacacccggacgcaagcaattcgccgcccgggttcgcgaattggcggcttccgacgccgtcttggcggccttggccgaaccgctgctgacgatcatcgaaaccatgctgggcgaactggcacgcctgacccggcaggttctgacgatcgtacgcggcgaaacggtctgccgccgcctgatgacggtgcccggcgtcggcccgctgactgccttggccttccgcgccacggtggaccggcccgagcgcttccgccactcgcgcgatgtcggcgcccatctcggcttgacgccgcggcgctaccagtcaggggaaaccgatatccagggaaggatcagccgatgtggcgacgagctggcgcgaaccgccctgtatgaggcggcccacgcgctgctcgtccgctcgcggaaatggtcgagcctgcgggcctggggcatgaaggtcgcgaaggctcgcggcatggcccgggcacgcgttgccgtcgcccgcaagctcgcggtcatcctgcatcggatgtggcaggacggcagcgagttccgctggggtaaggagcccgtcgccgcatgacgatgtagaagcccaccaaccgaattcgtcggcagcgacgaaccggatcgttcccgtggggacgatgggcgaggcgatctcgttgagagtccggaaccgccgggggcaactccggcaggtcgccagacagattgagacgcctcgccttccggaccccatgatgcggcggcctccgcgccgaccgcgaagagaagcgcgtgacccaggggaacggtcattcgtccagcccgaccgccggccagttcagcaccgtgctcgggaccgtcaaggacgcggtacccgcgccgctgacgcggtgacctgcggccatccttgaccgtcccggcgcgcggcgctctgacgatcccaggtcgggacggagggatggtctggatcagtcgaacaaagggataagcacccccatacccgccgaaatcagtagggagcagaaaaggcacatcccgccttgaccccacaaacccaatcagag

SEQ ID NO: 192 - DNA, 1524 bp, unidentified
  source 1..1524: mol_type = unassigned DNA; note = element_ISAzs35
atcctatgaggtgaagagcgactggaaccgggtcagagttctggtccagcactgaacccggaggccgtcatgtccagcacatccaattccaccgccattcgtgtcgatctcggcgcgatcttcgtttcgcttgagctgagccagtcgaaatggctggtcacatcactgacgccgggtggtggcgagaagatgtcgaaacatctggtcaaggcaggggatattggtgacctgcttttgcgatttgcggaattacgacgcaaggctctggttcggactgggcaaatctttccaattgttgtgatccaggaagcagggttggacggcttctggattcatcgggtcctactccaggaagggatcgaaagtcacgttgtcgacccggcatcggtagcgatttcgcgccgccgtcgtcgggcaaagaccgacaggattgacggcgaggcgctcgtccgaacgttgctggcctacaagcggggcgagcctcgcgtttgtgcaatggtaaggccgccaacgcctgaagaggaagaccggcggcggatcgcgcgggaacgcaaggtactggtcaatgaacgggtagcgcacgtcaatcggatcaaggggctgctctacagtcatggcgtcggagcttatgaaccgctgcggcgcgatcgccgggagcggcttgatgagctccgtaccggagatggccgcccattgccaccccacctgcaggcgcagatttcgcgggagcttgaccgccttgaactggtgcttgcacagataaaggacatcgagcgggcgagtaccgacatgcttaccgcagaggcgctcgcatttcccggcgccgctctgttgctgggcctgaaagggattggagcggcggccgcggccgtgttgtggggcgaagggctttgccggcatttcgacaaccgcagacaggtcgccgcctacgcgggcctcgcgccgacaccctggcagagtggccaggtggatcacgagcagggagtttcaaaatcaggtaatccacgtctgcgcacgacgttgatccagatcgcctggctgtggaaccgccaccagccggattccgcactgacgctttggtctaaggatcaggtggctaggaatgggggacggctcaagaagacgatgatcgtcgccgttgcccgaaaactgttcgtcgcgctttggaaatatacccgtgcgggcgtcgtcattgaaggtgccgtgctgaaggccgcctgacgttccgagcgctcatcaatttctccggggaaaaccttcccgctggagcccgtacgggcgaaccgaagatcggcatggctgtcaaacagccgcggtttgagaatggtctcgcccaattgagccttgcccgccgcatgcgggatgttggtgcagtcgccccagtcgactgaccgtatataagttggatcaggcccggtttccgggccgcgtcattgaagcaggctcacgccgtggataccagatagcgctacaggagcataaaatgaaaagctgacgaacatttccgttgattctcctcatata

SEQ ID NO: 193 - DNA, 1248 bp, unidentified
  source 1..1248: mol_type = unassigned DNA; note = element_ISAzvi12
tgctgtgatggactctccctgcaccacacttatccgcaccaacggtgccgtgagtgatgttcggaggattgcagcgatgcccaaacagattgcagtggatttggccaagtccgtttaccaggttgccgagagcgtccatgccggccacgtgaatcagcgcagacggctgggtcgcgaggcatttcgccggtatatacaggagcaggcggaaccggtcgagtggctgatggaagcctgtggcacggcgcactactggggacgcttcgcccagtcgctggggcatcgggtgatcctgctgcatccgcgctacgtgaaaccctaccggcgacgcaacaagaccgaccgcaacgactgcgacgccctcctcgaagcggcgcgctgcgccggcattcatccggtgccggtgaagagccatgagcagcagcaactgcaacagctgcacggcctgcgcgaagcttggaagaagagccgcacccagcgcatcaacctgctgcgcggcatcttccgcgagatgggccttgaggcgccggcgtcgatagctgccttcctccatgcagccaatgaactggttgagcaacccgaagtggcggcccggcgcggccaactgcagatcgtcctggcggagatcaacctgtacgagcaatgcatggtcgagtgcgagcagcagctcgcccgctggcatgccgacgacgccatcgtgcgcaggctcgacgaagtcagcggcatcggtctgctgagtgccagcgccctgaaaacggcggtcggccagcccgagcgctttgccagtggccgccagttgagcgcctggctgggcatgacgccccgcgagtacagcagtggcaatacccgcaagctggaacacatcagccggcagggcaacgtctatgtgcgcaccctgctgatccacggcgccgccagcaaggcggccgtggcgctggccaacaagctggtgcggatctgctgggcgatgtggtgtcatgagcggcgcttcagcggcgactggcagagcagcaggttttcccgtggttgtggtgaatagcgacactgtcggaacaggcgagtcctgcagcggagcaaggccgataacaatgctgatcctggtgatcgattgaacgcttggcccccgctgcgcgaaccacagagtggcccggacggtaatgtccatggaaggccggatatatgaatgcaaccgcactggcgacagggttggaaaggctttactcaccacttgtggggagagtccatata

SEQ ID NO: 194 - DNA, 1424 bp, unidentified
  source 1..1424: mol_type = unassigned DNA; note = element_ISAzvi3
agatggtatggacgcctcccccggcagcgggccgattgcaacacctctgcatcgatagaggatcctcgctgctcggcatcggagtgccacagtgaagcatgtgaatggcaagcatcacttgagcaagaggatccatcatggaacatagcgtgatcggcatggacatcgccaagaaggttttccaactacataccgtcgaccagaacaccggaaaaatcgagcgcatcaaactgcggcgcgatgaagtcctggcgtttttcgcccggcgccaaccctgcctggtggcgatcgaggcgtgcggcagcgcccactggtgggctcgtcagcttcggcagcaggggcatgaagtgcgcttgctggcccctcgctcagtgcgtcccttcgtactgcgcaacaagaccgatgcggccgacgcccaggccatctggacagcggtacagcagcccggcgcctgcctggtcgccatcaagcaagcggaccagcaggccattctctcgctgcaccgtattcgtgcccaactgctgaagtttcgcatcatgcagagcaatggtttgcgagggctgttttacgagttcgggattgtgctgccggaggggtatgcccccttgtccaaggctatgccggaagccttcgccgaggcggaaaatcaggttcctcccgtacttctggagagcctgcgcgagcagtgggcgcgggtgctcagactggaggaggaaatccaggtgatcgaactccgcctgaagcgctgcctgcgcgagaaccccgactgccagaaaattgcagagatccccggcatcggtttattgacggccaccgctgcggttgcctcgctgggagacgcgacgacctttcgttccggccgacagttcgccgcctggctgggactggttccccggcagaccggtaccggcggtcgagtccggcaactggggctgagcaagcgcggtgacagctacctgcgcatgctgttgatgcacggggctcgctcgatcctcgccaggagccagaaatccggatggcttgagcgcttgctggccaggcggcctcacaacgtggcggtcgccgcggtggccaacaagctggcccgaaccctgtgggccgtgctggccaagggctctccgtaccgggccgagcgctttaccgcatgccctgcggggcattgagaaacggcagccaacaggcttcacaaggagcgcaggcggtaagcacgtgatggcggaacaggtcagaccgtggcgaggtaaacctgataaggaagatgagccagggcgctgcccacagctcgattttcagatgcgggcctcgccagcggattccatcagggccagcaggtttttcggcctgcacaaacaggccggatataagactgctcctacctgaacgccagcaggcctacctcttgagttccgggaggcgtccatata

SEQ ID NO: 195 - DNA, 1411 bp, unidentified
  source 1..1411: mol_type = unassigned DNA; note = element_ISBdi10
agatgccgtaatgggccctgcttcgagcaaggggtcatgatggtggctgtcccccgatagatgatgaaacggggtcacgacttgagtcggccccaagcatctagagacggaggacagccgtggagaactatgccggaatcgacgtgtcattggaactgtcgagcgtgtgcgttgtggatgcccagggtaagatcctgaaggaagcgaaggtcgcgagcgaacccgacgccttagtcgagtttttcgagaggcttggctttgcagcaaagcgaattgggctggaagcggggccgctgtcgcaatggctgcatgcaggcttgaaaggagcggggctcgaggcagtcctgctcgagacgcgacatgttaaggccgcattgtctgcaatgacggtgaagactgatcgcaaggatgcccgcgggatcgcccagttgatccggatgggatggttccagccggtacacgcgaagtcggtcggcgcccaggagatccgggcactcctgatcgcacgcaaacagcttctcgggcgacttatcgatgtggaattaagtatccgagggattttgcgcggcttcgggctgaaggttggcccggtgacgcggaggagtttcgaagcgcggatccgagagttggttgcggggcaagcgacattggagcgtattgccagtgcgatgctttcggcacgatcggccttgaaggcagagtacggaaggctgcacaaggctgtactggcaattgtgcgtgacgatgcagtctgtcgccggctgatgacagtaccgggcgttggccccctggtggctgttacctacaaatcggcgattgatgcccctcatcgcatcgtaaaatcgaaggcggcaggcgcgctgttcgggcttacgccaaagaaatatcaatcgggagaaaaggacgtcacaggcgggatcacgttggccggcgacgagacggtgcgcacggtgttgtatgaagccgccaatgttctgctgtcgcgcatcacgcggttctcaaaactcaagcgctgggggatggacgtcgccaagcggcgaggctcaaagcgcgcaaaggtcgccctggcacgcaagctcgcagtgatcctgcatcggatctggatcgacggcacaacttaccgatggactgacgccggcccgatcgcagcatagaaaacgtctaggagatcaagaacgcaaccgagctgaactgaagctcggtgcccgaagtcccgtcgccgggacggtggatccggtgaagccgttacacggccagtggtcgtcatctgacgaaccccgcgcatctagataggctcaccgctccctctgacagcatgatgtggcggccaggcgttgaccacggacagaagcatgagctcggcgacgagacgttcactcgggaggcttgacatcatcgggcccattacaga

SEQ ID NO: 196 - DNA, 1463 bp, unidentified
  source 1..1463: mol_type = unassigned DNA; note = element_ISBdi12
atgacgtaattgcggtcggcgcccgcggctcaaaaaggtccgctatcttcaagccttcccgcaatctcacgaatcggagggggccatgaagcaatatgttgggctggatgtctcgcaaaaagaaacgtcggtatgtgtggtcgacgaagtgggtcagatcttgttcgaaggaaaggcaaagtccgcccccggggcgctcgcggcattgcttcgcaagcgggcgccacaagcggagcgcatcggatttgagaccggggcgatggcgagctggctatggcatgaacttcgtagggtcgatctcccagtggtttgcatcgacgcgcggcatgcccacgcggctttgtccgtacgcatgaacaagagcgatcagaatgatgctcgaggtctggccgaactggtgcgggttgattggtatcgagaagtcaaggtcaagagcgaggaaagtcagaagatccgcgcgatactcgtcgcgagatcccggctcgtgtccatgcgccgagacatcgagaaccaggtccggagcttgatcaaagaatacggcttgctgttcccgcgcgcaatcggccagcagttccgcaacctggtcagcgagctattgggcgataatcatccactccttagcgtgatctcgccgctcctgttgatccatgagcatatctgtcagcagcagaacaagttcgacgacgaagttcgccagttggcgaaggcggacgagacgacgcgccgcctaatgaccgttcccggtgtcggcgtggtgaccgccttgactttccgccatacgatcgatgacccattgtcggcgttgacagtcggcgcctacctcggccttacacctcggcgcaaccaatctggcgaaactgacatcaacggcaagatatctcgatggggcgaccggcttctccgaacctacttgtttgaggccgccaccgtacttctctatcggacaaagaagtggtcttccctcaaggcctggggcatgaagctcgccaagcggatcggtatgaggaaggcaaaggtcgctgtcgcccgaaagatcgcagtcatccttcactgcatctgggtcgatggcacatccttcgactgggggcagccgcagccagtctgatatttgctcgcaagttcctggtccggtctgccggactggcgatgtcccgctgggacggtgttgaggcgacctcgttcattcggctggtggcggctcgaccgtactccgctgcaaacgttgaggcgtccgacccggacatcatcatgaggcgctgcgcgacctcggaaaggaccgtgaccccagtgaagacataaccagcccgggcgatccaatgcctggccggcaaagtacgcatcagccgcgctcgcgccgtctccgcaaccctgaccagctccgacagcgcgagcgctaccgtcgtgccgtcggaaagtttaaaaggtgattgacaacaatccgcaattaaagggccgaatgacag

SEQ ID NO: 197 - DNA, 1125 bp, unidentified
  source 1..1125: mol_type = unassigned DNA; note = element_ISBfun2
aattgaaatgaacgcgtccctcccgtgaacgtaagaataaagggaaggcggatcctctcgggccaacggcatcgatgagcccatgtggaaaaatatggaactttccctggcaaccggaggatccagatgaatcgtacggcggtgggtgtggatatcgcgaagtcggtgtttcaagtgcattacgttgatccggaaaccggggagatcgtgaacaagccgatcaagcgcgcgaagttcttggagttctttgcgaaccgggcacgttgcctcattggtatggaagcgtgcggcggcgcccaacactgggcccgacaactgatgaaaatgggacacgagatcaggctgatgccggcggaattcgtcaaggccttcaacatcaggaacaagaacgacgcggcggacgcgcgggcaatctggcttgctgtgcagcagcccggcaagccggtcgctgtcaagacagagatgcaacaggcaatgctggcactgcaccgcatgcgccgacagctcgtgacatttcgtacgatgcagatcaacggtcttcgaggcttgccgacggaatacggtgaagtcatgggacgaggccgtgcagccttggacaaggcaataccggaagtactcaggcgcgtcgcagaacgtttgcccgcagtggtaattgacacgctgcgcgagcaatggaatggactaacgaaactcgatgagcaggtcgcctgcatcgagcgccggatgcgcgagtggaaaaagcaggataaggccgtgcaagcgatcagtgagattcccggtgtcggactgctgacagccacggcggcagttgcgatgatgggcgatgcgaaggcattcagttcggggcgggaatttgccgcatgggccggtcttgtgccgaagcaaaccggttcaggtggcaaagtgaacctgcacggtatatcgaggcgcggggacacgtacctgcgcacgctactgattcacggggcgagaagcgtgctgacgcacgcgaaggatccagggccgtgggttgagcagatgaagaaacggcgcccgctaaacgtggtcgtagttgccttggcaaacaagatcgcgcgcacaatctgggcagggacatttctgcggtactcatataatttcccttga

SEQ ID NO: 198 - DNA, 1396 bp, unidentified
  source 1..1396: mol_type = unassigned DNA; note = element_ISBli24
cctaattgctactgtgagtattgatagtggctggtctgggactggctggcagagtaggaactgaccgtctcatcgatcatcatgactctaattgctattgactccaacgatgtcctcgtcgggatttgtctgatgattggtgggcggtcggcaccggctcggcccacatcgataacttgatcagaaggttgtccgttcctgaccgaacgtgactcatcacagtagtgtttcgacgtgactatctcccggaccggagccgaccgttcgacggtcggacctcatccgttccgacacaggagaagcacgaaccgtcatgactatcatctcgcatttatacgcgtttgtcgttggcgtcgacacccacgcgaagaaccacgtctacagtgtgctcaccaagtctggtgagcacgtcgatactgccacgttcccgacgaccaaagccggcatcaaacgagccctgacgtgggccgggcgtcgtaccggcggggaccttgagaccctgtgggtgatcgagggtatcggcacgtacggagcgatcctggccgatcatgtcgccgaggcaggctatacggtcgccgaggccgcgagcatgaatgctcgcgaccggcatgccacgggcaaggacgaccggatcgatgcccgacggatcgctggcgcggtcctgtcgatggatgagtcgcggctgcggtttccccggcaggctgatgggccgcgtcagggactgcggatcttggtcaaggcgcgggagtccatgactcgggagaagacccggacgatcaatgcgctcactgcgctgttgcgtggtcaggacctcggtgtcgatgcgcgtcggaaattgtcgatggtcacgatccagacggtggcgaagtggcggatcagggacgagtctgtggcactgaccgaggctcgtcgggaagccatccggttagccaaacgtgtcgtcgagctcgatgccgaaatcaaggactacgccgcccggatcgaggccttggtcaaggccagtccgggggcggtgttgttggctgagccggggattggtccgatcactgcggctgtgttctacctggcgtggtcgcatcatgggcgggtgcgttccgaggcggcgttcgcgaagttggcgggggtctgtccgatcccggcgtcgtcggggaatgtggtgaggttccggctgaatcgcagtggtgatcgtcggttgaattctgcgttgtacatggtggcagtcacgcggctttctcaccataagaagtcccaggcgtacatggctagacggctgagtgaggggaagacgaagaaggagacgatccggtgtatgaagcgtgccttggcccgctcggtgtatcggattctcgaggccacgaacccgatcggtcaagccgcttgacagacatagaaggat

SEQ ID NO: 199 - DNA, 1407 bp, unidentified
  source 1..1407: mol_type = unassigned DNA; note = element_ISBli31
tgtgagtattgacagtggctggtctgggactggctggcagagtaggtgttggcctctccgtccagtgatcgtgactccacctcgcgctgacccacaccgtggtgtcttgccctcgatttgtccgatcacatggatggtgcggccggcaccagctcggcccacatcggtaacttgatcagaaggctgtccacccccgaaaatccgggggtgtgactcatcacagtgttgttccgaagtgatctctaacccggaccggtaccggccgcaagcggccacgcaacccatcggtcaaacagggagcttcgaaccgctatgtctattgtcgcgcacttatacagtttcttcatcggtgttgatacacacgccagaaaccacgtgtattccatcgtcaccaacaccggaattcttgtcgaaacccgttccttccccaccacgtcagcaggaatcaaacgagccctcacctgggccggcaggcgcaccagcggtgacctcgacaccctctgggtcgttgaaggtgcggcctcgtacggtgcggtgctgaccggacacatcgccgcagccgggtacccggtagtcgaagccgggcgtatggatgccaaagcccgccacggtgtcggtaagagcgacgagcttgattcccgccggatcgcggcatctgtattgcctctcgacgccgatcaactgcggtggccgcgtcacggtgaaggcgtccggcaggcgctgcgtgtcctgctggcagcccgggacgcgatgagtacggaacggactcgtgcgatcaactctctgaccgcgctggtgcgcaccatcgatcttggcatcgatgcccgcaagtcgttgaccagtgaccaggtcgacgagatcgcgaaatggcggacccgcaacgaagacgtcgacttgtccaccgcccgggaagaagcgatccgtctggccaaacgcgtcctcgctttgaacgatgatctgcagaccaaccatgacaggctcaccgagcttgttgaagctagtccggccgcacccttgctggatgagcccgggatcggcccattcagcgccgctgtgtgcttcaccgcgtggtcccacccggggcgggtgcggaacgaggccgcgttcgcagctctggcgggagtgaacccgatacctgcgtcgtcgggcaacacgcgccggcaccggttgaaccggggcggggatcggcagttgaaccgggccctacacacggtgatcatgaaccggatggtccatgacgaacggaccaggaactacgtggcccgccactacggtgaagaaccgacgaagaaatccaagagggagatcaagcgcaacctcaaacggtatctagcgcgccgggtctacaagatcctcaacgcgctagataccgttcctcaacccgcttgacaagacatagaaggatcg

SEQ ID NO: 200 - DNA, 1424 bp, unidentified
  source 1..1424: mol_type = unassigned DNA; note = element_ISBli6
ggctcttcactatagatcttgtggactagttagtctgacttctcgaaggacgtggcggtctctaccaaacggatcgatgatggtcttgtggtcgggtctgactcatggctcttctgacaccccgctgtctggggttgtcctgtttacgacgtgtcgactggctcggctcactgtaataagtgcagcccagcaggccgtcatgtcctgataggagtctggcgtgtccccgatagtgaactgactgacgccggctgagctgcgcacccgagaactcgaaaagaaggggcgcagttcccatgatgaacgataagcaggttaaggtctacggcgggatcgacacgcacgcggacacacatcacctcgcggtgatcgaccaagccggacgccggctggctgatgcccaaataccgactaccgcgactggataccaggcagcattgcggttcttgggttcctggcctggattggtcagcgtgggcatcgagtgcaccggctcctatggagccgcggtcacccgagttgtgcgggaggcaggcatcacagtgttcgaggtgaatcgacccaaccggttcgaccggcgactccacggcaagagcgatcccttcgatgcttattccgccgctgaagctgtgctaggtggcagagccagcgcagcgcccaagggtggggacgggctggtggagtcgctacgagtactgcggacttcaaggtcctcggcgctgcaggcccggactgcgacgatcaatcagattaaggggatgctgatcacagccccagaggatctgcgtacacgttacaagggcctgtcaactcccaaactgattgcagcactggcggcatcgcgaccaacagcgacaccggtcaccgccgccgaggccacggcctacagcctgcggctgctggccaggcgctggcaagcactgaccgggcagatagaggacttggctgggcacctgcagcgactactggacgaccacgctcccgacctgatgagggtcttcggctgcggccgagacaccgtcgcgcaactgttgatcaccgccggggacaaccctgatcggctacgttcagaagccgcgttcgcagcactggccggggtctgcccaatcccggcatcgtcgggtaagactaaacgccaccgactcaaccgcgctggggaccggcaggcaaactccgcgctttatcacatcgtgatggtgcggctgcgttacaaccaggagacccgcgactacgtggcgcgacgaactgctgaaggcaagaccaagatggaaatcatccgttgcctgaagcgttacctcgtccgccagctctaccccctcatcgtcgagactcttcatcccagaaaagaggtggccgccgcttgacgaaacactataggagtgtcgtaaacgagagtgtaggtcggtgattccagatcacggcgc

SEQ ID NO: 201 - DNA, 1855 bp, unidentified
  source 1..1855: mol_type = unassigned DNA; note = element_ISBmu4
ggtatctatagcagtgcggggttgacgccgaggggcaagtcgatgatagggcttcagggcgcctcgacgaagtgatcgcgggtcgaccttcgcaccgtcgaattcgatagcttcttgtctgaatcggggtgcaggacgtacgccgaggggcaagagtatgaggccgagcttctgtcgcttctgactcgccgttcaactccgcccgctcgctcgctggtactcttgcctgcgggcaccggacccggcgaccttaagaacgtgggagagcccgcaaagttcgtcccgacgatgtgaagcccatggttgcggggttcgggctggcgcaggcaagagtaacgagatggtggcgcatgaatctgcgagtttcaagcggccacgaatgaaacacctggcagtgctgcccagcgacgagccctctgattcgttgataaggagaacaataactcatggcttctatcagcaatgcacccgtgcgtcaccggaccgtcggcatcgatctggcaataagtgcagttcaggtcgcgcagatcttcgatgatggacgtgcaattggcaaaccgatccgcttccgtttgacgtcaaccgacctcaggcgtttcgtgtcagccatcaagagcggcgtcggcgccgatacgccgatcacagccgtgatggagccaaccggcatggcatggtttccggtggccaactggctgcagcgtgccggaatcaaagtcattcgggtcaagggtcagcgcgtgaaggcgttacgcaaatacctcagcgagcatgccaagaccgacgcggccgatgcacatgtattgggcgcaatacccggctttggtggccgtggcctcgacccagttcatgtgccagggcccgagcaacattcactacaacgactgaccaaacagcgtcaccgctatcaggagctagtgtgttccgcgcggcgccgcgttcttgacctcatccgctgggcgtgcccggcgcttgagcctgtgttgcccgatacggtcacgcaactcacgctagcaattctcggcgagctgttggatccgcgcaaggtcgtagccatgcgacgcgatgtgctcgcccgattcctgtcacaacacgcctcagggaatcatcccaagagcggccccttcatcgattcgctggtcgagaaacttaaggcagcggccgaagagaccattgagctccacggcgatagcgtcgatttcaccgctttgcaattcgaggtggcgcaagaagtcgaacatttgcgactgtgggatcgccacgtccgcgcgatcgagcgtgaagtggagcagatctatcagcgggtgcatccgtccgatgcgcttcgatctattcctggcataggggcgaccttggctccgctgctcatcggcgtactcggctacgcgaaacgcttccgtaacgaagatcacatacgcggattctgcggtatgtttcctaccagaagttcgtccggtggtatagagaagcccggtcaaaggctgacaaagagtggtagtgatcgcgtcaagcgggcgctgtacatcgctgcggacgttgcacgaaagatcgatccagatcttgccgccgtgtactggcgtcttatggtgaacaaagggcatcaccacaagcaagccatctgcgcagttgcgacgcgcttgatcaaccggatctatcgcgtgttgaagaccggcgagccgtacgtgcttcgagatcaggaaggtaactcgatttccgtccaagagggcaaacgtatcgttgctgcgcaattcaaagtgccgctcgaggtccgccagtctcgccgcaaccagcctatgcccgaaccggcgtagagccctgctccgaagccgcgaacatgcgttgacagtcggtacgagat

SEQ ID NO: 202 - DNA, 1729 bp, unidentified
  source 1..1729: mol_type = unassigned DNA; note = element_ISBth166
cgtatattaatatttaagtcctatttcaggcttagattttctctgtaataagaatcctgttataaataaaatacttggacgtttcaagatatttctagataatgatcttaggatcatttgggacaattcttattcctcctgtggacttaccacataacttagagtgtttctcagtgaacgtgcgggactccctactcgcaggctgagcagcctgaccctcgaacctagatgttagtagctctagggcggctttcgattcaggacaagctctcatacacgaggttgttggtcggcgtacacactagagatatctcgagacgtccaaggaatgattctaaatagaagggaggtctcttacatgagattatttgttggtttagatgtaagttcgtttgatataaaagcttgtattttaaatggtgaagggaaaaagctagattccttttcggtcaacaacgatttgccaggtgccacagcgctcaaaaagcgagtgttaaagtgtatagccaaccaagaaattgaaacttttaaaatcggcctagaatccacatctgtttatagttttcatccatctatgtttcttcattatgatgaagacttacaacgctttggggcaaaggtatttctgatgaatccaaaacaaattgcaaatttcaagaaaagctattctgacatggataaaacagatgcgattgatgcctttgtcatcgctgattacttacgattcggacggaatcaaatgtccatcgtaaaagaaagtcagtatgtggcactccagcaattaacaagatctcgttatcagctcgttagaatgttaacaaaggaaaaacaacattttctccaacacttaagttataaatgtaatacgttctcacaagaagtggattcttctatctttggcaacgccatgatggaactgtttcttgagaaattcagtctagaagagctagctgacatgcctttagaggaactcgctgagttcctacaaacgaaagggaaaaaccgattcggtgacccgaaatgtgtcgcatcaaccattcaaagggctgttcgctcttcctatcgtttggataaggtcgtagaagactcaatcgatgttcttttaggaacgtcaattgcggttattcgtacctatcaacagcaaatcaaagaaatagaaaaatccattaagcgaatcatggctggattaacgcaaacactcgaatccattcctggaattggacctgtattcgccgctggtattatcgctgagattggtcaaatcgaaagatttgatgatgaaaccaaggtagcaaaatatgccggattatattggcgtacgcaccaatctggtcgattcaccgcagaaaacacttcattatcccgtaatggaaatcattacttgcggtattacttagttgaagccgccaactctgtaagaaggcatgtatctgattatcaagaatattacgtgaaaaaatataatgaagtaccaaaacatcaacacaaacgtgcactcgttctaaccgcaagaaaacttgtgcgattggtggatgcgctactacgtagtcaccaactttttacgccagaaaggtgcgtgaaagtgtgacataaaacttgtcatcgctaccttctaattaatttccagtaaattacatatattactggtttagttcgtgatgtctttttaagcaataggtctttgataactaagattcttttgtttttcagttgacatactaccgcaggt

SEQ ID NO: 203 - DNA, 1228 bp, unidentified
  source 1..1228: mol_type = unassigned DNA; note = element_ISC1228
cctatatataggttaattagctggggagagtaatactcctcagctggggaaatatggtcgagatgggaattgaagcaaagtcttcgggcgagggcgtgacgagcccctacagtcggactgaacattgtgaaaatattcacgaatataggtgtgacacaagggtaggggtaattggaatagacgtatcaaaagaacacttggtaacaagtaaggggagggtgaggaaattcacaaacaacgagaagggctacgaagaaatactaaccatgaagccaaacatcatcgtaatagaacccacaggagtatactcaacaagaccttgccaatacttcaaagaaagaggagtgaaagtcctactagtcagtcctaccttgctatggaaagaaaaggacgtaaggggaaagaaaacagatttttacgacgcagaaaaacttgaaaacatggtaaataaggctagagaatacgttaacaaccccttaaaagagttagtatcactctacctcttcatgaaggatgtgcaaacgaaacaagagaacaggttaaggagagctctcttcctcgtgagcgacgaggagaagttgagcgaggagagattggagaagttctctaagggagacttctctgacgtaaaactgtatcaactggaatacactggtacagtactacgtgagattcaagtcctagcgagaacactacttcaaacgcgagaagagttgaaggaggtgaggaaaatgatagagggtaatgtgcctcaagaccacgtgttactcacgattcccggaatagggaaactggcagctgggattataattgggattgtgggtgatattaagcgcttcccaagacctgaatccttcgttgcttattgcggtttagacccggtggttgagaggagtggtaggattgaggttagaaagggtatctccaagaggggtaacaagtatttgcgtagcttgttttatttccttgccgagactcaatattcgcgtaacccaactctccttaagttctacgaaacccacaaggataaactgaagggtaggaaactgtacactgccttagctgggaagttggctaggatagtgtggagtgtttggtataataataaaccttatgaggtgaagtgaccctcccctatcactagctaacgtggattgaaagagtccgcgtggcaatagtagctgatactatgctcaaaatttgaccgaaagatttattactgaacgcc

SEQ ID NO: 204 - DNA, 1232 bp, unidentified
  source 1..1232: mol_type = unassigned DNA; note = element_ISC1229
cctatacaggttttattagtcgggtagagtaatactctcctcgactggggaaacatggtcgagacactatctgaagcaaagtcttcggctacgggcgtgactaacccctaccgtcggactgaacattgtgataaaattcacgaatataggtgtgacaaaggggtaggggtaataggaatagacgtatcaaaagattatttaataactagtagggggagggtgagaaaatacgagaacaacaaagagggatatgaagagatacttgaaatgaaaccttgtacaatagtcctagaacctatgggagtttacgcaataaggccttcacaatacttcaaggagaaaggaataaaagtactacaggttagtccaaacatgttatcaagagaaaaggagtttaggggaaagaaaacagatttttacgatgctgaaaaaatagaaaacatggttgataaggcaaaggagtacgagtataaccccttaagagaactagtaacactttacctcttcctcaaggacatagaagtaaagtacaagaacaggttagagagaacactattcctagtaagcgacaacaacaagataagcaaggaaaggttagaaaaactcgcaaaaggagattttacacaagaagaactataccaactagaatacacaccaatagtagttgaagaaatcaaagtcctagcaaaaacactcctagaaacgcaagagaaattgaaagaagttaggaggatgatcgaggaacaagtaccggataatcacgttttattaacaatcccgggaattgggaggcttgcagctggtattattattggtattgttggtgatattaggcgttttcctaaaccagaatcatttgttgcctattgtggtctagatcccgtagtggagaggagcgggaaggctgtggtaagtaagggtatttcgaagaggggtaataagtacttgcgtagtttgctttacttcttggcagggaggaattattctaggaatcctaatttgctgaagttttatgagacacacaaggataggcttcacggtaggaagttgtatgctgctttggctaggaagttggcaagggttgtatggagtgtatggtataataataagccttatgagcctaaataggtgaacccttccccttaatcgccacctgggttgaaaggacccacgtggcaatgttagctaatactatgcttgaagtttgaccgaaaggtttattactgaacgcc

SEQ ID NO: 205 - DNA, 1447 bp, unidentified
  source 1..1447: mol_type = unassigned DNA; note = element_ISCaa7
cgttagacttgtagtgtaaattaatagctaatataaaccttagtcttagtctttaaataacaacactataataatagatataatataaatcaattgttataattataagttgtccacatgagcaaagcttggaagatactcataagttagacttttgaatggatagataatttttgaaataaataaaactaacacactacaagggggcactttaacttgatagcgaggctttgaagcctatattgtgatacaatcccccttgtgttagttacaggttaaaattcatatagaaattgaggccttaaagcttattatcacgggtttgaataataacatgcattgtgttagctaatacatgttaaaccatttaatactagtaaattatatgcaatatacccacattcttggcatagatatatctaaaaaaacgattgatgtagcattgagccaaaataaagccaacgattctattgtatcccataagtttactaataacttaaaaggttatcaagctttgatagcttggcttaaaaaacataaggctccaattgaacaaatccttgtatgcctagaaaacaccggaatctaccatcggtctttggtaagttttcttcaaagccaccaagctttcatatgggtagaaaacgctacttccattaaatggagcaatggagtacaaagaggtaaaagtgatcaaatagatgctcaaagaatttgtttttacgcttttaggaatcaagataaagctcgccaattctcaactaaagatgagtctttgcaacaaatagatgatttatctgctcttagagaacgtttaatccaagctagagtagccttgctagcacctattaaagaacttagagagactgggttgaaaaaaaatgcaactatgttagaagaatcctctaaacaaactttagctagcctggagaaagaaataagagcaatagaggataagataaaacagattattcagcaacaaaaggaattagaaaacaagtatcagatcatacgttctgtacctggagtaggctttgtaacagctattcatctgatgatttatactcataattttaagcgatttgataatgctaaacaattagcttgttatgctggagtagctcctttcgaatatagttcaggaagtagcattagaggaagaactaaagtacatccgatggccaataaaactttaaaaacttccttacacatgtgtgccttaagctcaattagaaataatgttgaaatgaaggagtattatgagaaaaaagtaaaacaaggaaaaaataagatgagtgttattaatgctataagaaataaaatactacttaaggtgtttgcttgtgttagagatggaaaaatgcatgagtataaacaagtagcttaaggaggttatggataaaagtaaactgataattttttaaaggttgcttttatcatagaaatc

SEQ ID NO: 206 - DNA, 1561 bp, unidentified
  source 1..1561: mol_type = unassigned DNA; note = element_ISCARN18
agatgtgatggatgccttcctccctacggggatagagacaggagcacggagatgaacgcgaagctgtacggaagaaacctggccgctgtgatggcgggtgggtccccggatggatacggcatcgatgtgcccagggcgtgatagaccacggtcttcacaaacaccatcggggacccgagatgaatcgtaagactggcatgagcgcggggcaaatcatcggcacgatcgacggcctgcaggtcgtggggttggacattgccaagcaggtgttccagatgcacacggtggacatcgccacgggggagatcgtcaacgtgcagatcaagcgcggcaaggtgctggagcatttcgccaaccgggcgccgtgcgtgatcgggatggaggcgtgtggcggcgcacaccattgggcacgcgagttgcgcgggctgggccatgaagtgaggctgctgcacgcccaggcggtgcggccgtttgtctcgggcaataagaccgacgcggcggacgcgcgggcgatctggctggcggtgcagcagccgggcaccaagttcgtgggcgtgaagtcgctggcgcagcaggccacgctgacgttgcaccgccaacgcgagttgctgatgaagatgcgcaccatgcagacccatgcgttacggggcctgctctacgagttcggcgccgtcttcgccaaggggactcgggtcatgctgggcgaggtcgaagcggcgctgcaatccctctgcaacaaacttccgcagatggtggctgagagtctgcgcgagcaggtgcagcgcatcaaggcgctgggcgaggacatcgccgccatcgagaaacgtctggcattgcagttgcgccaggacgaggccatgcggcgcatcgccgagatccccggcgtcggggtgctcaccgccacggcggcgatcgccaccatgggcgacgcccacgccttcggctcggcgcgcgagttctgcgcctggctgggcctggtgcccaggcagtggggcacgggcggcaaggtgcgcctgcaaggcatctccaagcgcggcgacgcctacgtgcgcaccttgctcatccacggcgcgcgctcggtgctcatgcacgccaaggaacccgggccgtggctggagcagatccgagcccggcgcccggccaacgtggtcatcgtggcgcaggcggccaagatggcgcgaacgatctgggccgtctcacggctcggcaacagccataccagaagggctatcgcagcgtgcggccgcaagcggcctgaacgaaaaggcagccattgatccactcaacctatcgaaaggaatggaccgctttgtaggcgataaggcagcaagacgcagcgtgatgtgaaccggtcggaccgggacaagccaaacctgtatggcgtgccggacttcaacagtccgctctaggagatgaggcgcttgtccgcgaatgacatcggggccagcaagcacgcctgggcaaccaggccgcttgcaaccaaggccggatataaggcagcagccgacttcttcacagcacaacgctaattgccacttgatcgccgggaggcatccatata

SEQ ID NO: 207 - DNA, 1628 bp, unidentified
  source 1..1628: mol_type = unassigned DNA; note = element_ISCARN20
tgagcatcccaagcccctggcggcgcccggcgttcgcgaagaaacgatctttgggctacaaggtgaacggcagtgccgagatgaccgacaagtcattggtgcgagcctgcggcgttgtaggacgccgtgaggtgagcccgctcgtgagcatggtccgggaatcgtcggcgacagtggtgagcacagcgatgtgcatcccgtttgagagatcgagtcgaattcgacgactcccatggcgctgccgttcgttgacaatcttggagcaaacgatggcgatgcgcaagcgagatgatgatctggtcttccccaacgcggcgggtatcgacgtaggagggtcgagccactgggtggcggtaccccggcaagcctgcgacgaaccggtgcgcgagttcggtgcgatgaccgacgatctgcacgccatggccgactggctgctcgcgtgtggggtcgacaccgtggcgctggagtccaccggggtgtactggatcccggtgttcgaggtgctggagcaacgcggcttgacggtgtttttggtcgatgcgcggcagatgaagtatgtgcctgggcgcaagagcgatgtgcaggactgccagtggttgcagaagttgatgagcctggggttcttgcgcgcggcgttccgcccgaccgatgaggtctgtgtggtgcgtgccgtggcccgtcagcgcgacgtgctcttggccgagcaggccagttgggtgcagcgcatgcaaaaggcgctggtgcagatgaacatccagctcaccgaggttctgaccgatgtcatgggactgacgggacaagccatcatccgcgccatcgtcgctggcgagcgcgaccccaagacgctggcccggtatcgcaacgctcgtgtcaaggccagtgagacagagattgccaaggccttgacgggcaattggcgcgatgagcacctgttcgtgctgcgccaggcgctggcgatgtatgacgacattgcccggcacctgggcgaatgcgacgccaagctgcaaggactgctgagccagcttggcgcggccaaggtcgatctgggcaagacgcctcgtgcaggcagcaagctgcgcgcgcagttcgacgcacgccagattctggccaactgggccggcgtcgatctcacgcgcatcaacggcctgggtctggctgcggtgatgaagatcctctcggaggtcggccccaacctgagtcgctttgccaacgtcaagcacttctgttcttggttggggctgtgtccgggcacgaagatcagcggcggcaaggtgctgtcggccaagacccggcgatccgccaatcgggtcaggcaggcgctgaagatggccgcgatgagcctgtcgcacagcgactcggccctcggcgcgttctaccgccgcttgtcgggccgcatggacaagccgcgtgccaataccgccaccgcgcacaagctggcgcgcatggtgtatttcatgctgacgcgtggcgaggcgttcgtcgatcaaggccagcagcgctatgaagatcagcagcgcgagcgctcaatcgtcgccctcaagcgccgcgccgctgcccttggcttccagatccatccaaacccggtgccagcatgaaaccggccttcaacccattttgtttcttgagag

SEQ ID NO: 208 - DNA, 1419 bp, unidentified
  source 1..1419: mol_type = unassigned DNA; note = element_ISCARN28
ctagacatgatggtcgctctataggcgaaggaaggcccgtctccggtatcgtggattgcgcactctgagagtgtgccgagccacatgcggcgggtttccccagccgcaaaccgtatggagacgagccatggacgagagtatcaagttcttcgttggtctggatgcgcacaaggacagcatcgcggttgctgtgtgcgaagccgggcgagagccgagccgtttcgtgggcaccctcgggcccgacgtgcagggggttctcaagacgctgtgcaagtacggtccggcgcggcaggtgagcgtggtctacgaggccgggcccaccggctacgggctgcatcgagagctgactcggcgcggctatcgctgcgagatcattgcaccctcgttgataccgcggcgagcaggcgaacgaatcaagactgatcggcgcgattgcgcccggctggccgagctgtcgcgcgccggcgagctcaaggccatctgggtgcccgacgaggcccacgaagcgatgcgcaatctctggcgggcacgcgaggacgcggtcaacctgcgcctgaaggtgcgtcaacagctcaaagcgttcctgctgcgccaggaccgccgctatgccggcaagacgtcctggaccaagatgcatcagcgctggatcgccgatcagcactttgctcaccctgcagatcagatcgcgctgacggaataccaactggccgtgcaagcgaccgaggagcgagtgcagcggttgacggctgcgctgcagcagatagtccaaggctggcgcttcgagccggtcgtggcggcgctgcgggcgctgcgcggcatcgacaccgtcagcgccatcggcctggtgtgcgaggtcggagacatcagccgcttcggcacggcgcgccagctcatgggctaccttggactcgtgccttcggagcattccagcggcaacagtgtgcggcgcggctcgatcaccaagaccggcaatgctcacgcgcggcgcttgctgaccgaggcagcatggaactatcgattcccggcacgcataagcaacgagttgcgtgaccgtagcaaggcgctctcgccgggcatccgcacccacgcctggaaggcccaggtccgcctgtgctcgcgatttgcgcaactgtcgagtcggggcgtgcaggccaacaaggtctgcgtggcggtggcgcgggagttggccggattcgtctgggccattgcacagcaggcggcgccaacccctgaggcacgatagatccagcccagtggcacgaggtgatgcggcacgatcacgataggaaaaaccctcaccaacactatccacagaacccttcggggcaacctgcgccactagagcgaggcagcttccatgacggatcgatgcacggtggtaatcaacccacgaatatcagtctgatccatcgtcgcagc

SEQ ID NO: 209 - DNA, 1151 bp, unidentified
  source 1..1151: mol_type = unassigned DNA; note = element_ISCARN32
ggaagcgctgtttctcatcaacgcatccggaaggggaagaccatggtgattctgaccgttggcattgatcttgccaagaatgtttttgcggtgcacggggtcaatgaggctggcaaagccgaactgctgcgtccggccgtgccgcgcgacaagctgcatgagctgatcgcggcgctgccgccttgcgtgattggcatggaagcctgctctggcgcgcaccactgggcccggctgtttcagacgtcgggccacaccgtgcgtctgatcgcgccgaagttcgtcacgccctaccgcatgagcggcaagcggggcaagaacgatgcggccgatgctgcggcgatctgcgaagctgtgcggcgcccgcacatgcgctttgtgccgatcaagaccctggaacagcagtctcggctgatggtgcaccgggcccggcaaggttttgtcgagcagcgcacggccacactcaaccgcattcgcggctgcttgagcgagttcggcatcatgctgccgctcaaggccgccaccgtgcgccgacgtgcctgcgactgcctggaggacctgccgggttacgccaacatcgtcattggcgatctcctcagcgaggtcacccgactggacgagcgcatcacgcagtacgaccaacacatcaaggccatggccaaggaggacgcgcgggccaagcgcctgatgcagctcagcggagtgggcgagaccacggcaacctgcatgttggccatgatcggcaacgggaacgacttcgattgcggtcggcagttcgccgcctggctgggtttggctccgggccaatacagctcgggaggcaagacccggctggggcgcatcaccaaagcgggggacagcgacttgcgcatgctgctgatcctgggggctagagccatgctggtggcggccaagaacaagaccgatgccaccagccgatgggctgtggccctggaagcacgacgaggctactggaaggctgtggtggccattgcggcgaagaacgcgcgcatggcctgggcggtgttgcgtaagggcgaagacttcgcgctgccgtcttgagcgccgggccagacaacgcgtcacgatgacatcaacttcaggagaattgctttcgaccgccgcgtgacggcaggcgttgatgacaacaggtt

SEQ ID NO: 210 - DNA, 1367 bp, unidentified
  source 1..1367: mol_type = unassigned DNA; note = element_ISCARN5
taatgggatgaacgtcccctttcctccgtcgcggctcgatgccacgatgggggcctattgaccaaggaggttcatcccatgaaagagattacgactctgggtattgatttggcaaaaaacatttttcaactccacggcgtggaccgacatggcaaacccgtgctgaggaggacggttacacggggcaagcttctggagaccctggccaatttgcccccctgtcttgtgggcctggaggcctgtggtggcgcgcaccattgggcgcgcaagatttctgatctgggacatgccgttcgcctgatcgctccccaatttgtggtgccttaccggaagagtgggaaaaatgacgccaacgatgccgaagcgatttgtgaagcggtggcgcggcccaatatgcgttttgttgccatcaagactccagaacagcaggcggctttgaccctgcatcgggtccgggaagccatcaaggtggatcgtactgcgttgatcaaccggattcgcggcttattgcaagaatttggcatcgtcctcccgcagggggcagcgaaattttcccgacggctattggaggctattacggatgccgatatgcccatggaggcgatcggcctctttgccgcattgcggggggacttgatccgtctggacgagcgtttatcagaatgcgaccaaaaggtgatccgccttgcgcaagaagaagccgcgcaacgcctggcggcgatccctggcgttggcccggtcacggcgactgcagtggtggcgagtgttggggacgccaagctttttcgtaatggtcgcgaacttgcagcttgggtaggtctcgtaccccggcaatcgagctccggagggaagagccgactgggaagaattaccaagcatggggattcctacctgcgcaccctgtttgtccagggggcgatggcagtgattcgccacctgggagagaaacaagatccccgatcgcaatggattcgagacctggtggatcggcggggtgtccaaaaggcggctgtcgccttcgctgccaagatggtgcgcaccacctgggtgttgatggcccggggagactcttatcaaatggcggcatagcaggaagatccgcaagaatgtcattctgttgtgaacagaaggaggtcgctaccgttttacgatttgcgtgatgacgagagatggcggataggtcgaactaatatctggggagcctgagtgttgcggtggctgtaaaaagccgatgaagtgatgaggaccagatatgcggattacccatcggggccagggcaatgtgcccatcaacaggtcggatacatgtttgcattcgaaccaaaccaaaatctacggcatcttgcaaaatcggggacgttcataca

SEQ ID NO: 211 - DNA, 1640 bp, unidentified
  source 1..1640: mol_type = unassigned DNA; note = element_ISCARN52
tgtcatcccgagtagatgggatgagaaggccggtcgccgaagcggttttcgaaagaacacccgcgttgcgcactcagaggtgcaaggagaccgaccttcatgaacaagcatagcaagaacgcagccaaacgcaagatgcggggagcgctccgcgtggctgactgcaacctcctcgccgacgccgtagcgatcggcatcgatctcggcgacagctccagcaatatctgtgtcatcgatgcagccggcgagatcgagagcgagtcgcggatccgcacgaccgaggcgggcgtgcgtgcctacttcgaacacctcgcgcccgctcgggtggcgatggagaccgggacgcactcgggttgggtgagccggctcatcgccgaatacggccaccacgtcatcgtggccaatgcgcgcgaattgcgcaagatccaccagagcaatcacaagaacgaccgcgccgatgcggaggctttggcacggatgctgcgcgccgacccgcgcttacttgcgccggtcaccctccgttctgcggcgatgcagaacgatatggcgctcttacgcgcacgcgatgtcttggtgcgcacccgcgcgcggtgtaccaccgccgcgcgcgggttggtcaaagcctccgggaaacggttgcccggctgcagcacggagagtttccctcgcaaagtgcgcgcctatattcccgccgagttgcagggcgcgctcgaaccgttgctggcggtgctcgaagcgctcgacgtgcagattcgttcgtgcgacgagcagatcgcaacgatggcgcaggagcgctatcctgcgtcggcagtgctcgaacagatcgccggcatcggcacgctcacggcagtagcgttcatgctgacgctcggcgactgcgatcgcttcgagcacagtcgcgacgttgggccgtatctgggcttggtgccgcgtcaggcggactccggtgcgtgttctccgcaattggggatcaccaaggccggcaactcctccatgcgtcgattgctcgttggtagcgcgcagtatatcttggggcgatttgggcccgataccgacctgcggcgcttcggcttacggatcgctgcccgcggtgggaagaatgccaagaagcgtgcggtgatcgccgttgcgcgaaaactcgcggtgctgctgcatcggctgtgggtgaccgccgagtgctacgaacccttacgcaacgagcgactcgctcaaacggcatcaccgacggcaaccaccgcaacggcctcgactgcggcatcgtcgacagcaacgaccgccgtagaaactgcggcataaccttcaggagcatcctcaaccgaaagcaaacaaacttcttccgaaacgacgtccatcgactttttcgccgcgttcgggcgactgcggcaggggctacgatccttcagagatcgccgagtagatagcagcgcccaccttcacgatgaaccccaacatgcaccgagcccccaagggctcaccacgagtgcggatggaagcggggcggaccgaattcttcgacgacgtcaccacggaagctcaccagcggagacccagaacgtaaaaatatgtagagaacacgacgaagaaaccacttgacaataccggccttctcatggaagctgccgaaggcagcgtatcgaggg

SEQ ID NO: 212 - DNA, 1209 bp, unidentified
  source 1..1209: mol_type = unassigned DNA; note = element_ISCARN67
gcccctgatatgttgggttggccgggagatccggcggcttcgcctcgaatctggggtgaagtacctgtcggccacgccgggtgcccctcgggctccgagcccgttatcgagattggcgaccgagagcacctgcggtagaagcgatcggacggaatcgtgagcggcgcagatgcgcacagctcgtatgtatcagggtgattggtgctaccgcgcaactgataaggagagcatttcgggatgtatatcggtatcgacatcggcaaggctgattttcactgcgcgctgttgctggaagaaaaagtcgccaccaaaagcttccccaacaacggcaaaggcttcaaccagttggcggcatggttgcgcaatcgtcgcgtcgagcacgggcatgcgtgcatggaagcgaccggcggttggagcgaagagctcgcaacgtttctgcacgaccgcggctacgttgtgagcatcgtcaatccatcggcagtgaaggcattcgggcgcagcgaactgtcgcgaaccaagaccgataaagcggatgcggcgttactgtcacggttctgtgccgcgcatcgccccaatccctggatccccccgtccccacaggaacggcggctccgccagctcgtacgccgtcgcagcgatctcgtcgccagccgcaccgccgagagcaatcgacttgaggctccgggaaccgacgcggtgcgatcttccattgaaacaagccttgcatttctcaacgaacaaattaccgagatcgaagaacagatcaaacacgatatcgacgacgatcccaaattgcagaacaatcgcaagttgcttgaaagcattcccggtatcggcaccaccagtgcatcgtcgatcattgccgaggttcaggatatgcaacagttccagtcggcacgcaaaatagctgcgcacgccgggctctctccgcaggttcggcagtcggggacgtccatccattcgtcctccctctcgccgatcggcaaccgcgctctccgacagattttctacatgccggcgttaagcgcaatgcgtcgcaaccccaccatcatcgcctttgccgagcggctacgagcgcgcgggaagcggccgatacaaatcgtcgtcgcggtcatgcataagctcctggttatcgcctacggggttcttaagtcccaacgccccttcgaccccaaaatggcctgacgcccatcacggaatctcgacagg

SEQ ID NO: 213 - DNA, 1409 bp, unidentified
  source 1..1409: mol_type = unassigned DNA; note = element_ISCARN80
taatggaatggacgcccacttacccaaacggcatcgaagtgccaaagtgtgagtctgtatagaccacaaaatggagaggagcgtccaaaatgaagattacgacagttggcatcgatttggcaaaggaagtttttcagatccacggcgtggatgagcatggcaaggttgcgttgtgcaagcaggtgaagcgcaaggacatggcgaaatatttcgcgaacctggagccttgtctgatcgggatggaagcctgcggcagtgcgcatcactggtcgaggaagctgggcggctatggtcatacggtaaggctgatggcgccgcagttcgtgaagccgtatgtgaagacgaacaagaacgataaggcggatgcggaagcgatctgcgaagcagtgagcaggccgaacatgcgattcgttccggagaagacggtcgagcagcaggcgatcctgtcggtacacaaggcgagacaggggttcgtgaaggccagaacagcgcagggcaaccagatcagggggctgctttccgagtttggcatcgtgatcccgaaagggattgatgtcatcgccaaacggatgcccgagattctggaagatgcggagaatggattgcccggcacgatgcgccagttgctggatcgattgacggcgaatctcaaagagatggatcggcaggtcgatgagctcgaagtccagatacagcggtggcacaacgagaatgctgccagcaggaaactggctgagattccggggattgggccgatcacggcgagcgccatcgtggcctcggtgggagatgcacgggaattcaaaaatggtcggcaaatggcggcgtggatgggactggtgccgaggcagcattccagcggcggtaaacaaactctgttcgggatcagcaagcgcggggatgtttacctgcgcaccttgctgattcatggcgcgaggtcggtgattcggtttgccgagagtcgggccaaacccgaaagctggctgaggcaactgatggagcggcgcaacaagaatgtggccgccgtggctctggcgaacaagaatgcccggattgtttgggcgcttctggcaaaggacaggatgttccggcccgattacacgccgactaccgtggttgccggcgtgtaatcaggtcggtcaagtaaaaacccggttcaaccgagtaaagaggtgataccaccgattgcacaggcaatcatgagatgatggcgagacaggtcagaccgtgatcgagcaaacctgaatcccgcgacgcacatcaaagtgcgcggttttgttgaggacttgatcagcggattccatcagggatagaggccatgcctcatgaaaaatccggatgtatggctgcaatctttaccttctcaaaatcgtcgattgaaagcttggcaaaaagtgggcgtccatgta

SEQ ID NO: 214 - DNA, 1432 bp, unidentified
  source 1..1432: mol_type = unassigned DNA; note = element_ISCARN91
taatggtatggacgcccactaccccacgcggcatcaatgtgccagaatggaagcgttaaccaaccattaccagagaaggggtgtccgtcatgaagattactacaattggcattgatttggcaaaagatgtttttcaggttcacggtgttgattcacacggcaaagctgtgttgcgcaagcaaatacggcgtggtgagatgacaaaattctttgttaatttaccaccgtgcttgatcggcatggaggcatgcggtagcgcccaccactgggccaggaagctgagcgaatacgggcatacgaccaagctgatggcaccgcaatttgtgaaaccctatgtcaagagcaacaagaatgacatggctgatgccgaggcaatatgtgaggcagttgccagaccaaatatgcgttttgtacccgtaaagaacattgagcaacaagcgatactgtctatccaccggggcaggcaaagttttgtaaaagccagaacggcacaggcaaatcagatgcgaggtttgcttggcgaatatgggattgccatccccaaagggatacattccatttccgagcgaatgccattcatattggaagatgcgggaaatggcttgccaggcatgatgcggaatttactggcaaggttaaatgatcattttaaggtgcttgatcagcaggtggatgagcttgaggcacaaatcaggcactggcacaaagaaagtgaattgagccgcaaactggaagcgatacctggcataggccccatcacggccagcgcaattgttgccacggtaggcaaggccactgagttcaagaatggcagacagatggcggcgtggatgggcttggtacccaaacaacactccagtggaggcaaacagaatctattgggcatcagcaaacgtggtgatgtgtacctgcgcaccttactgattcatggcgcgaggtcggtcatccgctatgccggggataaggcggcgccagatggctggttacgcaaattgatggcgcggcgcaacaacaatgtcgcagcagtggccttggcgaataagaatgctcgcgtcatttgggccttattagccaagggggcgatattccaccccaatcatgcagaggcagcttacgctgcaactgcatgatcagggcggagaagtaaaccgcaagaacaagaatgacataggtttttaacgagtaagaggaagtggctccaccgattgcacaggcaattaagagataatggcgaaacaggtcagaccgtgagtaactaagcctgcggggtccttagcacctttagagtgcgataaagtgattaggcgttactcagcggattccattagggacagaagctaaacgcttcacttaaagtccggatgtatggctgcaatctttaccttttcaaaattattgaataaaagctttgcaaacagtgggcgtccatgta

SEQ ID NO: 215 - DNA, 1555 bp, unidentified
  source 1..1555: mol_type = unassigned DNA; note = element_ISCARN97
cctaacgttcattgcagttgcagccacccctgataatgaaagacacttcaggttggaaggtagcggttagaggtcgtgcaaaattttggcggcaccaccccgaaacctaacgtgacccgccgaactgactcgtaccccggattgcttccatagagagcgcacgttaaacaggccgttgacgacttgtcgtcttcaggcaatttcagttcagcatccgccaccttccacaaccgattgtaaatcgaaaggagacggaatggaactggcaacaatctatcaacgtgttattgggctggatattcatcaagcgcaaatcacagcttgtgcgattatccagcagtctgatggaacaatgcatattgaacaacggcaattcggtgcattcaagcgggatcgacgtgaacttgccgagtgggctacatcgctcaagcccgagcaagtcgtgatggaaagcacaggcatttactggaagagcccgtacgccgcgctggaggcggttggtatttacgggatggtcgtcaatgcccggcacgtcaagaatgtgccaggccgcaaaacggatgttggcgatgcgcaatggctggccacgctggcgcgcgcgggattactgcgcaactcgtttgtgccgccggccaaactgcgtgaactgcgcttgatttcccggcagcggcagaaactggtcgggcaaatctccgccgagaagaaccggctgcacaaactgttgaccgactgcggtattcgtctgggcgttgtggtcagcgatatacacggccaatcggcgcgagccatggtcaaggccatcatcgccgggcagtccattcaggaagtactcaacttcgccagtcggcgcctccgggcaagccgtgaggaattgtttgatgccttgcaaggcgaactgaccgataaccatcgcttcgtcctcgacgaaattatgtgccacatcgaagaaatcgaagcgcgaattgcccgctttgacgcacgcttgcttgaggaactgaagggcgaacacaacaagctggtcttgttacaaaccatgcccggtgttgacctgatcggtgcggccatgctgctggtagaaatcggcactgacatgtccgccttcggcagcgcagatcgtctggcatcctgggtgggcatctgccctggcaacaatgaatcggctggcaagcgaaaatcagggcgtgtccgaaaaggcaacctttatgcccgtcgcttgctctgtgaattcgctcatgcagccagccgcacaaggtcggtattccagtcgaagtttcagtctctgcttgttcgccgtggttataagcgatccattgtcgccctggctcacaaacttttacgcaccatctacttcatgctcagccgtggcgaacactaccgggattccgccactgattatgaagcgctttccgctcaacgcaacgcaccacgctggatcaaaaccctgattcgtttcggctacttgccgcagcaatcagcttgatcccgccgctttcaatttcatggcctttattggtcaggtatgattacgtcctgtgaatgtgttctttcacgttaa

SEQ ID NO: 216 - DNA, 1213 bp, unidentified
  source 1..1213: mol_type = unassigned DNA; note = element_ISCc2
cgtacccactcaccctcccaccgctacgcggcgggcccctcccttgtatctggattgcagcgccattgcgtgatggcttggtgctgtgaagggaccggcggccaccggccccttcacgcggcgcgtggcgcccgtcttccctctggcttcaaccgcgagagagcttagggaccgccgccgcagtcacgcacgaccgaacagtcgcttgaacatcgatcgcatgcacaaggcaggttaccgtggcgagcatcatctgtggagtggacgtctcgttgaagacgttggacggctggatcagcggatctggccttgagctgagcgtgtcgcggagccccgaggggatcgcgaagctggccaggttttgcgccgagcacgacgtggaactggtcgtgatggaggcgaccggcggctatgagaagctgccgtttggcctgttatgggcggcgggtgtgccttgcgcgatcgccaatgcccggtcggtgcgacgctttgctgaggcgatgggcgtgctggagaagaccgacaggatcgacgccaggatcatcgctgactatgcggcgaccaaggggctgaccagccaagctcccgagagccagatccaggaacggctacgggcgctggtggcgcggctgcggcaactgacccagttgaaggtggcgcaatccaatcagcgtcgcctggtcgatgagccgcaggtggtggcgagcttcgacgagatgctggcgctgatcgccaggcagtctcgggccctggagatccagatcgccgacttgctgggcgcagatcccctgtggcgggctctggacgcggccttgcgtgaaatcaagggcgtggccggtcgcacggtggcccggctgatggccgagatgcccgagatcggcacggtgtccaacaaggccgtcgcaaagctggcgggcctggcgcccatcgccagggacagcgggctacgcaaaggcaaacgcccgatccgtggcggacgcgccaacgtccgctcgatcctggtggtggtcgccagcgtcgtggcccggcacgatccggacctagccgctttccatcagcgcctcacccaagccggcaaacccaagatggccgtcagggtcgccgtcgcccggaagctgctcgtacgcctcaacgccaaggcccgggacgcccgtgctacccttgccgccgcttgacgatccagacagtcgctctctccatgagagagggattc

SEQ ID NO: 217 - DNA, 1174 bp, unidentified
  source 1..1174: mol_type = unassigned DNA; note = element_ISCc4
tgatggggtggacggcccctgtgtccggcgtcgagttccccatagggtggtcgttgcttgcgcggccacagaacaggaaccgtccactatgatgactaccacaatcggcctcgacctcgccaagagtgtcttccaggttcacggcgtcagttcagaggggcaggtcactgtccgtcggaagctgcgccgcggcgaactggtgagtttctttcgggatttgcccccgtgcctgatcggcatggaggcttgcgcgaccgcccactactgggcccgcgaactgtcagccctgggccatgaggtgcggctgatgccgccaagctatgtgaaggcctatctccgtcgccagaagaacgatgcggctgacgccgaggcgatctgcgaggccgtcacccgaccgacgatgcggttcgtgccggtgaagagtgcggagcgtcaggcaatcctgaccctgcaccggacccgagagcttttggtgcgccagaagacgacgttgatccgcgcgattagaggccactgcgctgagtttggtctggtggtccctcaaggcgcgcgccgtgtgttcgacctgctgaacttgatgcgggaagcgagttcctcgtcactgccggagacagccatggtgaccatggagatgctcggtgcccagatggaggcgttggcgctgcagatccgcacgctcgagcgacgtctgctcgcctggcatcgcgaaaaccagaccagccagcgcctcgccactatcccaggggtcgggatcatcacatcgaccgcgctggccgccagcatcagcgacccacgtctgttccggtcaggtcgggaattcgcggccttccttggcctggtccctcggcagaactcatccggcggcaaagatcgcttgggccgcataaccaagaagggcgatggctatctgcgcaagctcctggtggtcggggcgacgtcggtgatccgccgcgcgcggaccggggtgacgccatccgccggctgggtccagtcgttgctcgagcgtcggccatcccgcgtcgtcacggtcgccatggccaacaagaccgcgcggatcgcctgggcggtcatgacgcgcggcgagagctatcgggccatggccacggtctgaatgagatcgcggcggaccgtcggtccgccgctccgaactggaagggtgcaaatgggttgatga

SEQ ID NO: 218 - DNA, 1728 bp, unidentified
  source 1..1728: mol_type = unassigned DNA; note = element_ISChy1
cctcctcgtataatttaaattaccatagaacccgagccgaaaaattaggttaagggttcttgataacttggcgtgcctttgcgaagattaaaataggttggtccggggtcactcttaaatacctcctgtagcccgagtaaacccggtgactactcatgtaagagtgagacccttgcggtgcggcgcatgtttcttacgcgtgagctgagccaacaggccagccggcttctggattcagcaggccagaggtgcacccccggctgtcctgccacgctctcatcgccccgcgaggttgttacgcgacgtacccgcagggcacgcccctaatttgggccagcccaaggagggataccctttggcccgggtcgtttttgcaggcattgatgtcagcgctcttaaatgcgacttggtgtgtctcgatgagcaagggcaacagctcgccccagttaagtcttttcctaacagcctcgaaggcgcttctgctatggttgaggtgctggatggtctcgcccataagtttaacatccagcaacttcatatagggttggaggccacctctatctacagcgtccatctccgtcagttcctcctggactccccaaagcttaagccatactccaccaaggtctatgaaataaaccccgtcatggtggccagttttaagaaggccttcggtaccaagcgccctaaaacagatgccctcgacgcttacgttatcgcagaacgggtgcgcttcggccatcttaccccttgtagccgggaaactatagtgactgaacctttgcgccagctcacccgcctgcgcctacacctcgtggaaatggtgacggccgagcagaaccgagccttaaatctcctcttccttaagttttctaattatcaccaggacaagccttttagtcaaactttcggtaaggcctccctggcggtattacaggaatttacaccagatgaacttatagaaatgccattggaagagctggcagagttcatccagtcccatggtaataacaaattagcctcacctgagaatatggctaaggccctcaaacaggctgcccgtcgcgcctaccgccttaatcctaaaatgctcgcagcttgtgaggtagctctttctcttactctgcagaatattgaccacctcaaaaggcagcttaaacaactggataaagtcatttgccgggagttagaagccatacctcaaactctgaccagcgtaaaaggcctcggtcccatctcggctgctggtattatagccgaaattggcgatatcaaacgtttcaaagatcaagccgctctggctcaatatgccggccttacctggacccgctaccaatcaggtgattttgacgccgaagaacgccgcctgacaaaaagtggcaaccggtacctgcgttactacctggtccaggccgccaactcgttgcgggtgcacaacgaggagtataaggcctactaccagagcaagtatcacgaagttaccaagcatcaacataagcgagcgctggttctaactgcccgcaaattagtaaggctggtctttgccctgctgagcaaaggccaaatctacaaagggacggtgatgaaatagttcttgaataaaaccttttctcttctctgctattttccaactattaccatatagttggagagggttattattgccttttttagcccctacttttctaatttccatttcttggtccttgactttttaccgtgagtctt

SEQ ID NO: 219 - DNA, 1708 bp, unidentified
  source 1..1708: mol_type = unassigned DNA; note = element_ISChy2
agcattcctgtaataaattaaaatagcctttgcaaaaacaaaaccctcctggtaaaagaataattggaacacaaaaccacttaaccaggagggcgataggcatgaacaaaatcgagaaactccttttagttcatggttccgacataattttcgtcgggatcgatgttgccaaaaagaaccactatgcaaggatcataaaccacatcggactcgaaccagtaaaacctttcaagtttaataatagcaaagatggctactttcgtatagtctctaaaatactcgaagccaaagaaaaaacaaaagcagaaagggtaataataggccttgaacccagcggccattactggaagcccctcacatggtttttgaagcaacagggataccgggtagtcctggtgaacccgttccacgtgaagaaaaggaaagaagaggaagacaacagccctaccaaaaacgaccgaaaggacgcattaataattgccaaactcgtaaaagagggtaagtttctaaactgcctcttacccgaagggatttacgcagacttaagaaacctttcggtcgcaagaaagcagttaataagtaagcttaacagcgctaaaaacaaactagtttctatcatagatgaatactttcctgaatttgaagaagtattcaagaacctcttaggcaaggcggctttatgggtattgcggcactgtccgtttccgagcatgatcttaaactacaccaaagaagagctggcagaaaacctgaagagagccgccaataaaagagtgggcataaaaagagccgagaaactcatcgaagcagcacaaaagtcagtaggggtaaaagaagggttaaaaggggcatatattcgccttcactcataccttgacgaaatagaatttttaaaaggtcagctcgaaacgattgaaaaaacaatggaagaattgctcaaaaaaatagacatagcagaatacctcctcagcattcctggcataggagtaataaccgtagctggatttctagcggatgtaggtgacttagccaactacacccactttaagcagatacaaaaactagcagggcttaatatagccgaaaaccaatcgggaaaacacaaagggaaggccaagatctccaagaggggccgtcctgagctgaggaatcttctctacaaagcaagcctaacgctagtagccaaaaacaaggaattcaaggcactatacaactatttcctaaaaaggcccaaaaatccattgaaagctaagcaggcattgattgcgatttcagtcaaactggtaagggtgatgtttgcccttgccaagaagagagaaaattacgatccccagaaagtccttggggaataccgcattatgcaaataaaccagttagcagcctaaaaatgagttggccggtaaggtggggaagctctaacactcccataggggcaagaccctgcatgctagtaaaaaagctccccgccttaccctctaaggcagaacgaaggaatgtaatgagggcgtaggacctcgagagacatgatagggtagtcgagggcataagtgaagcgtttgtgaggcaacttgattcgcaagttgtcgtaggtggtcttgttttgtctcaaaaatcctttacaaaaaacaacattgaaatagctgaaattcagcgaaaaaataagattttaagagcttaatttagttaatcaaaaaatattgagataggg

SEQ ID NO: 220 - DNA, 1347 bp, unidentified
  source 1..1347: mol_type = unassigned DNA; note = element_ISCps1
caatgtatggactcctccaacctatgagctaggtttattagtgtctaccaaacacaaattaaggatccatacatgaacaaagttaatactattggcgtagatttagccaaaaatgttattcaagtttctgttctttcgcctttaaataaagaactaacaaacaaagagcttcctcgaacaaagttcgccgagttcctggctaaacagcctataagtcttgtggcgttcgaagcatgctcaacagcacatcattgggcgagattagcgagaagttatgggcatcgggtaaaaatcctgcccgcaaaggtagtatcatcgtttcgccaaggtcacaaaactgataaaaacgatgcacttgctgtcgctgaagccgctaacagacctaatgtaaaagaagcaccattgaaagaacttgagcagcaaggtatgcagtcaatccagcgttcaagagagctactggttcaaaataaaacgtgtttatcaaatcatattcgtggtttattaatggaatttggcgtatttattcctaaaggtttcgcttctctttttaaaaatatacctgacattttggaagacggtgaaaatgatataccagatatgttcagagctacacttaatctaatgtatcaacgtttacttgaccttcgtgatgatgttggattgttggatgaacaagttaaacaattagtaaaaaacaatgaagcatgctcgaatctcactaaaatggaaggcgttgggccaattagcgccatcctactattttcgacattaggtactggcgacgcgtttaaaaatggtcgtgagttctcagcctatattggtttaacaccaaagcaacacagtagtggtggtaaagcgagtttaatgggtatcagtaaatttgttgccaataagcgacttcgctcagtattaatacaaggcgctcgctcatacgttcatcgcatgaaatccgtcaccactaaaaaagatgagtggttagtcaaattaattgaacgtgcgggttatggtaaagcagccgttgcattagctaataaaaatgttcgaactgcgtgggcattactaactcagggaacagaatataggaaagaactaatcgcttaaattactgttacctattgcatttaaaaagttttaaaagagtttcaccgagtaagccaagattagataaagatatccatcttgataaaacctgttccgcagtgagggatttaaacccgttgccacatataggaatcgagatgcgcatacattgagggttaggagatagcttctccatctaaaaaccgaatatacgtacgcgccttaatctaagaatgggatgcttgatgaaaaggaggagtccatata

SEQ ID NO: 221 - DNA, 1498 bp, unidentified
  source 1..1498: mol_type = unassigned DNA; note = element_ISCps4
ttatagtcctttcagtctgaataaaactataattagggtgttcagaccatgtgcctatttcatacgaatattgatacgatatcatttcgatggttaccgctttactttcgatgtcttaggtacgccttagcttaaaaacgaatactcagggcttgcccataaacgctatctatatcgctttcgaaaagctttggcatacatgctgacaataacaattggaggtagttatgactaagttttcagtttatatcggtattgattgggcaaatgataaacacgatgtatgtgttcaagtggctaattcaagtgcacgaaagtttgaagtaattaagcactcacctaagtcgatcaatgaatggataaccagccttcataagcaatacaaaggacaaatagctgttgctattgaactatccaaagggcctatcgtttacgcacttcaaaaatttgattttatcactattcaccccgttaacacttcaatgttagctcaataccgtaaagctttttcacccagcggtgcaaaagacgacccaacggacgcagagcttgctttagatttaatgctgagatatcccaataaaattaaagcattaaaaatggacagtgaatcggttaggaagttgacgtatctagtcgaacagcgtcgtaagttagttgatgataaaaggcggttcagcaaccgattaatcattacacttaaagaatattaccctcacttacttgattggttttcacaccgaggatcggggatattttgtgatttcattacacgttggcccaacctacaaaaacttaaaagagctagggctgataccttgaaaaagttttttggctcataccctggacgtactgcggcatatagcgttaagcgaattcaatctattagtgaagcagagccgctcactctcgataacgcagttatcgagtcgcaccaactgcttgcagttgcattagctaatcaactgcttgttgctgtgaaggttattaaggtctttgatagagaaattagtgagttgtttaatgctttgccggatgcagaactttataaatcattaccaggtactggcccgtgtttagcacctaggctattagtggctattggggaaaaccgtagtcgattcaatagcgcatcggaaattcaaatgtatgcagggatagcacccgtaacagtgcgtagtggtcaaaagagctggattcattggcgatatcagtgttctaaatttactcgccaatcatttatagaatgggctactaaaagcataaggcaatcttattgggcggaaatttattatcagcagcaaagggaaaaaggtaatacccaccaggcagctgtgcgttcgctagcatttaagtggatacggatcatatatcgttgttggaaaactaaagagccatacaatgaagccaagtatttaaaagcattgagcgataggaattccccattactttttaaagaaaaagcttgttaaaggtctcagggcgtagagcggacgtt

SEQ ID NO: 222 - DNA, 1509 bp, unidentified
  source 1..1509: mol_type = unassigned DNA; note = element_ISCps5
tatagtccttttagtctgaataagaccataattagggtgttcagatcatgtgcctatttcatacgaatattgtgcgcaaattatcttgatgatttcctcattgctttcgatgttttaggtacgccttagctcaataacgaatactcagggcttgcccctaaacgctatctatattgctttcgaagagcttaggcatacatgctgacaatactaattggaggttatgatggctaaattaaatggcaattattctgtttatgttggaatagattgggcgaacgacaaacatgatctatgcattcagcaagctaattcagatagacgaaaatttaaggtaataaagcactcagcgaatacgataaatgattggataatcagtctgcataagcaatataaaggacagatagccgttgctgttgaattatctaaaggacctattgtatatgcacttcagaagtataaatttgtaactattcatccggttaatccctctatgttagcccagtaccgtaaagccttttctcccagtggagccaaagacgacccaactgacgctgagcttgcacttgatttaatgctcaattatccaaagaaaattaaagcattaaagatggaaagtgaacctgttcgaaaactcacgtacttagtcgaacaacgccgaagactggtagaagatagaagacgctttagtaatcgattaattaatacactcaagcaatattatcctcacttattggattggttttcacatcgaggctccggtatgttttgtgatttcattacacgttggccgaacttacaaaagttgaaaagagcaagaactgacacattaagaaagttttttcatgcctatcctgggcgtacagcaagttgcacagaacaacgcctcgtgctcattaataaagccgaaccacttaccttagataatgcggtcattgaatcacaccagctcttagctgtggctctcgctaatcaaatgctagtggtagtcgaagcgattaaaatatttgataaagaaattagtgtgttgtttgagaccttgcctgatgctgaactttataaatcattaccgggtacagggccttgtttggcaccaagactactagttgctatgggagaaaatcgtagccgctttacgagtgcatcagaaattcaaatgtctgctggtatagctcctgtgacggagcgcagtggtcaaaaatgttgggtgcattggcgataccagtgctctaaattcgttaggcagtcatttattgaatgggcagctaaaagcgttcatcaatcttattgggcaggtatttattatcagcaacaacgttcaaaaggtaacacgcatcaatcatcagtaagatcgttagcatttaagtggatacggattttatatcgttgttggaaaacaaaagaggcatatgatgagtcgaagtatttaaaagcattacgagatcgaaattctccattactttttaaagaaaaagcttgttaaaggtctcagggcgtagtgcggacgtt

SEQ ID NO: 223 - DNA, 1215 bp, unidentified
  source 1..1215: mol_type = unassigned DNA; note = element_ISCps7
ttgtatggataatacatccatcttttttattcttttcaaaccagtttaggtaaagtgaggcccaagctttagcagcaactaaagcctttttgtacggcagttcgattgagcaaaggctcctctattgagagaccgataacaagatggaacgccgtataaaactccaagcactaaactcggatagtcaactgggcctcgagcccgaatagcaaggcagagtcagcttattatgaatacacaaattaatcaaaatgaaattaacgtcggtgtcgataccggtaaaactcaactcgacatttacatacgtcccttaggtatctatttcaccgtgactaatgatgaagatggcatcaaaacagccatgactgaaataaaaaagcacaaggtaactcgtgttgttattgaagcaacaggacgattagagcaagcctttatcatggcctgtgcaaaagctaaaatcccctttgttattgccaaccctgtcaatattaaacgatttgctggagcgataaatcaaaaggccaaaacagacaaacttgatgcacaattaattgcccattatgcggaggctatcaagcctacgttgtcgcaactaaaaccagagcagataaggctgatgagcgacttattatctcgtcgacgacaactcatggacatgcaaacgatggagaagaatcgtctgcaaataatgccaaaggaaattacgtcatccattaaaccagtgctaacggtgctgaaaaatcagttagagaaaattgataataaaatacataaactaattgaaagttgtgacgaatataaaatcaaaaatgacataatacagagcgcacctggtgtcggaaaagtagttgcatttaacttaattagtgagatgccagagcttggttacatcaacaataaagaagcagcatccttagttggagtcgctccgtttaaccgagaaagtggatcgtataaaggcaagcgaatgatacgtggtggccgttcacaaattagaaccgcaatgtatatggctatgatgtcagcgattcaatgtaatccaacatttaaaacactatatcaacgattagttgcggtaggtaaacccaagaaagtagcgataatagcgtgcattaggaagctcgttatcacgctaaattctatggtgagagatggtgtttattgggatccgaaaatgaattaactcttagggtttgacaccatagtcacttgtta

SEQ ID NO: 224 - DNA, 1563 bp, unidentified
  source 1..1563: mol_type = unassigned DNA; note = element_ISCps8
agacacaatgactccccacgaggtgctagcctctgaacgtgggttagttttacaaaccagagccataatatatgtgtcaacaatataaagcagaggctagcatgataaaacataacatacttttcattggcttagatacccacaaaacatttactgaagttgcctacattgaaggccaacgtggcgctaaatcaattcacttaggtaaaatcctcagtaataaagccgcatttaaaaagctcgctcgacagttacaatcaaaataccccgacgctacgcttcattttgtttacgaagcaggcccttgcggctattggatttaccgtttactgaccagccttcatcattgctgttatgttattgccccttctcttattccaaaaaaaacaggagagcgtattaaaaccgataaacgtgatgcgctcaaactcgctaaattacttaaatcagaagatctaactactatctatgtgcctgagccagaagatgaagccgtgcgagatttatcccgctcgcgtgagacgggcatgaaagatttgaaagatgctaaataccaacttaaagccttattgctgcgtaacaacattaacagcaaagtgaaagataactggtcattacaacatttacgttggcttgctgaattagtattacctcatccttgtcagcaaattgttttacaagaagccgtttcaactatcaccgaacgattaaagcgtctaaaaaggcttgataatgaattaacccatcaagtaaaaagttggcgatattatcctgtagtcaaagcgatacaagctatgcgtggtgtgaggttactcgtggcaacaggtgttatcgcagagctgggtgatttatcacgattcgatcatcccagaaaactaatgagttaccttggtcttgtgccaagtgaacattcaagtggcggtaaacgccgactaggtgctattaccaaatgtggtaacagccgtgcaagacgactactggtcgaaggtgcacactcgtataaacacaacgccaatatttcaaaagaaatgcaactaaggcaagaaggattaagcaaagagatcatcgatatggcatggcaagcacaattaaggttatgtcgacggtacagtcgccttatgcataaaggtaaacatcgtaatgtggttgtgacagcaattgctagagaaatgattgcttatatttgggcaatatccagagaaatagtattacccgttgtcgatgtaaaattacgcatggcgagaatgcctgcgtgaaaaaaagtttcgagttagcgcatgggatcaagcatcgggtgtggcacaaccaccgacggcgttaggatggtaatagcctaacggctattgaaccgcgaagatagactgaagacaggtgccacgacgaaatgagtaaggtaggcgctgctaactaatcgttagtaacccacgaatatcagcatgataaccgacgaaattacttgcttcattctatgcgttaactcacttattttaaaagtgaatagaaaaggctcttatattaatgagcaaggatcagtgtatttaacttgacgtggggagtcatacc

SEQ ID NO: 225 - DNA, 1660 bp, unidentified
  source 1..1660: mol_type = unassigned DNA; note = element_ISCsa3
cctccatgcttagggaagcacaaccattgatgaaaatagacttaagaaaaggttgcaaataataaaatttttgttaaactaaagttaacagggcaaaggttgattttattgttgatggatataatacctcgaacattaacctaacctgattacctttgagcacagccaattgtcgccccatattatcctgatatgggaacagcacgggtgctaaacttcatattttctcaggtaatcatccctgtaataaattcagaataggagagaataatatgcaagatttacttgagatttgttgtggattggatgttcataaagaaactgttgtagcctgcttgcttaaaggctctgtgaatgatgataaaccccaaaaaacaataagaacattttccactttactgtcagggcttgaagaattaaaagcatggcttgaatcagaaaactgccgttatgtagcaatggagagcacaggagtttactggcaacctgtttataatattttggaaagtgctttggagggcactatggtagttatagttgccaatgcaaggcatatgaaaaatgttcctggcaaaaagactgatatgaaagatgcaaaatggattgcaactcttttgagggcaggacttttaaatgggagttttattccacctcaaacagcaagagaattaagagatcttacaagatatcgtaaaagcataatagaagaactgtcatcacagaaaaaccgcattgaaaagtatcttcaaagctgtggatttaaactttcaaattttctcacagatatatttggtgtatctggaagagcaataataaaccacatagcagaacacggcagtataaccgcagaagaagttgaaagttatgttaagacgagagcacgaaataaattgcaagagataaaactgtcggtaaatggcaggatgaacagacaccagcgtgaatttttaaggcttctgcttaagcatttagatgagacatatgaacatcttggtgaaatagaaaaaaatattaattctgagcttgagaaatttaaaaggcagattgagcaattggatagcataccaggtatagataagacggcggctgctgcgataattgctgaaattggcatagatatgagcaaatttaaaactgcagaacatatttgttcatgggcaggattaagtcctggcaataatgaaagtgcaggaaaaaaaaagtccactcgagtaacaaagggtaatacctatatcaagaggatactgtgtgaagttgcatggagtctaactcgcgtaagagattcataccttgctacgtggtattggaaagtaaagcagcgccgagggacaaagaaagcaatagtagctcttgctagaaaattactggttataatctataatatgcttaagaatggcactgactatgatgaaaaagttttttatgaagttcggaagaaacaagaaacgatacgtgttaaacgacttatcaatgaggctaaaaagttgggtttagaagttatagtgcctcaatcagtttaaattttgattaaatttataagatttccagctgatgccttttagcattggttagtttattattgcctttttctggttgaatgatcgaatatattctattgttaacgttcaaaattatttttgaatgcaatctattttcgtgc

SEQ ID NO: 226 - DNA, 1990 bp, unidentified
  source 1..1990: mol_type = unassigned DNA; note = element_ISCsa4
agcattcctgtaatgaacgaaaatgagtgaaaatgaagagaaatgagatttgaagagataaggtacctcctggtaaaatacagaatgtaagttgtacaacttacgacaaaacacaacaaaggaggtaccctctttgaagtatacacaaaatgaaaagatattacaagtaacagagagaactttagttgtaggagtagatatagcaaaggaaaggcatgtaggcagagcatttgattttagaggagtggagcttggcaagagaatagagtttgagaataggaaagaaggtatggagaaatttttggattgggcaaataagataatgaaagcaaatggcaaagacaacatgatagtagggatagagcctacagggcattactggctgtgctttgagcagtatctgagagagaatggcataaaagtggttttagtgaatccttttcacgtgaagaggagcaaggagcttgatgataatacgcaaactaagagcgatataaaggatccgaagacgatagcgatgcttgtgaaggatggaagatatacagagccaaatatacccgagggtatatatgctgagatgagagtagcgatgaacatatatgaaaggcttcaaaaacagctgaacgttttaaaaaatcaaataatcaactggctcgatatgtattttccagagtttttagaagtattttctgattgggaaggcaaggtagcgctattgaccctaaaagagatgccattgccttgtgatgtagtggaaaatgaagtggaagggattatagagtactggcgtgacaaagtagataggcgagcggttagtcgcaggagggcgatggatttagtagaggctgccaaaaggagtataggtaaaaaagaagggagaaagctggcaagacaagagataaaatatttgctgagtcaatatgagcttttaaagaagcagatagaagagatagaagccgagatggcagagcttttgagagaggtgccgaatggagaggaactgcttaaaataaaaggtgttggtgtaaaaacggcagttggctttatttctgaggttggagatataaagaggtatgaggatgcgagacagatacagaaattggcgggactcaatatagttgagaatagttctggcaagtacaagggtcagacgtgtataagtaaaagagggcgagggaggctcagaagtagcttgttcaaggccatgattacaatagtagcaaagaatgaagaatttaagcagctgcacaggtattacaccacgcgagagaacaatcccttgaagaagaagcaatcattaatagcactgtgttgtaaattgataagggtattttatgcgattttgaaaaaaggcgtaaagtatgatgggaacaagatgttgagcgatataaagagagaggctttagcaaggacagcgtgaagtgaagtgagaaaaattgcttgaacattcttagtttaaagcaggagaaatagtttgagtgattcacatcttgagggggtaaagaaattcttagctttgcgaggagattaagtcatgtcgagtagcaaagcgccccttttggtaggagttcacatcttaaacaatgtataaagagtaacaagtgaagaaagaaggataaaatgattctttataaaaagtaagtagattggaaaatgtgagcgggtggtcagagtacatcccccatacgggcgaagaccctgcatacgagcataactgacgtccacgccatggtagatgggacgagggaattgagggcaagtgagaaaagaccctgagagacatgagagggtaaacgccatggttattgtggataaatacccgccgtaatatggtagaataacaagataaatacaagatggaggccaattctaagttgggcatggtagaataaagcaataataacaatatcaagaacaaaattgtttgtttcgataacgaaatttaaagaaaccgtgagatattttgagaaaatcaaaggtatattgagag

SEQ ID NO: 227 - DNA, 1372 bp, unidentified
  source 1..1372: mol_type = unassigned DNA; note = element_ISCth14
ctaacgttcttaaattgaggttgccgatgtgcttagtggagataagaaaaggagaggatacatatttataataaaagaaatatatgctttgtaggggtagatatgcacaaggaaaagcattgtgcagttgtgattgattgctggatggaaaaaatcggagaagtcaactttgaaaacaaaccatccaagtttccagcatttgttgaggagattaggaaaatatgcggtacaaaggactttgtatttgggcttgaggataccagaggttttggccgtaatctggcttcatatcttacaggaagaaagtttgaagtcaaacatgtgaatccagtatataccagtgcaataagactttcaaatcctattatatacaaggatgattcttatgatgcctattgtgttgcaagggtattaagggatatggtggatacattacaggatgcaaaacatgaggatatatattgggcaatcagacagttggtaaaaagaagagaaataatagtcaaatataatgttatgaacaaaaatcaattacatagtcagttgtcttatggttacccatcctataagaagttcttttcacaaattgatggaaaaagtgcattgtgtttctgggagaactatccttcaccagagcatatttggtgtactacaccagaacaaatttatgaaacaataaaagcagtacatcaggcattcaagatagagcgtgttcatgcaattattgatatgattaaaaaggatggaaatacacagaaggggtatcaggaagaaagagatacaatagtaagaaacatcgtaaaagatattaagaacaatcaagagctattaaaagacatagaaaagcagttaagaaaattattgccacagacagggtataagctgcaaactatgccagggatagaccttatcacagaagcaaagattgtgtctgaaattggtgatattaacagatttccaaattcagataagttagctcgttttatggggttagcgcctgtacattttagttcagcaggtaaaggtaaggaagaaaggtgtagaaatggaaacagagagttaaatgctatatttcattttttggctatacaaatggtagctgtatcaccttcaggaaagccaaggcatccagtattcagagagtattttgaacagaaggtcaaagagggtaaaaacaagccacaggctcttatatgtatatcaagaacgcttgtaagattaatctacggtatgatgaagacaaagacagagtatagaccgtatgagaagaaagaagaagaaggaaataattaggaatatttgtaaatttaaattgataaatagtaacagggattatatactatatataatccctgtagtgagggaacgagta

SEQ ID NO: 228 - DNA, 1395 bp, unidentified
  source 1..1395: mol_type = unassigned DNA; note = element_ISCth6
ctaacgctcttaaattgaggttgccggtatgagtggtggagacattggaaaaggaaaggatagatatttatcataaacgaaacacctgctttgttggaattgatatgcacaaggacgcacattgtgcagttgtaattgattgttggatgaataaactgggtgaggttaactttgaaaacaggccatccagattccctgcattcgttgaggatgtaaggaagatttgcgggataaaggaaattgtattcggacttgaagataccagaggctttggcagaaaccttgctgcctatctggtgggcaggaagtttgaagtaaagcacgtaaaccctgcatatacaagcgctgtaaggcttgcaaaccccattatttacaaggatgactcctatgatgcctattgtgtggcaagggtgctcagggatatggtggacactctgcaggatgccaagcatgaggatatattctggacaatacggcaaatggtgaaaagacgggatttgattgtaaaaagtaatgtgatgaacaagaaccagctccacagccagcttgcttatagctacccatcctacaggaaattctttgccatgattgattccaagagtgccttatgcttctgggagaactacccgtcaccggagtatatatggaaaacaacaccagaagaaatatatcagacgataaagcctgtgcatcaggcgcttaaaatacagcgcatccatgagattatatccatgattgaaagggatggagacacaagaaaggactatcagcccgaaagggattttattgtgagaaacatcgtgaaggatatcagacacaacaaggagttgattgccgaaattgacgatgaactaagaaagctgatacctttgacaggctataagctacatacaatgccgggaatcgaccttgttacagaagcacagataatatctgaaatcggagatattaaccgtttccctgactcagacaagctggctcggtttatgggcttggcaccggtgcaattcagctctgccggaaagggtaaagaccaaagatgcaggaatggcaacagggcactaaatgcgatatttcactttcttgcaatccagatggtagcagtatcggcctcaggaaagccaagacacccggtattcagggagtattttgagcagaaggtcaaagagggcaagaacaagccacaggcgcttgtatgcgtggcaaggcggcttgtgaggataatctacggtatgatgaaaaccaagactgaatacaggccatatgagaagactgacgacaagaactgatttcatattctggaagcaaagcaatggaagataattctttttttcgttgagatatggtaacaggaattatataatagatatagtccttgtagtgagggaacgcgta

SEQ ID NO: 229 - DNA, 1907 bp, unidentified
  source 1..1907: mol_type = unassigned DNA; note = element_ISCth8
tccttgtacaattaatattgttatttcatcagtgacttttgccactgttcgaccctgttaacataatgtcatatttgttgcttttctaaacatcaagcacttctatgtgccatcccctaggggatggcggtggctttcaaatcctgccgcctgcggttccccatctatgaccgcttgctagctttcgtctggcctgaaccttgtcaatcatgtataatattttccggacttggagagtgtttgtaatcactcctgggacggaccttattgggccgactacccgtaagaaagagtatttatccattccggtaagtctaaatgatttggctggttgaggccagcatttcagctggctcctcgtgtcacacgcaaggttgtttacttacatgagaaggaatggagtcttttaagtccattaatcttataaaggaggcatttttatgaattttagacccatcgccggaatcgatgtcggcaagttcttcagtgagatggcaattctttctccatccaatgaagtaattgcccgcatgaagatccgccatgattccagtactgacgttgaaagagccgttgaattactgaaaaaaacggaaaaggactttgattctaggcctttcgtcgtcatggaatccactgggcactatcacaaaatccttttccattcactttataaagctggatttgaggtttctgtcataaaccccatccaaactgattctatcaaaaatattggaataaggaaagtgaaaaatgataaagtggatgcccggaaaattgctctgctatacagatttcaggagcttaaaactaccaatatccccgacgaggatattgaatgtctgcgaagcctttgccgccagtactacaagctctctgacgaacttactgcttacaaaaacaggcttatgggtattgttgaccaactcatgctaaacttcaaggatgtattccctaatatcttttcaaaggctgctcttgcagtattggagaaatatcctgcacctgcgcatattcttaaagcgaacagaaacaagttgattgcactgatacagaagaattcccgcagaagccttaaatgggcaactgcaaagtatgagcttttgaattccaaggccaaagaatttgcacctttaagcattagtaactcttcaaatgttgccatgcttggtgtgtatatctctatgattaaaaccttggaagaaaaccttgagaaagtcctcaaagccattcgttcattgattattgaagatatggcaaaggacatgcccatgctggcactgactctcgagcttctacaaagcattccaggtataggacttatctctgctgttaccattctggctgaaattggcgacttttcagccttttcaaagccaggcaagctagttgcttatttcggtattgacccctctgtaatgcagtccggagagtttaccggcacacaaaacaagatgtcaaaaagggggtcaagactgcttcgcagagtacttttcacaattgctcttgctaatatccgcaccaagcgggacaaaacagcttgcaaccctgtactgatggaatattacaaaaacaaatgccagagcaagcccaagaaagtagctttgggggctgttatgcgtaagcttgttaattatatttttgctgttcttagggatagaaagccttacgaattacgttctccccaagagcacgcgcaaatgcttgcagcgaagcacacagcagcttagtagtacttgtactcgatgtttagttttcaaaaatcaatttactatttcaggccagctattttatgtctactaatcttaggtggtcttgtcgttgtgccttttttcgctgtcaggagttttagaaaattcttaaaattttttcttaaaaactcttgactttaattagctggtctttct

SEQ ID NO: 230 - DNA, 1482 bp, unidentified
  source 1..1482: mol_type = unassigned DNA; note = element_ISDar1
cgaatgaaagggacttccccgtcccgaactagcggcggaagccgcaggcagcgtgagctgccatgattgagtttccacactgaatcatttgctcgaaaggggaagtccatgaatattgtcactgtaggcatcgatctcgccaagaatgtattcgctttgcatgccgttgaccagtatggcaaagccatttttatcaagccaaaagtagcgcgcggccaattgctggaaatggtcgcccagctgccgccctgcctgatcggcatggaagcctgctccggtgctcaccattgggcgagagagttcagccgcgtcggccacaccgtgaagttgatggcacccaagtttgtggcgccgtaccggatgagcggcaagcgcggcaagaacgacgccgccgatgccgcggccatctgcgaggccgtcacgcggccgaacatgcgtttcgtcccggtcaaggatgtcgatcagcaggccatcctctgcctgcaccgcacccggcaaggttttgttgaagaacgcaccgcgctctacaaccgcttgcgcggcctgatcagcgagttcggcattgtgctgccacagaaagtcgaacgcctgcgccgggaaatcggtgcccacctcgaagcacttcccggctgggccaaccgctgtgtcggcgatctgctggctcacgccgaccgactgaatgaacacatcgacgagtacgacaaagccatcgccctggccgccaaacaagaccagcggagccggcagctcatgcaacttcctggcatcggcccgaccaccgccagcgccctggttgccagcctgggcggcggccacgacttcaagaatggtcggcagcttgccgcctgggtcgggctcgttcccggccaatacagcagtggcggcaaagcccggctgggcaggatcaccaaggccggcgacgcctacctgcgcagtctgctcgtcatgggcggccgatctgttctcgccggactcggtgacaagcaagaccgcttcagtcgttgggccagaaatctagtcgagcgacgcgggtactggaaagcggcggttgccatcgccgccaagaacttgcgactcgcctgggcggtcatgcactacggagaggaatttcggcgtatcgaagatctcgcctgaaaagcaaaaagcgtttgcaaggaaaaacctgaaaggaatcaccggccgttcgctggcggcccaagaccagcgaagcactgccagcgttgatgtgaagcgggttggacccgcgcggggagcgcctgattaactcaaggggaggcaagcgactcccggctaacgattgaggcccccgcgcgcgtctttcatcagggtccgggcaaaagcccaagatgaccggttgtagtaccgcagtccttcaccttctcgcaccgacacgacagggttcgatcaacagtcagaaaacaggatcaggaatgaaacgataaaacttcagaacgcttgcaaagaatggggaagcccttgtag

SEQ ID NO: 231 - DNA, 1976 bp, unidentified
  source 1..1976: mol_type = unassigned DNA; note = element_ISDha10
cctcacttgtaagatagatattgggttaagttaaaaaacctacccgaacgttctttgaaaacctaatccttattgttcagatgaatgagctgacactctacgtaaccaatatcgctaaacctctggtataatcatttcttggtcagagagatagatgtgcgtacctcctggatccctctttgaggcttatccgtgaaaaagcgtgtcactccacaagaatgattcgatgtttagctggttgggtcacggatttcgtgttacccgtttcaaatgcaagggtgttggcattcttttttagtggatgctctgactcatctgttggaaaggttgtgttaatttgtcccagtttcttcatgactttgttgttggaatcgatgtttcttctgaattctctgtcgttgctatgctcgctccctctggggaactcatccgcaaaccttttcggattgatcataatcccgctggctttcataaactgctcgatatcctaaaaaaggaagaagagcggttacaacgaaagcccatctacttcgtagaatctacgggtatctttcatttaccactcttcttcttcttgaggtcgaataaccttaagggttttgtgctgaaccccttgagtgttcattctaccaaaaatttcgacttaagaaaagtgaaaaatgatagtaaggatgccgaagcgattgctagactggctaaataccaagatgtgaaggtttctctggttcctgagccccaaattctggctctacgcatgatgactcgggagtattatgctctgtcggataccctcaccgagatgaagaacagactatccacggacctctatcttctgttcccgggattccttgatgtgttctctggggcctttggcaaaacagctttagccattctgaaagatttcccttcaccacgggccattctagccgctgataccgattcactgacttctcttatctcgaaaaccagtcgtaaggggaccgcttgggcaacaaagaaggtgaaccaactcaaagactgtgcccagcttgcttcctccatgcctcatgagttctcttggctggatgctaagatcaaagtccatatcgacgggatcgaaagcatgcaggccagtttagacggggttgtaacgcaaatacaagcgatgattgactctgagctctttcctgccgatgctaagcgtcatattgagcttcttgatggtatacctggtattggctttctgacagcagctacgctgattgcagaaatcggagactttaggcttttcaactcggctaaggccttgacagctttctttgggctggatccatccgtcaatcagtctggaaaattccagggtgaccgaaataaaatctcgaaacgcggcacacggatcgggagaagaattctgtttaccatcgctatggcctccattcgtacaacacgtaagggggatgagatcaatccggttctgcgagaattctacgcggcaaaatgcgtgaacaagaagaaaaaggtagctctcgtagccgtaatgcataaacttctccactacatctttgctgttcttcgtgaccagaaaccctttgaaatcaggcaacctgaggatcatcaatcctggagaaatactaagctcagacaagcacctgctgcttaaacatctctttgttgcatgattgtaagtttgcccgtgtcaagggtgatgcgagggataccgaggccctcaggccgaggatatgctcgccatcatcccattgacacggaacaacacctagaagcttgaagacggcaaagtctctaatgccccaaagtattactccatattaaagagagtttgcctggcaagcgccgagcgtttcgttccccccatagtaaatacctcgatttggtcattgttcggatttttcaatgacttggtttcttatacccatttttcttggaccttggaactaaactttttttacattacaccttgactttaattagctggtctt

SEQ ID NO: 232 - DNA, 2027 bp, unidentified
  source 1..2027: mol_type = unassigned DNA; note = element_ISDha12
cctcctcgtataattgatttagttcctgccccacgagtcccaaaaactaatggaacgtggggtatttaaatgaccatagaaaactggaaattcagtagatatggtcaaccgcaacaagatgcacacaggataacgcataccccatgcagccgtcgtgcctgtgggcagtgtggacaagtcaaccccaaggcatacttcaaattcgacttgtccaaagcctgttgggaaagctcttttaggacagaccccaaagggcttttccacaggctggcactgtccacaggctcaggatgaggaatacctgagattcctcagatcgttctttgacaacaaaaaagtatttaagtttgttgggatttcaagcaaaatggtaccgtgaggttcgttctggcaaagccttttcctccttgaggctctgacctctttttaagtctgactgccagcccacaatttgaacttttaactcgaaggttgcacagcttaaagggaactcctccgatagtagcagatcggttggatccaaggtctttttaggacaagtgctgattcggcgaggttgttgacctgttgtggtgcctggtcccaacgttaatcttacaaattgtttggctcagaaagtgaggtgattttaattgagtttatttgtcggtattgatgtgagttccagtgattttaaagtgcgaatcttagatgagcgtggtaatgaaccggttaaaaggctacgggctttgaatgatcagcctggttgtgagcaagttgcccgatatctctttgacgcctgtgctcaagtgaatgtggaccggctggttattggtttagaggccacttccgtatacagttggccgttacaaatgttcttagcggaagaccattctttagcccctttgcagccccaaatttattcctttaaccccaaggtcgttgctaatttcaagaaggcttatgtggaccttccgaaaaacgattggattgatgcctgggtcattgccgaacgtctacgcttcggtcggctcccagagggctctcaggtcgatttccgctacttacccttacagcgcctcactcgctttcggtgtcatttgattgagatgatttccagagagaagaattattttctcacgaacttgttcttgaagtttagcacgcttgcccaaggtgcggtttttagtaacactttcggcgctacttctgaatccttgacacttgagtttttttctccagaagaggttgcggctcgaccgcttgatgaactgattgatttcctcatggagaaaggaaaacgtcatttcgaggatccggaaaccaaagccagagagttgaaggaagctgcccgcaaggcccatcgactgcgtggaagcctattgcaacccattaaccttatcctggccacgagcattgaaaccatccacaccttggagaagcaggtaaagaaaatcgataaggcaatcgaagcagaaatcaggcatttcccgaatacgctcattaccattcccggtattggccctgtgctttcagctggtattattgctgagatcggagacatccgtcgttttccgaatgaaggagccttagcaaagtttattgggttaacctggcgtacccaccagtcaggtgattttacagccgatgacacacccttaacccgaactggcaacacctacttgcgcagttatatcatccaggctgctaacttagtacgccaaaaggaaccagagtacaaggtcttctaccaacgtaaattttcggaaagtaagactcatcatcatcgccgtgctctcgtgcttactgcacgcaaactcgtccgtatggttgatgctctgctacgcagcaaccaaatctataggccacatggcaatagggggaatgcaaaccaagcatgaattgcgctaaccgatactccatttttgtaactttttcccacgatagtttgggaatgagatggtttcttgttgccttttttgcccactgattattagctaactgaaaatttgactcgcttagagtcttgacatattaccgaaggactt

SEQ ID NO: 233 - DNA, 1180 bp, unidentified
  source 1..1180: mol_type = unassigned DNA; note = element_ISEc32
atatcttgaagatggcataaactgaatctgtaggtctggcaaagctcatgcagcacgtgcgaacccgagggtattaagcccgcatgcaagcgtcccgcgcatgagctgagtcactcatcacaaatccgtacagttgattgaaaccaaattcgtatcgtaaggaagggtcatatgagtcaaccaaatctgcaatgcatgggtattgatgttgccaaactatcgctggacatcgccaccaccgacacgattgagccattcactgtgggtaacgatgaggatggtttcgctgttatcacagataaactgaagcacaccaaaattaacctgattctcatggaagctaccggtggccttgaagcagccattgcctgtaagcttcagtcagaaggatacgatgtggttgtgatcaacccacgacaggctagggattttgcccgttcaatgggatatctggctaaaacagataaacttgacgccgccatgctagcacaactggccctggtcattgatcgccatccggaccgcagtcgttatatacggcatctgccagatgaggcacgagcagtacttgccgcaatggtcgtccgtcgtcgtcagttgaaccatatgctggtcgctgagcgtaatcgtctctatccttctcatccccaaagcaggaagagtatcgataacattattgatgcgcttcaaaacgagctcgaccggatcaatgagcaaatgaaacaacacatgacagcattcttccaggagcaggccagactgataggcagcgtgaaaggcgtcggcgatatcaccgtcgcgtcgctgattgccgaactaccggaacaggggaaactcaatcgacgggagattagtgctctaactggcgtcgctcctctaaacagagactccgggaaaatgcgagggaaacggaccacgtttggtggcagagccggagtgagagcaacgttgaacatggcagctctggtggctacgcagtttaatcctgccataaagctgttctaccagcgtttgcttgccgccggaaaacccaaaaaacttgctctggtcgcctgcatgcgcaaactcatcaccattctgaataccatgctcagaaaaggggaagagtggaacgcctcatttcaatcacaggtaatctcatgactgccggtcattttacataatgacagaaagaacaact

SEQ ID NO: 234 - DNA, 1447 bp, unidentified
  source 1..1447: mol_type = unassigned DNA; note = element_ISEc45
agatgatatgacctttatatactcactatagcattggtgggatattccagaggaggtcatcatgcattcggaaaatattgcggcttacgtcgggctggatgtgcataaagaaacgttggcggttgctattgctgcacctgaacggcttggcgaagttcgttattatggtacgattaacaacgaagcccaggctgtacgtcgattatttcagaaattgcagggactttacggaaacattctttcctgctatgaggctggcccctgtggttttgggctatatcatcaactcacagcgatgaatataaaatgccaggttattgccccttcccgcataccaaaatcaccgacagacagaatcaaaaatgatcatcgggacgcaatttctctcgccaggttactgcgggctggagaacttacccctgtctggatccctgacctgactcatgaagctatgcgggatctaatcagagcccgtgcagcagctaaacgagacagcagagttgcccgacagcgaattctgagcatgctattgcgaacagacaaacattatgcaggaaagcactggacaggaaaacatcgaacctggttagctaatcaatcatttagtcagccatctcaacagattgcttttcaacactattgtcaaagtctggagcagattgaagatcgcatacttcaactcgaccaggaaatatctcgcctgttacctgagtggtctctgtgcaatctggtctgccagttgcaggctcttaaaggtgttggtcagctaattgcaataactctggttgctgaactgggtgatttttcgcgattttccaatcccaaacagctcatggcttttctgggactggtgccaggtgaatattccagtggaaacagtattcgtcccagaggaataacaaaagttggaaacagcgaactgagacgtctgctttacgaagccgcctggtcttatcgtacacctgcaaaagttggggcatggcttatatattaccgaccggactctgtaacacaatattccaaagatattgcatggaaagctcaacaacgattgtgttctcgttaccgaagtctgacagcaaaagggaaaaaatcacaagtagccattacggcggtggctcgtgagttgactggatttatgtgggatattgcacttgctgcccaatcatcattcagtcagcagaagcaaaattaaaccctgaagcagtcagacacggaatgagtgatcctcgtaaaagaattcagggaagccagaatgcgctaatacctgcacgtagaaagaggccagctcactgcgtaaatcgtcatggggctaaaatccccgaataagagtttgtaaaatccaagatacagtctgactgtttcaggttctttaatccgcgatataacgaagctcccggagctgcgtaaggtctttttgggcttaatatttgacaaaggtcataag

SEQ ID NO: 235 - DNA, 1525 bp, unidentified
  source 1..1525: mol_type = unassigned DNA; note = element_ISEch13
ggtccgctcagtgccagatatagtcattcacaccctgagaattacacttttaagtgattcagggtatgcgcttactggttacgaatattgtgccagaatcatgtgacttgatgattgccgctttgctttcgagcaagtaagtgctccacattcgctaacgaatactcagggcatgcagaaaaactgctgactatatttctttcgaagaacgtggaatgcataccaatccccgataaaaaggagttggtgatggctgcgatagatcagtttgctgctcatgttggtctggactgggcggataaaaagcatgatgtctgcgttcagtttaaaaacggcgaacgcatattccatgtgattgaacatactccggaagcgcttgatatctggctcaacgagttgcaccaaaaggtgaaaggcaggatcgctatcgctcttgagctgaagaaaggcccggtggtgtatgctctgcagaagtacccattcgtcactgtctttcctgtacacgcgttgtcactggcccgctatcggcagaccttctggccaagtggtgcgaaggatgatccccaggatgctgagttagcattagagctaatgttacgctatccccaaaagataaaggccatagaacccgacaatgctgatatccggttacttcaacaattagttgagcagcgtcgactgctggtcgaggacaaacgccgctttgttaatcgactcatcaacacgcttaagcagtattttcctcagcccctggaatggttctcgcatcgggacagctcactgttctgcgagctaataatccgctggcccagtctgcaacagctaaaacgtgcccggagtgataccgtccgtcattttatgaacgcaaaaggtggccccgctgttgcgtatacagaacagcgggttgcaagtattgccagcgctattcccctgaccactgataaaactgtcatcgaggcaaatgcattgatggcaacagcacttgcatcccaaatcaaactggtaggcgacctcatcagaacctacgacgagcgtattgaatccttattcgatacgcttccggatgcagaactgttcaaatcactgccaggaatggggccgtgtatgggaccgcgtatgcttgccgcactcggtgataaccgcaaccgcttcaatagcgccgaagaaattcaaaactacgctggcatcgcgccagtgacagagcggagtgggcaaaaatcctgggtacactggcgttggcagtgtgcgaagttcgtccgacagacattcgtggaatggactgcgaagacggttaacgcatcatactgggccaaactttattaccagggccagcgagaaaaagggaaatcacatcaatcagctatccgggctctggcgttcaaatggataaggatcatttaccgctgttggaagaccaaaacccggtacgacgaagcgaaatatttgctggcactggaagaacgaaaatcgtccttacttatgccataaaaaacttgtcgaatgcctcagggcgtgaagcagacat

SEQ ID NO: 236 - DNA, 1363 bp, unidentified
  source 1..1363: mol_type = unassigned DNA; note = element_ISEch3
tgatgaaatggacgctccaacttgacggcatcgaatgtgccaaactgagagcatcacacttcagttaaagaaggagcgtccacatgcaagtatcaactcttggcattgatttggcaaaaaatgttttccaacttcatggcgttgataattcagggaaaaccgtattgcgaaagcgactgaccagaaacgcattcctgccatttctggcccagttgcccccctgtttaattggtatggaagcctgtgcatcagctcatcacttcgctcgtcgtttgatgcagtacggccatcaggtcaggttgatgccgcccagctatgtcaaaccgtatgtgaagcgggataaaaccgacgcgcgagatgcagaagccatttgtgaagccgtagcccgacccaacatgcgttttgttgccgtgaaaagtgaaacgcagcaggccatattagcactgcatactgaacgggacctgctgattcgggaaagggttgccagcaccaacagcttgcgggcaatgctggcagagttcggtgtggtgatggaaaccggcctgtcagccttgtacaagacattgccggtgatactggaggatggggaaaatgcgctcacggcgctgacaaggcgcagtgcagcacgtcaactaacgcatctgagggagctggagcaccagatagcagaagttgaacgtgagttaagcgcgtggttccacagtcaggaggcctgcaggcggctggaaaaagtccctggagttggcatgctgacggcgacgtatatggttgcagcagtaggggatggttcacagtttacctcctcaaaacagtttgcggcgtgggtggggctgacgccgaaggaacactccagtggtggtaaacagtggctgggccccataagtaagcggggtgaccgttattttcgctatctgctgatacatggagcaagagcactggcggcagtgatagagcgacaccgtgataaacagacatggttttatagcctgctgaagagaaaaccgttcaacgtggcagtggtcgcccaggcaggcagaacagcgagaatcttgtggtcaatgttgagaggcgggagtgaataccgggaaatcgcgcctgtctgaaggacgggttttaaaggaaggaaacgagtcaggcggttctgaaaagtgcaaggtgtaatcacagtaatggcaaaacaggtaagaccgcaggagaaacaggtcgttcgccgcgtgggctttgagcccgaagggatgtaagacgttctcctggcggatttcattatggtggcgcgacaaaagcgaaaaaccggatatatgactgcacaacctgccatgccgttttaaagaaaacagattgcaaatgtgggagcgtccatata

SEQ ID NO: 237 - DNA, 1765 bp, unidentified
  source 1..1765: mol_type = unassigned DNA; note = element_ISEfa16
cgtaatatatattttgaaacgacttccatcgtttcagtcaccccttagggctattccttattaaataacttttaaaccttggctattgaattttgttcctggataatagacttatggaaacggtctatcggaacactgctaatttcctttgtagctatgactacagcaggaagcctgcatcccgacttattgattatcatgcctcaaactcattagctgtaccgttcacttcttaaactatttctagtaggaaatagggtggcttttaagaagtaaacaattgagtactattaagcgagactgcggttattcaataagattcagggataaacttcaatagctaagtattccaaaaaatttatgaaaggaggaccttccatgaaattatttattggtttagacgttagttctcaaaaattagatacttgttttttaacagactccaaagaaatcttgtttgaaggttcacttagcaacgatttaatcggagccagcgaaatcaaacaaagaattctcgaataccaagaaacctttggtttctaccaaattgtcataggtatggaatcaacttctgtttatagtttccacccagcaatgtttttctacttagatgaagatttgaagctattacctgtcgaagttactgtagaaaatccttatagaatcaaacagtattcaagaatgttcgatcaggataaaacagataaaattgatgcacagatcatagctgattatctgcgagtagatctccatacattgtctcctattaaagaagaagtttatgttggacttcaacgactaacaagatctcgttatcaattagtgacacaaatggtagaagcaaaacaacattttttagaaaatttgacgtataaatgtaatactttatcaaaagaacttgcgaatgaagataataaaacttccatattcggagcttcgattatgaatctacttacagaaggcattaccttagatgaattttcagaaatgcctctggaagcggccgttgaattacttcaaaagctaggaaaaggtcgattcaaaaatccagagcagcttgtcaaaagtattcaaaaagctgtacgtagttcttatcgtttaggtaaagtaaccaagaattccattgaccttgtattaggtataatcgccaatgaaatcaagtttctaaaaaaacagattaaagaaattgaaaaagccattactgctttacttgaaacaattccagaagcccaatgcttattaagtgtcccaggattaggagctgtttatactgcgggcttaatcgctgaaattggtcaaatcgagcgatttgatgatcaatccaaattagcgaagtatgctggtctaacttggactaaaaatcagtcgggaaactctcaatctgaaaacacgccactaaatcgttctggaaatcgctattttcgttactacttaattgaagccaccaatcgagtaagaagcacacttccagaatttaaagagtactaccaaaaaaagagaaatgaagtacctaaacacaaacataaacgagcgctcgtcttaaccggaagaaaatttgtacgcttgatcgatgcgctactacgcaacggtcaattctatcagccagcgaaggtggtgatagaaaaataacgtaaagttatttgcgaaaatcttcgtgatcaacccgaaaaaaatttgattttggtcgggtctagttcagcgcggtctgatttttcaaaatctaactcatattctaaaatttatatcttgacttattaccattagg

SEQ ID NO: 238 - DNA, 1493 bp, unidentified
  source 1..1493: mol_type = unassigned DNA; note = element_ISEsa2
tatagtcattcgtaccctgagaattacactttgaagtgattcagggtatgcgcttactggttacgaatattgagcgagaatcatgtgatgatcgccgcttttctttcgagccagtaggtgctccacgttcgctaacgaatactcagggcatgcagataaactgctggctatatttctttcgaagagcgtggaatgcataccaatccccgataaaaaggagttggtgatgactgtgactaatcaatttgctgcgcacgttggtctggactgggctgataaaaaacacgatgtctgtgttcagtttaaaaacggtgaacgcgtattcgatgtgattgaacatacagcagaagcgcttgatgcctggcttactgagttacaccagaaagtaaaaggtagaatcgcaatagctctcgaactgaagaagggccccgtggtatatgctcttcaaaaatacccctttatcaccgttttccccgtccacgcattgtccctggctcgttatcggcaagccttctcgcccagcggcgctaaagatgatccgcaggatgccgagctggcattagagttaatgctgcgttacccccagaagataaaagctattgaacccgacaatgcggatattcgcttacttcagcaactggttgagcaacgtcgtcagttggttgaagataaacgacgctttgtgaaccggataatcaacacgcttaaacagtattatcctcagccactggagtggttctcacatcggggtagcttactgttgtgtgagctgattatccggtggcccagtctgcaacaactgaaacgagccagacgcgacacgatccgcaactttctgaatgccaaaggtggtcgcgctatggcccttaccgagcaacgtgttgcgagtattgataatgcgatcccattgactacagacccgagtgttatagaggctaatgctttgatggcagcagcactggcgacacaaattaaagtcgtgagtgaaatcatcaaaacctatgacgaacgaatcgaaacgctgtttgacacattgccagatgcggggctgttcaaatcacttccgggcatgggaccgtgcatgggcccacggatgcttgctgcacttggtgataatcgtgaccggtttaacagcgctgaagaaattcaaaactacgcaggtatagcaccggtgaccgaacgaagcggccaaaaatcatgggttcactggcgatggcaatgtgccaagttcgtcaggcagacctttgttgaatgggctgccaagacggttaattcatcatactgggccaaactgtattatcagggccttagagaaaagggcaaatctcatcagtctgcgatccgggcactggcgttcaaatggataaggatcatttaccgctgctggaaggccagaacctgttatgacgaagcgaaatatttgctggctctcgaagcgagacactcgcccttactgaagccataaaaagcttgtcgaatgtctcagggcgtga

SEQ ID NO: 239 - DNA, 1487 bp, unidentified
  source 1..1487: mol_type = unassigned DNA; note = element_ISFac9
ttgtgaatgctatatgagaaataacctatactaaaaatcaatctggagttatccagatgtgtatagggagggggagtatataaatactgtacttacgtactgttctgtgaatctcccctgattcatcattgctgatcggcattctctttccaatgggaaagtaataggtgtctgcttaatgaatcattaatccctgtatatgtatgggtggaggaaatataaatgttatccgtaggaattgatacgcatgaaagaatgcattatgcagaaatacaggatgaaaaagaaaataaactatggcatggaaagatcaggaatataaaagaagattttgaatttttaatagataaaataagtaaaatagagaagagcaataatgataaggttgaatttatatttatgaatcctactgggaattaccatgttccattgaaatatttcctggaaaataataattttactgtatacatggtagatgcaaggaagacattgaatttaagaaagatgataaaccttaatactattaaatcagacagtgaagatgcacatatcttagcagctacaccatggcatgatcctaaatacagggaatatacaggccataataggtcttcattgtccagtatttcaagggaaaggagtattgttgttaaaagtattactgcaataaagaattatatacatagtgaccttgcagctgtattccctgaatttacagatttgtacagcattaattctgctgcaggaatggcaatactctatgaatatgcaacaccgtacagtattctaaatgcaggtattgataatattataaaatcgataaaaaaggcaagcaaggggcattatagaatagaagatataaacaggctaatggaaactgctgaaaacagcataggaatccctgataaagatgatgcatataaattcaaaataaggatgaatatatccaggctaagggatgagatgaataatttaaagaatattgaaaaagagattataagtagaagcagcaataatggggatgttaataacctcaccaatctcaggggccttgggattataaattctgcaataatagtatctgaggtaggaaatatagaacagttcgaatcagcattgaaattagaatcatatgcaggaaaatgtcctgatatagggggttcgggaggtaaaacacattctaagggaataacacatgtaaggaataaatttcttagcaatgctgtatatgagagtgcaatttcactggtaatgaataaaaataaggaattctatgatatattcaacagggaaataggaaaaaagaaatccaatgtacaggcatatatagcagttgcaaaaagattgttattccatatatacagcattatgaagaatcataaaccatataaggagaaaatggtagggaattataagaggtatgcataatggtcattaaattgtaaataaaatattacattcgataatctaatataggtgtatttata

SEQ ID NO: 240 - DNA, 1602 bp, unidentified
  source 1..1602: mol_type = unassigned DNA; note = element_ISGdi15
gtgccagccgtaatcgggcctgagcggtcgtcgtcgattggcggtctcccgggccggaaagaaggtagagttgccgcggtgaaacagcagcgcgggaggcgtgcgatggaattcttttgcggtctcgatgtgtcgatcgacgaaacggcggtctgtgtggtggacgagcagggcaccgtgcatctggaaacgacggtggccacggacccggctgcgctcagggatgccgtgaagccgttcctgccgcgcctgcgccgtatgggtcacgaggcaggttccctgtcgccctggctgcatccggagatgctggcgctgggcctgccggcggtctgcctggagacgaaacacgtgcgggcggcgatgtcggcgcagcgcaacaagaccgacaaggcggacgcgctggggatcgcgcatatcgtgcgcaccggctggttccggacggcccatatcaagagcgaagcaagctatcggctgcgtctgatcctgacccagcgcagcacgctcaagcgcaaattcatggatctcgagaatacgatccgccattcgctcaaggcgttcggtatccgcctgggcacggtctcgcgggcgcgcttcgacaccgccgttcgcgaggccgtggcgcaggacgcgctgacccgcgatctcatggaggcgatgctgcgggcgaaggccgtgctctgggaagaatatacccggctgcacaagctggtggtgcggatcgtcgcgggtgacgaggtgtgccggcggttcatggccattccgggggtggggccggtgaccgcgcttggcgtgatgacggcgatcgacgatccgtcgcgcttccggcgctcgcgcgacgtcgcggcgtatttcggcctgacgtcgcggcgctggcagtcgggtaccagcatcgatgtgcagggacgcatcagcaaggccggcgatccggaggtgcggcggtccctctatgaagcggcgtcggtcctgctgacgcgtttcaaggggcgcgacaagctgcggacctggggcctggaactggcgaaacggtcctgccatcgcaaggcggcggtcgccgtggcgcgcaagatggccgtgatcatgcatgccatgtggctcgacggaacggtctatgacggcggtccggccgtcgatcccgaagagcgggcccgtcatatcgcttgcaagaaccgcaaattgccgcgggcgctcgcgtgagtgtccagctgcaaaggaatgttccgccgcgtgtcgggatgaccgcggcgttctgaacagggagatccgccaaggcggatggggaagggtgcagtcgaggacgacgggaagcacgatatcttgcctggagcacgcgcaggtgaacgcctcgtgggactccgctcgagtgcctgtgatgctgccccgtgaatccgatggcaaaatgcgccacgacgaaaggccggccgcccatccacggatggggcggcatatcagtcgtcgctgagcgcggaagagtgcacggcgtgccacgaaccctcagtcagggccgagatgccagtccaggagcagaactgtgatcgtgaaaggaagctaaaggaaaacgaagaatgaaaaacttgaccaaaaaacccgcccgattaagagggc

SEQ ID NO: 241 - DNA, 1518 bp, unidentified
  source 1..1518: mol_type = unassigned DNA; note = element_ISGdi7
agatgctatgagggcagacaccgccggcaagaaaggctcaatctcaagcgtgtcagcaccaatgacgagggagttcctgccatgtcatccgagaacgccattcacattgccatcgaactcagcgtttcctcctggcttgtcgcggtaaagactatctcgggagccacgaaatcccgattgcatcgcctcgaaggtggagacgcctcagggctgctgaaattgatcgcggagcttcaaacgcgcgcgtcgacccagccgggtgatgtcgcggaggtgtcatgctgtttcgaggccggccgcgatggcttctggctgtatcgtttgctgacagcgcacggcatcgccgcgtatgtgcttgagcccacgagcattctggtcaatcgtcgcgcacgtcgggccaagacggaccgtctcgacgcggaaggcatgctgcgtgttcttgcggcatggcttaatggtgatcgccagatatgcagcatggtgcgtgtgccgacgcccgacgaggaggatgccaaacgtacacaccgcgaacgcgaacaccttgttcaggaaaggctgcgtatcgaaaacagaatagaggcgctgctgtttacccagggcatccggggtagaccgtcgttacggtcctgggaacgcgacgtcgccgcgttgcgcacgggcgacgggcgggaactgccgccgttccttcgtgctgaactcgaccgcctgcgtcgtcggcttctcctggcgttggaactgatccgagaactggaaactgaacgggccaagacactggacgccgcagcgatggatgaccgtgtgactcaaaagatcgtctcgctgaaacagatccgcggcatcggcgagaatttcgctgccgttctcgttcgggaggtgttctatcgccgcttcgacaaccgtcgccaactggccagttacgtcggcattacgcctatgccttatcaaagtggcagcatggatcgtgatcgaagcatcagccgggccggaaacccgcgagcgcggacggcgatgatccaactcgcctggctttggctacgctatcagcccgcaagcgggctcgcctcatggtttcgtgagcgcgtcggcaccttgaaagggcggacacgccgcattgcgatcgtggccatggcgagaaagcttctgattgcgctttggcgctatgtggagacaggatcgataccggacggtctcgcattcggcaccggaacgaccgcagaatagatagacagaagtgccgcgggccgatcagtcgtcggcggcgatacggggaacgcgaccgtcttcttctttggtagcgccacgctaccgcgtttcaggtgggtcgcgcgtcgtcggggcagagcctcgtgcaagaggcattatggtgcgggtcgctcgcgcgatccgaccgcatgtaaggtgatgcagccgctgctgcgatacggaagggccccgagcccataaaagcacctgacttaagaccatagggacaggagacacgccatcgcgaaaatacgttgacacctgaaccctcatgta

SEQ ID NO: 242 - DNA, 1185 bp, unidentified
  source 1..1185: mol_type = unassigned DNA; note = element_ISGme8
ctcagttgctccgttgcttgtatgtttcagtaaccggttatatgttctccagaattggacacgacagcttggtcgttgcttgggccaattgagcccgtcacagagcgtaatgcgtcgtgtccatctttcctcaacccgaacggttgcttgggccgaaacgagcccgaattttcgcaagaaagggactggagagaatatggaacccaatgatgcagttgttggagtcgacgttagtaaagagcatcttgatgtctacctcatgccaactggtgaccagaaaagggtgactaacgatgatgccggttgtgctgagctgacgacgtggctcattacgaacgccccttgtcggattgttctcgaagccaccggcggcttggagatgctagctgtcagcaccttatcagcagcgggtctgccagtggtcgtggttaatcctcggcaggtcagaaactttgccaaagcatgcgggctgctggcgaagaccgatattcttgatgccaagatcattgcccgatttgcccaagccatcaagcctgaaatcaggccgctcaaggacgagacaagccaaaatctagcagcactgctggcccgccgccggcagttggtcgagatgcttgtggcggaaaaaaatcgcgtgatttccgctgcacctacggtccgcaaaggcatcatgacccatattgcctggctgacacagcagatcgatgacgttgataaagacatctcaactcttattcagtccagcgaatcctggaaggcaaaagaagaaatccttaccagtgtcaagggcatcggccctgtgactgcggccaccatactggcagcacttccggagttggggaccatttcccgacagcagcttggcgctctggtcggagtatgcccctataatcgggacagtggcaaattccgtggaaagcgcgcaatctccggtggcagagcaaccgtgcgttctgtcctgtacatggcaacattgtgtgccgccaggtttaacccggttataaaagccttctatcaacgccttacaagcgccggaaaacttcacaaagtcgcgatcaccgcttgcatgcgaaaactactcaccatcctcaatgccatggtgaaaaacaaccagaagtgggatcactcgaaattcactccacttctgcactaatttgttgactgagaacacggttgctctgtgtt

SEQ ID NO: 243 - DNA, 1640 bp, unidentified
  source 1..1640: mol_type = unassigned DNA; note = element_ISGsu4
gggatactgtgtaaggccccctctgggcatacggattagcgtatgctggactttggcgaaacccattctccaaaggaggccttacacatgagattttacactaagactcacaagtactactgcggaattgatcttcatgcccgaaaaaagtacgtctgcattctcgactcggaagggaccgtgctggttcatcgcgaaatcaactgcaatcctgagagcttccttcgcctcgtggcaccctaccgggaggacttggttgtcggcgtggaatgcatgttcgcatggtattggctggcagacctttgccgtaatgaaaagatcgagtttgtgctcggtcacgccctttacatgaaggcagtccacggtggcaaagcaaagagcgacaagattgacgcccacaagattgctgtgctgctccgcggcggcatgtttcccttagcctacgtctacccgccggaaatgcgggcaacacgggacctcctgcgccgccggaactttttcgtcagaaaacgtgctgagcttatggcacacatccagaacacggtaacccaatataatctggctcctcttggcattgatctcggagtcgaagagaaccgccatgaagtagctcagctcttccacgatccggaagtgaggaaaattatcgaaattgacgttgccatgatcgacgcctttgacgatgtcatcaatgtcctcgaaccggacatagaaaaaacggcccggcaacacaacctgcatgccctcaaacttctgcgctcaatcaacggcgtgggaaaggtgctgggcctggtaatgctctacgagatccatgacataaatcgtttcccgaccgtgcaagacttctcttcctactgcaggctggtgaaatgtgcccacgaatcagcgggaaagaaaaagggggtcggcggttccaagataggcaacgtccatttgaaatgggccttctctgaggccgctgtgttcttcgtgcgccacaatccccaggcaaaaatcctgatggagaaactggtcaagattcatggcaaagggaaagcgatttcgatccttgcccacaaactggcacgagcgattttctacatgctgaaaaacaatgtgccgttcgaccgggaaaagtttttggcaacggcgtaaagctggaggggacagaggcagcttagtgcacaactggagccacacgagcaagcatgaccacgaccgtgaaagacaacgaggtgcggctgagaacacgtaccggtcgatttgatgatgctcagggagcaagttaacgagattggagccctgtcccgctccttacataactgaatctattcttttcagcttttgaatgttctgcccctcgccggaaaccgggatcaactgtgcctcgcaccagcgatgagcacgcttcatgaatgggacggccgagggaacgggatagtttctaagccgcgcaaggaatgccttcgcaatcgctgtagcagcaacaaccgcagcgaattgagctttgataagagtttggtgcaggattctttcctgacccagtattggaaatcaagtcagaacggataagatgtcgagatagattcgtcaaagaaaacgactcaaaatcggttgggcaccattttgcctattgactgactggggccttataagagttg

SEQ ID NO: 244 - DNA, 1400 bp, unidentified
  source 1..1400: mol_type = unassigned DNA; note = element_ISGsu5
ggatactatgtaaggccccccttgggcatacggatttttgccgtatgctggactttgcgagaacccattctccaaaggaggccttacccatgagattttacacaaaaactcacaaacactactgcggaatcgatcttcatgcgaagaaaatgttcctctgtatcctggatgcacagggcgaggtgctcctgcaccgcaacatctcaagttcgccggaggcctttctcaaagcagtcgcgcctttccgtgatggcttggtggtcggcgtggaatgcatgtttgcctggtactggcttgccgatctctgccgtaaggaaggaatcgaatttgtcttgggtcatgccctttacatgaaagccgtccacggcgggaaagcgaaaaacgacaagatcgattcccacaagatcgcggtgctgttacgcggcggctcgttccctgttgcttacgtctaccctccggagatgcgcgctacccgcgatctgctgcgccgtcggacccatatccacggtgtcgggcaaatcctggccctggtgatgctctacgagatccacgacatcaatcgttttgagtcggttcaggatttcgcctcttactgccgcttagtcaaatgcagtcacgaatcagccgggaagaagaaaggcagcggcggcgccaagatcggcaatgcgcatctgaagtgggccttttccgaagcagccatgctgttcatccgttacaacccgccggccaagaagctggtggagaatctggccaaggtacatggcaagggaaaggctatcggaatcatagcgcacaagctggcgcgggcgatctattacatgctgaaaaataacgtgccgttcaacttggagaagttcatggcaacagcatagagctggaggggatggaagcagctacaacgttcacctggagccacatggggcgagcatgatcacgaccgtgaaagatgagtaacagtgcgtctttgaacgcgaaccggtcgattggccgatgcccggatacctgtcgcttggattagagctccgtcccgctccttacatacatgagtcgatttcttgctgtttcggtgtgttctgcccctcgcctgagcccggcactaactgcgattctccgtcaggattaatcccgacgctttgaatgggacggcatgagggtacggtacagtttccaggtcgcgaaggtgatgccttcgcagccgctgccaattgtagtatccgcagcggtgtgaacctcgataggtgtttggtgcaggacctttccttctggcaaaggttcctgactctgatgattccgaaatgaagtcagaacagagaaactgctgatccgattcatttaaaaagcgattcaaaatcgtcagggctcttttttgcccttgacggacgggggcctaataagggttg

SEQ ID NO: 245 - DNA, 1172 bp, unidentified
  source 1..1172: mol_type = unassigned DNA; note = element_ISHne3
tagggcccacaagcacaacgccacttaccccttgtatgtcatcttttgcccggcctgctatatttccgcggtcggcagcggatgagagcaccccacccctgagggacaccaagcccgtgggagagcgtgtcgcctcatccgccttggtcatcaacccggacagtcgcttgggccggcgaaagcgaagcccgcatgcgcaaggtcgggacatgagcgagagatttgttggaattgatgtgtcgaaggagacattggacgtccatgtattgccggaggggcgtgcctttgccgtcgcgcgcacagacagccttctggccgcgttgtcggagctgggcgcggacctggtggtgctggaggccaccggcgggctggaacgggtggtcaccgccgccctggccggggcgcagatcccggttgttgcggtcaatccccgtcagatccgggactttgcccgcgccaccgggcagctggccaagacggatgcgatcgatgcggcggtaatcgcccggttcggacaggcgatccggccggccccgcgagcccttccggacgccgcggcccaacagttggcagagctggtcacccggcggcggcaggtcatcgacatggcggtggccgaacgcaaccgccgccgcctggtgacggccaggccggccctgcgcagcatcgaccgggtgctgaaggttctggaagcccagctggcagacatcgacagggagatcggggaccgcatccatgccagcccggcctggcgggaggcagaggacctgctcaaatccgtacccggcgttggcgaccagacggcccgcaccctgattgcggccctcccggaactaggcacccttagccgccgtcagatcgcggccctcgcggggcttgcccccttcaaccgcgacagtggccagtggcgcggccgccgctccataaccggcggccgcgccgatgtgcgcagcgtcctctacatggctgccctggccggcatcaggttcaacccagccctgaaagcctgctaccagcgcctccggacagccggaaagcccgccaaggtcgccctcgtggccgtcatgcgaaaacttctcacaatcctcaatgcaatcctcagagacaaatccccatggcaaacacaaaacgcttgaaagcgaacacagtcgctctcccgcttgcgggagagg

SEQ ID NO: 246 - DNA, 1166 bp, unidentified
  source 1..1166: mol_type = unassigned DNA; note = element_ISHne4
gccccacccttgtattgtgattttggtgtagggattgggtgacaggcggggtctgtccccacccttggtctttgaggaccgcgagttagcgaacggcccgcctgtcagtttgagttcgccctgaacagttgacaggggcgggtgttggaagcgcccggccccgcatgacaaggacaggaacaccatgcctcagaatgtcatcggcgtcgatattgccaaagactggatcgacacccattgcctcgacagcggccgatcgggccgtctggagatgacgccccgcgccctgaaagcctttgcccggcgctgcggcggcgcgctcgtcgtgtttgaagcctccggcggttatgagcgcccgcttgctgaggcgctgggcgcggctggcgtcgcccatgcccggatcaacccccggcaggcccgcgagtttgcccgcgccaccgggcgcctggccaagaccgaccgggtggatgcccaagtcctcgcgcgcatgggccgggcgctggagctgtcaccgacgccgccgcccgatccggctcgcacccggctggcggcgctgatggcccggcgggacgatctcaccggagaagcggcgcgggaagcctgccgcctgaggcaggcacgcgatgcgttcgtgcgcgccgacatcaccagcctgatcgggatactcaagcgccgcattgcccggcttgaggcggagatcactgccctgatcaaggcccatgcacctctggccgaggccgaagcgcgcctgcgatcagcccccggcatcggtcccatcacagccgccagcctgatcgcccggctgccggagcttggccatgtcagccgcggcgctatcgccaacctcgcgggcctcgccccgcatgcctgcaacagcgggcagatgcgcggccagcgccgcatctggggcggacgcaaggacgtgcgcaccagcctctatcaggccgccttcatcgccagccgctacgaccccgccctgaaggccttgcgccagagactgcaggacgccggaaaacccttcaaggtcgccataatcgccgtcgcccgcgtccttctcacccagctcaacgccatcctccgagaacagagaaactaccgccctggaatctgacccgaacaacagttgctatccctccccatagtcatggggaggggacgtggtgtgc

SEQ ID NO: 247 - DNA, 1462 bp, unidentified
  source 1..1462: mol_type = unassigned DNA; note = element_ISHvo9
gtgctgacttgatggaaattctgctatcccatcggagcgtgaatcaattatgggacgcaagagaccgagctgtattccgtgcgctagagcacgtggtgctgactggtccgagtgcgaaagaagccgagttatgggcgtcacagcccggatgccgctcctggcggcatccgggaaagcccgcataggtgaatttctgattcacgcaccgccgtcctatcccggaggaacgaaccatgtacctcggaatcgacctacacaaacgatacgcacaggtggcagtaatggacctcgagggcgagattgtcgaagaggttcgcgtcaaaaacgcgaacctcgacgacctcgctcagcgatacgctggctctcgtgcagtaatcgaggcgaccagcaattactaccacgtctacgatactctcgcggagtacttggacgtaaccgtcgctcatccaggcaaactgacgctcatcgctcggtcagacaagaaaaccgaccgcgtcgacgcgaaagaactcgcgcggctgctccggctgaactctgttccgcagagttacgttcctaccgacgagattcgggaagcccgcgcactcgtgcgcgggcgacagaccttggtcgaagatcggaccaagttcgccaacaaaatccacggcttgctcgccgataacggcatcactcagacggtaaaaccgctgagtgtcgagggacgagagttcctccgggaactctcgctcccgtctccgtgggacagtctcttggactcgtatctcgacgtggtcgagacgctaaccgagcagatgactcagttggaagcggcgattgaggagcgcgctgggtctctgaaggagacccagctgctgatgaccatccccggtgtcagttactactccgcgttgctggtctacgctgaactgggtgagatcgatcggttcgacggccacaaagaggtcgtgagttacatgggactgaacccgacgatccgcgagtccggtgactcgcggatcgagggtggtatctcgaaacgcggctcaggacgagttcgctggatcttggttcagagtgcgtactcagccgtgtacacgtgtaaagacgcgtatctaagcacgttcttccaccggttgaatcgtcgaatgaactcgaaaaaagcgatcgtcgcgacggcacgaaaactgctcgtctcgatgtactacatgctcgtccgagaggaagtctacgatccaccgggggtgagcgcctgaagaagggaatctgaggaacgccggaccggcgttcctcagtggccggatgaggccagcgtaagcgacagctctagcaagactcgttccgaccgcctaccggttgtggaggtctcaatcaccacgttgtctagtggtttctcgtcgttgagggactagagaagctagatcgtgcgaacaactttatcgccagcggtggttagttgagccagcagaatttccataggtgaata

SEQ ID NO: 248 - DNA, 969 bp, unidentified
  source 1..969: mol_type = unassigned DNA; note = element_ISIMl1
atgtctaaaacttacattgggattgatatcgccaaaaacacatttgatgcctgctttattacccataacacttggcaaaactgtacattcacaaataaccaacagggttttatagagctaacattgtggattcaagcacatcattataacacatctaccttacatttgattattgaggcaacgggggcttattgggaaaaattagctcattgggcaatctctcatcatcataaggtaagtattgtcaaccccttatatattcatgcatacgccaaaagcctaggcatacgcaccaagacagataagcaggatgccattctcttggcacgctatggtgcaaaagaaaatccacctttatggcagcctaaatcagacaacgaaataaaactgactgcccttctaaaacaacgtgaacaccacaaacggcaactcatcaaagaacgcactcgacaggaagctctgtctatttatgtgaaatcgtatactgatgacaacattcgtcattggagtgacagcatcacacagctcgatcatcaaatttggcaactcatcaattgcacgcccgagctaaattaccgtgccagcctacttgccacaatacctggaattggcaaaaagacactgccacatctactggttgtcattggagatggttcatcatttcaaagtgccaaacatctagcaagctatgctgggcttgcccctcgtcatcatcaatcaggcattagtattcacaagcagtcttccattggatttagtggacaaaaagaactacgttcagccctttttatgcccgctgtcatagtcagctttggtcgatatcccgcttttcaaaagttcgtcaaacgcatggaacaaaaaggcaaaaccaaaaaacaaattattatcgccatcatgcgcaaattactcaccatcagctatgccgttattcgccaaaatcgcccttttgacaaacgcattcatgaataa

SEQ ID NO: 249 - DNA, 1516 bp, unidentified
  source 1..1516: mol_type = unassigned DNA; note = element_ISKol6
ccgatgtaggagtaaaataaaggaggcagtcaggaggaagagaggaacagagaaccgatccgccataagagcgactgcttctcacactccctcttccatcctgggagtactagaggatcaatagtaggatatccggggaaacccaggaacgctacatcgattaacctgtactcattgactgcacaatgttttttggaggaatcagtatggatattgtgggaattgactggtcgtggaattttcacacctgctattctatcgaacaggataaggtttttaagatcaaggatggtatagcggggtatgagaagctgctgaaaacagtatcaaaagacgctgttttcgtcattgaggagagtttcaatcgtttgggagatttcttgctgtccagagggaaagaggtttatctcctgccaccgaaaaggtcaaaggaagccagaggctatcattcgaacggcgtgaagacagattcaacagatgccaggtgtatcgcccttacctacaaagaacacccggaatattgtattaaggcaacacatgacgaactcggcatgcttttcagggaattgttgaggcattacaggtactataccgacatgtcctcaagacttaagaacaaacttcaaaacgaacttcataattatttccctgaatatgctagggtgatgggtaattcttggacagattgtgacgggaggatattcctgctcaccatatgcccggatgtaaccgaactcaggaagacatctgacaaggagataaatagacatttcaaagcgaatcatctacgctacacatcctcattgaaaagaaaggtcaaagaactcagggaaaaagccattgactggggcatgtcaaaatacaccagggacatgatcgcgaatgttgccacacaacttctggaagcaaaaagagagaaaaagaaaataacaaaagagatggagaaagaactacgtaaatcgaaatacaacataatactgacgctcccgggtgttggagtagctacaggaatggcattagtaacagcatttcttacacacgaattcaaaaattacagggatttccagaagtattgtggaactatgccaatagtatcccagagtggtaattttcgcatgtgcaggatgaggaaaaactgtgacaagaaactcagaggcattctccatatgatggcgataaacgcgaagaaatgcggagcatggatgaaaggctactatgacaagaagacaaataaagagggcaagaaaccatctcttgccctcagagcattggcgaacatcctcgtcaagatagccttcgccatgctaagaaacctaaaagcctacgatgaggaactcttcctttcctcacgtgggaacaagagtcctcggttaaattatacaacaagaaatagcataccggggaccaaaaaaatgaagaaagaaaagttatccctgcctgtctctgttgctcaaaccaactgccatttgggaacagtttcaggtagtctgtctccttgacttgacatagtaggtga

SEQ ID NO: 250 - DNA, 1424 bp, unidentified
  source 1..1424: mol_type = unassigned DNA; note = element_ISKqu3
tctgaatgccgctttgcggcatggaggcgccagcagcagttgagtacaactctgatagtgagtggcgccgttgcccggcgcagccggctactgtgttgacaggttctgcctcaccgaccccctcccttgtatctaacagtttgtggtgattagctaccaccactgaagcagagtgagccgcccccttcccttaaggtcagaaaagtcggcaccgctgaaccttgatttgcagcacatggccctccgcttcacctttcacgccagcacatcaggttgaacggttaccgggagctcgactccgtatgtacaaggcgaacaggcgtgacggtttatgtgagaggagtttgaccatgtttccagtcggcattgacgtaagtaaaaacaccctggatctttgcatgctttatgacggtatcaaaggacgcataaaaacccgtaacatccagaataacagacattcagttgaaaatattcttcgctggctcaggcttcaacattgcagtccggaagatgttcatgtggtaatggaagctaccggtgtttatcacgaacagctggccactgaattacatgatgccggtttccgggtttctctggccaaccctcaccgtagttgggagtttgcgcgtggcatgggaatcatgacaaaaacggataaggtggatgcgtatatgctggcctgttacgcattccttaagaagccacaccgctgggagccgccggcacccgaaatcagatatctcggtgcactcctgcgacggcgggatgttctgctgggtgatgccctgcgtgaggagaacagactggaaaaatacctgtcgacagacacacctgcagatattatcagttcctgcaggcgtatggcgcagcttctgcgcgaggagataagtaatatcgagcggcagataaaagcacatatcaaagccagccctgcactgaggcgtgattatacactgctgacctcaattaaatcggttggtccccagttggggatgcatatgctgatcgtgcttcgcagccataactttgtatcggctgagcaggctgccgcctttctgggcgtggtgccgatcgagaaacgctcaggcacatcggtccggcgccggccgcggatgtcgaaaatcggcccccctcagttgagagcgaagctttacatgtccgccctgtgcggaaaaatctacaataagcgaatgcgtaatatttacgatgagatgtgcctgcggggtaaacctaaaatggtggccattggcgcgctgatgcggaaactggtgcactggtgttatggcgtcctgaagaccggaaccgtttttaatgacgaagacctgaaaccggtactgtcaacctgactataccaggctggcattaaacacaaggtaacgctcactgcaataagtgagcgcagtccgttatgagcgaaaagcaga

SEQ ID NO: 251 - DNA, 1658 bp, unidentified
  source 1..1658: mol_type = unassigned DNA; note = element_ISL4
acatactaacctagtgttggatgattactcgacggagtagtcgttcaacactttttcttttactatgtaaagtggagatgaagccaatgccgtgagctctttggacacacgatgtcgtaaataaaacgggcagcttcaccattcaattgagaatctcgtctaagtatgttgactgttaaagtcctgttgagaaaattagatctaattgaattgggtgaaggcagctcatctccgagtaaagcggaggtttattcttatggatttattgaaaactgttttcggtattgatgttagcagccggaagtctaacgtatgcattatggtcaatggcaaaaaagttaatgactatgccatctccaacgatatggtaggcttcaatcggctgataggtgaccttaagcaggttactaaaccgcagattatctttgaagcaactggcgtctattccagaagactccaggcgttcttggacatgcacgaattgcgctatgtcatgacgaatccgctagaagccaaaagaaagacaaaggatgacctgcaccagaacaagaccgataagcttgatgccttgcatcttgccaagctgcagtctgagcacccgcaacggctggcctacgttcaaaacaaagaatatcaagaattgatggccaataaccgcatctatgaacaggcttcgcacgatctgataaccaacaagaatagactgcacaaagcagttcagctcactttcccagagattgaacacttactggctaatccgagagggaaaaactactggagtattgctctcagattcccacatccagatatcgtactagaaacaaaagaagccgatatcatcgacttcttaaaaggcttatctggtattggtaaaaagcgcgctaatgacataacgcaaaaccttattcgtttggctaaagtcgcatgcccagcggtcaaaaagaacagtgctcatattcgtggcctcaaaatggctattaacaacattctgagcgctgaagaagagtgccagactgctttacaggagatggcaaagctggctcctaaacgggatctggagatcctcacaagcattccaggcatcggcgaaaacactgctctaagaatcattagtgagcttggggatatcagacgttttaacaaccctagccaattaaatgccttcgttggtgttgatcctcaagtttatgaatctggcaatctcacggcccacctgtcaatttcaaagcgtgggacggctattggcagaaaggtgctgtacttggccataaaccaaattcagtcggctaagaaagtgggaaacccttgtcatattgcggattattacgagaaacgaaaacggccttctgagactgcaagtcacaagaaggccgctatcgcatcgatccataaattattacggacgatcttcgctttaattaagaatgatcaattgtatagctatgacgtagccaaacataaccaaagacttttgtcataaaaattgatccaatagatattataacagcctcttttttgaaattacagaaggtggctgtatttaccatgccctaaatcagatatttgtcttgattctccgggagctatttcccgattaggcccttatttcaaaataaaattgcctaaaatcgttgataacacttgacttagagtagaaa

SEQ ID NO: 252 - DNA, 1660 bp, unidentified
  source 1..1660: mol_type = unassigned DNA; note = element_ISLhe4
catactaacctagtgttggattatgaatcgacggattcatgatctggcactttttattttgtctaaaatagaaagtgaagataaagcaaataaagtcttggttcttttggacgtgtaacgtcgcaaagaaaacggactgctttaccgcctatttataagtctcttcgaagtctgtgggcacttgacgccgagttcagaaaacgagaattaataggttgataaaactgtttgtcttcacttggaggttagaatgatgaaacaaaatattatctttggcattgatgttagcagtaaatcgtctacagtttgtgtagtaattgatcgaattaagcaaggtgaaacctttaagattactaatgattcctttggctatcaagatctattggatcgtttaaatcaatacttgatcacgcctttagtagtttttgaagctacgggagtttattcattgagtttacaggcttttttagaagattatcatatcaagtatttaaagcttaatcccttaaaggctaagaagctgatggacaataatctaaggcataataaaaccgataaagttgatgcttatcggttagctttaattcaattcaatgcgccacaaaaattgcgtgctcctcaacctaaggaatatcatgaactgcaaaatgcgagtcgttattacgaagagcttgctcaagccctgataatcaataaaaatcagctccatcgtaatttgcagtctgcttttcctcagatagagagtatcctttcaacttcatctggcagagtttattggacgattgtcagcttattcccgcatgcccaatatgttttaaatcacaatgaaaaccaggtctttcaaagtttattggccatttcaggaattggcagacaaagagctcattatttaacaactaggctctatgccttagccagacaagcttatccatatgacaatgaaagcagtattactattcgagcaattcagcgtaatattgccaatttgctttctctaagtgccgaaagagataatgtgatcaattatatggaaaagcttgctatgcaagcaaatgcacggtctttgaatatctatgagagtattcctggcattgccaaaactactgctgttaggttggtagccgaattaggtgatttaagacggtttgatacttcagcccaaattgatgcctttgttggcattgatccaggccgctatcaatcaggtgaaaaggacagtcatttaggaataaccaaacatggcaatcacttagctagaaagattctttatcgaacaattactcaaatggaaactgtcaaagctactcagccttgtcatatcactgattattatgataagaaaaaacgatcttcaaatagccggggctataagaaaatcgccattgcatcagttcataaactgatacgtacaatgtttgctcttatcaaacatgatcaattatatgattacaacgtagccacacataaccaaagactttagttgaaatcaaatgatcaacttcagtataacaacctatgaaaaaactacaagtactcataggcttatttgtgttacatataattattaataaatttagttttctaacttaattagcttcattcgtaccaataattctaataaaataatctattaaattattgatattacttgacttaaggt

SEQ ID NO: 253 - DNA, 1610 bp, unidentified
  source 1..1610: mol_type = unassigned DNA; note = element_ISLin1
caacgcgattcatagattagtatgattcttggacgtaagacaagtcgaagtgtgatactcttgaatcgacggagtcaagaaggccggtggcagattgatcgctctcttggggctttgtaagaccccgtttcatagatgaatccaaatcggccaccgcaaaccaaagtgtggcgactcaacaaagtcgaccgcgtataggagtgctggtgttatcacccgactttgttaagtccttccgcctctttcattttaggagaaaagaaatggaaagtcaagaagtcaagtatgtaggagtcgattgtggaaagaaaagtatagaggttgttcgaatcaattcggaaaactcactcgaacgtagacaattcagcacaacggaaagtggtattaacaatttattacaatggttgaccttgaatgacattgtaggtctggaagcaggatctcaatcttttagaattgcaaaatcaatattaaacaaaggggttcaagtaattgtcctgaacccgggtaacctggccacaatctatcagtcgttaaaaaaaacagataaagaagactctctcaagattgcgagactcatacaacgttttccaatagaagaattacctactgttccgattccaaatgatgaagaggaagacaatagaagactatgcacggaacaagagaattggacaaaacaactaacgcaaggaaagaatcggcttcatagtttattcacccaagccggtttgactcagatcactaaaaagcatttaagaacaaaagcaaatagagaaatctctgtagccttacttccaagtcgataccaaaaagaagcggaaagaatattaaaagttttagatttagtggaacaaaatctaaaactcatagaaaaagaaattcaagaagctctcaaaaaaaacaaagcctatgttcagacgatcatgtctatgcctggaattggaatgattacttctttggcgattatgagttacatgggtgattgtaaaagattttcttcagctaaacaagcggcttactacgctggtttggttccgagagttgacatttcaggagacacggttcgatacggaagaatcataaatcgaggttgtcattcaattcgaagggtgattgttcaagcggcttggagtctggttcgttgtcaacacggtggtaaggtaaaagagttctatcaaaggttataccttaaaaaaggtgctaaaaaatcgatcatcgctacttcacgtaaaatgatcgaagttctttacgtaatgattcgaaccggaaaacttttcgattctatgcctgaaaatatattaaatcgaaaattaactcaatatggtcttatgtaaaaaaaataacgggagggcttgacacaagaaacataggagagagcgttgtgttgagttttccctagattttgggtggtggggtgggaggtggaaaggcttggaaaacttttctctatcagaaaaacatactttttgcaagtaaaaagactcattcttgtcggaacacttgaaaaatgtgcctttttgaacccagaacggcgatccatagaaagcccgttctgttgagttcattctgattttaaaatcctattcaacttgtggggttggttatgg

SEQ ID NO: 254 - DNA, 1427 bp, unidentified
  source 1..1427: mol_type = unassigned DNA; note = element_ISLxx2
gatagtgagactgttcgtgctggtgttctcgggggtcctgaccctcacagcgatggacgcgcaaggatgctggtgccgcgtgttctcaggggttcctgactctcacgccgatcgacatctgctgtctttccacggatctgtcggtcccctgagaacatccggtgaggcgtcacgcctcaccgccggagtgacttaaggagagcctgcgccaacaggtgctcatcactgtcttgtccgccggtctggtggtgcgcggtgccgttccccgcccatgcgaacagatcggagcacgacatgaccatcatccccgacaccggcaagcaacctcaatcacgaacgtcggtgttcgccggcgtcgacacccataaggagatccacgtcgccgcggtcgtcgacgagaccgggacaatcctcggaacccacagcttctccacgactcgcgcgggttatcgggccctgctggcatgggtgcgcagtcaaggcgcgttggtgcggatcggaatcgaagggacgggctcctacggcgctggcctcgcccggcatctcgcgaagaacgaggtgacgatcctcgaggtcgaccggccggatcggtcagaccgacgccggaaagggaaagacgatgacctggacgcgatcaatgccgcccgcgccgcactgcacgagcgccgtacaacgatcccgaagtccaaggacggcgcggtcgaggccctgagaatcctgcgggttgcgcgagcccaggcggtccgtgaacgccgcaacacattgcagctgctgcggatgtcgatcgtcgccgcacccgacgaggttcgtgaccaggtacgcaacctcacccgtatgcagctgatccgccatctcgctgcctggcgtcctgacacctcgaacgcgaccgatcccgttgtcgcctaccgggtcgcgttgaagtcgttcggccgccgctatatcgagctcaccgacgagatcgtcgaccttgacgacctgatcaaccccatcgtcgagtccctcgccccccagctactcgaacgcgtcggaatcggcatcgaagtcgccgggcagatgctcgtcaccgcaggcgacaaccccgagagcatgaagtccgaagccgcgttcgcgatgctctgcggcgtctccccgctacccgcgtcctccggaatgacccagcgacaccgactcaaccgtggtggcgaccggcaagccaaccgtgccctccacctcgccgtgatcagcaggctccggatcgacccgagaacgaaggcctacgcagcgaagaagaccgcggaaggccactcgaagatggagatcatccgttgcctcaagcgatacctcgcccgcgaggtctacttcctcctcaaccccggcatcaaacacatcgccccgaataccaaaccgaggaaaatcgccgcttgactcttaggagagcatccgcggca

SEQ ID NO: 255 - DNA, 1535 bp, unidentified
  source 1..1535: mol_type = unassigned DNA; note = element_ISMac14
ataaaacgcatatgaaattcttcgaataacatgcacaaagaaatgaaagtagttttttttccttccctttttatcgatcaacctcatcattctctttggcagtaaggttgtacttattttggttcttcgaagccgtgataaaactaaccagtgaattgccatcgaaggctcaaatgtgactttgatcacggatgctaaattggcctttgaggcaattctactgcccaaattaatttggtgatctaatttggtgatctaaattggttgaggttataaacaaagcttgtggtttagacattcacaaactctttttcattgctacaatcctcagtagatctggtgaaaaacagcaacaacatttctatagaacccctgacgaaatattagcttttaaaaactgggttatctcagagaactgtgacgttgttgcctgtgaatcaacgagtgacttttgggttccgatttatgatgcgttgataaaacatctacctgttatagttggaaatgcccgagatatgaaggcgtttacacacaaaaaaacagataagatcgattccgaattcatcgcacaacttgcattgaataatatggttcaaccatcaagagttttcccaaaaaaccatagaacatttcgttcatgtattcggcttcgccataaccttgtacaaaaaagaacagatataaaaaatgaagctcacgccatactcgcacctgaaatgtttagtctgaagaatgtgctaacagatatttttggtaagagtggtagagcaattctatcaggaatttgttcaggtaaaagcgttgaccagattattgcaaacctttctccaaatgttcgtaagaaaagtaagcagataagggaaattctggacagagaaatctctcaagatactgcattcaggcttcaaatctgtttggatatcataaagcatcttgacaatgaaatcaaaattttggaaaaagaaattttcaattatgcttataaaaatcataagcaagaaatggaaattttaatgtctgttccaggaataggagaacttggagcagcaactcttactgctgaaataggcgatttcaaagatttttcttcaggagataagcttgcttcatggcttggcctagttccgaaggtgtaccaatcagcggataaataccataacggtagaatcactaagagaggatctaaggaagcaaggtggatcctaacacagattgcccaggcagcagcaagaacgaaaaatagcaggttaaaagaatttttcaacagaaaaaagaagtcgattggacattcaaaggcgattatcgccctagcaagaaaaattgcaacaattatctggcatttgattacaaaagaggagatgtatgaagatgaaactggatataaaaagggagaaattcaaaagagaaagatagttgagactgagatgttctcagttgatgaaaggatcaaaataatgagtgaaatatacgtaattgcgagaaatgacgaaaaagagagtacgtgaggaagatctcctcatatactttcatgctaa

SEQ ID NO: 256 - DNA, 1300 bp, unidentified
  source 1..1300: mol_type = unassigned DNA; note = element_ISMae40
tgtatcttgagaagtaggcaacccgtcccaacctaggtaaaaaataccgctttgtagcttgggtgcctatattctgaaaaagggcgtggacatccagttcaaccgaggtgcttgacaccgttgggtagccaccggagccacgccgtcatcccgatgagacaagctcgaacaatcgctggaggattaacctcgtattcgcaaggacgagttaccaaagggacaaaataacttaaccccagcataaacgatgacagaagaaaaaacatgggtagggatcgatgtcagtaaagaggttctagatatctacgtgttgccgcaaggtctgaccttgcaacaacccaacagcgaggttggcgttcaatcgctgattgaacaattacatcctctctcaccgagtttggtggtggtggaatcgacgggtggattagagcgcgcgctcgtatcgggcttacaagccgccacaataccggtagcgatcgccaacccccgcaaggtcaaagggtttgcgacggcattggggaaagcaaaaacggacaaattggacgcacaggtaatcgctcaattcgcacgagccgtgcaaccccaaccccaacccgtggttgccccccaagcccaacaattgagcgacctagtacgacgacgacagcagttggtggagatgcaggtggcggagaaaaaccgcctcagtcgtgcgtctgagacggtgcaactagatatcaaagcccatattgaggaaatccaacagcgtattgaaagcctcaacgagcagattcagtccctcgcccaacagcaagccgattggcaacgcaaaaatgaaatcttacaatccgttaaagggatcggcaaagtttcatctgccctatgtttggcggaattacccgagatgggaacactctcggaaaaacagattgcccggctggtcggggtcgctcctatcaaccacgatagtggccagcacaagggtaaacgcatgatttcggggggacgcacctcggttcgctgtggcttgtacatggccacattggtagccattcgtcataacccggtgattcggaagttctacgaacggttgttgaccaatggcaagttgaaaaaggtggccttagttgcctgtatgaggaaattgctggttatcctcaatgccatgattcgtgataataaatgctggcaagcacccgcttagtccagttttccgaacaatttcatcgctgacaaaacggatgactggtgccgttactttgtcttgcctatttggggtacaaaagattttctttattccccttgacttttaagacaatcg

SEQ ID NO: 257 - DNA, 1582 bp, unidentified
  source 1..1582: mol_type = unassigned DNA; note = element_ISMahy12
tactgattgagccttctccccagcccagcggttgcccgctaagctggaaggcgacgaagcactacaagggagaagactcatgaacttttaccatagcacccaccgccattattgtggaatcgatctgcatgcccgcagcctgtatgtctgcatcatcgaccaacagggcgaggtacttctgcacaaagaaatcaaagctcgcccggaaccgcttctggccctgcttgaaccgtttcgtgatgacctggtgatcggtgtcgaatgcatgcactgctggtactggatctcggatctgtgtgaagaacacagcattcactttatcctgggccatgccttgtatatgaaagccattcatggcggtaaaaccaagaacgaccgcatcgattccttcaagatcgccatgctcatgaagggcggcaatttccccctggcctacgtttatcccaaggagatgcgggccacacgcgacttgttacgccgacgcacccgcatcgtccaacacggggccatgctcaaagcccatgtggtgaataccacgagccaatacaacctgccgcccaacaaggccaacctgaagaatatcggcgcccgggaacaggttcgggcgacgtttgccaaccgggatgtccaacacaacatcgatctcgacctggcgatcatcgagtgctatcaccgggaactcagcaaactggaagatcacctggaacagcaggccaaacaacacgatcccacttccctgagtgtgctgaagactattcccggtgtggggcgcatcttggcgctgaccattctctacgaaatcggcgacatccagcgctttgaatcagtccagaagttcgcttcttacgcccgactcatcaaatgcaaagccgagtctgccggcaaggtttacggaacccagggcaacaagatcggcaatgcccacctgaagtgggccttctcggaagcagcggtgttgtacctgcggggcaatgacaaggcccagcgctatctacagaaactccagaaacgcatgaacaaacccaaggcgctgtccgcgctggcccacaagctgggccgagctgcctacttcatgctcaagcatcagagggtgttcgatgaacaacaattcctgaagggttagtcacgccacggggtgagcatgacgtctaactggatcaaacaggatgatgaccgaaagccgggtgtccgctgactggtactcgataccaaaccagccttctatcaccgccgttgaagccagtcgctttgattagccaccccgtgggcgtgccttaataccatgagccagtgcgcttacaccgatcctgagcctgaccctaactggagctatgcagccagatccttgaatagtgccagtgatcggttaaccgatgaatgtctggtgcccctaacccaccgatggaacgaccggttaggctgtggtctaaagccacgtaagagagcccctatatgtgtttgctgtgagtgcctgacagccctacgagactgacgaagcaggcgttctcgctcatgggtttaggttggccgctgccgcggccaaaaaaccactattgcctattgattcagagaaggctcatat

SEQ ID NO: 258 - DNA, 1354 bp, unidentified
  source 1..1354: mol_type = unassigned DNA; note = element_ISMass1
taatgagatggtcaccctccaccctacaagttactaagcttgtagggtgttttcatttttggacggaggccatcatgcaagacgtcgctctcatcggcatcgatctcggcaagcacggctttcacgtgcacggacaggatcggcacggcaaggcggtgttgcgcaggaagttcgaccgcaagcacctgatcacgtttctcgccaacttccagccttgcacgatcgtgatggaagcctgtgccggcgcccactggatggcgcggcagctgtcggcacttggccacgaggccaaactcatttcccctcagtttgtccggcccttcgtcaagggcaacaagaacgacttcatcgatgcagaagcgatctgcgaagcggccagccggccatcaatgcgttttgtcacgcccaagactgaagcccagcaatgcctgtcggccctgcaccgaacgcgcgagtcgctgatgcgcgaccgggtcaaggcaatcaaccagatccacgcctttctgctcgagtttggaatcggcctgcccaaaggcccggcaatcatacggcgcctgccttccgtactggcagagcacgctctgccagtacggctggtcagcctgatcgagagactgcgtgcccacatcaagtatctcgacgagcagctcgacgagctcgaaaaggagctgggcaggcaactgcaggaagacgaccttggacagcgcctgatggcgattcctggcgtcggaccgattactgcgagcgccttgtcggccgagatgggcgacggcaagcaatatggctgcggacgcgatttcgccgcctcgcttggcctggtgccccagcagcacagtactggtgggagagcgaatctgctgggcattagcaaacgtggcgacaagaatatccgacgcctgctggtgcaatgcgcgcgatcctacatgcgcggtttggaccggcataccgaccgcctggcgcagtgggcccgctccatgctggagcgacgacactccaacgtcgtggcgtgcgcactggcgtacaagctggcccgcacggcctgggccatggccgcacaccataccgaatacaaaatgcaagaggccgtcacatcgctgtgacggcctcccgagcttgctgtacctaaccacctacttggttttgcgacgctgatactggatgacgtgaacggcacaccggcctgatggataacctggcaaaaaaatcggctcatcaagccgcaggtttttttaggaccatcaggcgcgaactctcatcgtggcgcggagcaagtctccagcatgacgccggatagatttgagcaagccaactacatcatacaaaatcagcttgcaaaaaggagggtggccataga

SEQ ID NO: 259 - DNA, 1519 bp, unidentified
  source 1..1519: mol_type = unassigned DNA; note = element_ISMba20
aaaacgcacatgaaattcttcgaataacaggcacaaataaatgaaagtagtttaccccacattttttgactattgatctcctcattaccttgggcagtaaggttgtcttgtttttggtttatcaaaaccgtactaaaactaatcagtgaattgccatcgaaggctcaaatgtgactttgatcatggatgctaaattggccttttaggcaattccactgcccaaaccaaattgggtgatctaatttgattgaagtcataaacaaagcttgtggtctagatattcacaaactctttttcattgctacaattctcagtctatctggtgaaaaacaacagcaacgttttaacagagatgatgagggaattttagcccttaaaaaatgggtaatctcagaaaaatgtaatgttgttgcatgtgaatcaacaagtgatttctgggttccgattcatgattcattgataaattatctacctgtaatagttggaaatgcacgagatatgaaggtatttactcataaaaaaacagataagatcgactcagaagtcattgcgcaacttgcacttaataatatgattcagccatcaagagttttcccaaaggatcagagagattttaggtcatatgttcgacttcggttaacacttgtacaaaaaagaacagatataaaaaataaagctcactcaattcttgcatctgaaatgttaaacctgaagaatgcactgacagacatttttggcaagaatggcagaatgatcttatcaggaatctcttcaggtaagagtgttgaccagattatagcaagcctctctccaaatgttcggaaaaaagctgctcagataagagaaattcttgatcgagaaatctctcaaagtgctgcattcagacttcagatctgtctgaaactcataaagagtcttgatgatgagatcgaagctttagaaaaagaaattttcaattatgcttatcaaaagcataaaagagaaatggagattttaatgtcagttcctggcataggagaacttggtgctgcaactctacttgctgagataggcaactttaaggatttttcttctggaaataagcttgcttcctggcttggtctggttcctaatgtgtatcaatctgcagataaataccacaacggaagaatcacaaagagaggatcgaaaacagcaagatggattctgacgcagatttctcaggcagcagcaagaacgaaaaatagcaagttaaaagagttttttaacagaaaaaagaagtcaattggacattccaaggcaataattgccttggcaaggaaaattgcaacgataatatggcatcttatcgtaaacgatgagatgtacgaagatgaaactggatataaaaagggagaaactcaaaagaggaagattgtcgagaccgagatattttccgttgatgaacgaataaaaataatgagtgaaatatttgcaataacggaaaaacagaatgaagagagcacgtgaggaagatttcctcatgtactttcatgctaaa

SEQ ID NO: 260 - DNA, 1522 bp, unidentified
  source 1..1522: mol_type = unassigned DNA; note = element_ISMba7
aaaacgcacatgatattctttgaataacacgctcaaatcaatgaaagtccttttaacttaccttttttgtttatgtgctccatcattctcttaggacagtaaggttgtcttctctttggttcttcgaagccgtgaaaaaactaatcgttgaattgccatcgaaggctcaaatgtgaccttgatcacggatgccaaattgcctttgaggcaattccactgtccatggaaatgatggggtaatataaattggaaggggaaataaacaaagcttgtggtatagacattcacaaaatttttgtcattgctactattctcagcagatctggggaaaaacagctacagcgttttgagagagatgatgagggaattttatcccttaaaaattgggtaacatcagaaaaatgtgatgttgttgcttgtgaatcaacaagtgacttctgggttccaatctatgaatcattgatagatcatctgcctgttatagttggaaatgctcgagatatgaaagcatttacacacaaaaaaacagataagatagattcagaattcattgcacaacttgcattgaataatatgattcagccatcaagagttttcccaaagaggcacagagaattcaggtcatatgttcggctcaggttaactcttgtaaggaaaagaacagatataaaaaatgaagctcatgcaattctatcttctgaaatgctacgtctaggtgacgtactgacagacatttttggaaaaaatggtagagcaattctgtcaggaattgcttcaggtaaaaatgttgatcagattatagaaagcctttctccaaatgttcggaaaaaaactgctcagataagagagattctggacagagaaatctctcagagtgctgcaatcagacttcagatctgtctaaatctcataaaacatctggatgatgaaattgaaactctggaaagagaaattttcaattatgcttatcaaaagcataaaagagaaatggaaattttaatgtcagttccaggtattggagaacttggtgcagcaactcttattgctgaaataggaaattttagtgattttccatcgggagataaacttgcttcatggcttggaatagttccgaatgtgtatcaatctgcagataaataccacaacggtagaatcactaaaagaggatcaaaagtagtaagatggattctaacccagattgctcaagcagcagcaagaaagaaaaatagcaggttaaaagagttttttaacaggaaaaagaagtcaattggatatgccaaggcaattattgccttggcaaagaaaattgcaacgataatatggcatcttatcataaatgatgagatgtatgaagatgagaccgggtacgaaaaaggagaagttaaaaagaggaagattgttgagaccgagatattttccgttgatgaacgaataaaaataatgagtgaaatatttgcaataacggaaaaacagaatgaagagagcacgtgaggaagatttcctcatgtactttcatgctaaa

SEQ ID NO: 261 - DNA, 1631 bp, unidentified
  source 1..1631: mol_type = unassigned DNA; note = element_ISMch4
gtagttgccgtgttgcccgccagctcccgtaatcgagacgaggagacaggctcatgcgggttgtgggattggacatccaccgcgttttcgccgaggcggtgatgctgtagaacggcgcggtccggcgtcttggtcggatcggcatgacgcgcgatcacctgacggcgttcgccaagacgctgacgcacgacgaccatgtcgtggtcgaggcgaccggcaacgccagcgcggtcgcggaggtgatccggccgcatgtcggccgggtggtgatcgccaacccgcgccaggtgcggctgatcgccgaggcgcggatcaagaccgacgtcatcgacgcgaccgtgctggcgcggctctatgccagtggctttctgccggaggtctggatcccggacgaggcaacgcttgcgctccggcgccaggtcacacgccgcacccagatcgtccggcagcggacgcggctgaagacgatggtgcagtcgatcctgcatgcgcatctcgtgccgccctgtccccacgcagatctgttcgggccgcggggacggacctggctgctggcacagccgctgcccggcgacgagagcgatgccgtcgcccggcacctgcgtgagtacgaccggctgagtgaggacttgaaggtcgtcgagcgtgaactggcgcgcgaggcccgcgccgacgcgaacgtcacgcggctgatgacgatcccaggcatcgacctggtggtcgccgtcgggctgatcgccgccatcggacccgtggcgcggttcgccggcccggatcggcttgtggcctatcttgggctgaacccgagcgtgcatcagtccggatccggcaagccacggcatggacgcatcaccaagcaggggcgcagccacgcccccacgatgttggtcgaggcggcttggcaggcggcgcgggggcccggtccactgcgcgccttcttccagcgcgtgtcggcgcgacgtgggcctcacgtcgcggccgtggcggtcgcacgcaagctggcggtgatcatctggcacctgctcacacggggtgaggactacgcctgggtgcgtcctgcgctccacgccaagaagctgcgggaactggagctgcgctcgggcgagccggcacggcgtggtcagcgcggaacggcctacgcctacaacctgacccgcgtccgacaggaggagcggcggcgtgtcgagcaggcggaggtcgcctaccgacacctgaccgagggctggagccggcgtgggcgacgcgtacccacgggcgccgcaaaggaggagcgactatgaagacggcgcggccgggcttgcgcctcgaacccggctcttcgtcacgcggtcgcccgtgagcggcaacaaaatagcacggatcgcaacaaggggactgttcaacctcatccgtcgtccaagggtgacgcggcttggtgaggcgatgctcgatgtcgaggtcggcgcaggcgccctcgaaggagtggcaccgaaagagaatcttatcggcgcgcatctgcttgatctcggccggcgtccaagtctcgccggagggatcggtgaagtgcgtgccgttatcggtcagcacggtgaggatcttgtagggaacagcggcagcaagggcccggaggaagtcgccggcaacacggcggg

SEQ ID NO: 262 - DNA, 1186 bp, unidentified
  source 1..1186: mol_type = unassigned DNA; note = element_ISMdi10
gcgctgatcgcgacccggcgggcggcggtgccacactggggtgcgatgcgggcggcggatccgcccgctgtcacctcgggaggctgctatggcgcactacgccgcgttcgacgtctcagacaaggagaccgctatccatgtgctcgacgagcacggcaagctggtgtggaagggcaagcggccgagcgagccggaagccttagccgaagcgctgcggcgtcatgcccccgaactggtgcgcgttggcctggagacgggccggctcgcgccgtggctctaccactcgctcaaggagctgcgtgtgcccgtcatctgcctcgatgcccggcatgcccgggctgcgacggccttgcagcggaacaagaccgatgcgcgcgatgccgagacgctggcgcagctcgtgcgcgtaggctggtaccgggaagcacgcgtcaaaggctgggccgcgcacgccgtgcggcatctgatcggcgctcgcgcccagcttgtcggcatggcaactgatctgtcgaaccagctccggagcctgctcaggaccttcggccggcgcgtgacaggccgggccggaggcgccttcgaggcgagggtgcgcgagcagatcaaggacaagcccgagatggatgccgtggccgagccactgctgacggcgtggcgggcgatacgcgaccagattgccgttctcgaccgcaggctgatcgaagccgccagagacgatgcgacctgccggctgctaatgtcctgcccgggcgtgggtgtcgtcgtggcggcgagcttcgcggcggccgtggaggtgccggagcacttccggcgctcgcgctcggtgggggcgtatctcgggctgacgcccaggcgccgtcagtcgggggagagcgaccacagcacaggcgtgtcgaagcgaggagacaagctgctgcgcagctacctgttcgaggcagcagccagtttgctgatccgcgtccagcggccatcggcgctcaagacctggggcgttgggctcgtgcagcgcctcggattcaagcgggcggcggtggctgtcgcgcgcaagcttggcgtcgtgttgcacgccatgtggcgggcgaacagaccgttcgaggcgtggccgagcgccgtcgctgcggcggcctgagccgcctgacccgcagttccgccataggcggacgcaagcgtccccgccgggacgtgacgc

SEQ ID NO: 263 - DNA, 1371 bp, unidentified
  source 1..1371: mol_type = unassigned DNA; note = element_ISMdi12
tgatggactggatgcccccacccggcggaggccggtaatctgcgtctcgggggctcaccatctgccggagagcgcaccatggatccgatcgcaatcgtcggcctcgacttggccaagcgcgtcttccaagtgcacggcgcgcgcgccgatggcagcatcgtcctgcgcaagaagctgtcgcgcccgcaggttctcacgtttttcgcccacctgccggcctgcgtcgtcgccatggaggcctgcgcctcggcgcacgagtggggacgcgcgatccgcgaactgggccacgaggcccgcctgatcccgcccgtctacgtcaagccgctcatcaagcgccagaagaacgacgcggccgacgccgaggccattgccgaggcggccctgcgcccgacaatgcggttcgtggcggtcaagagcgagagccagcaggctcgtgccatgatcttccggacgcgtgatcttctggtgcgccagcgaacccagctgatcgatgcgttgcgcggccatttggccgagcacggtgtcgtggcgtcacaaggagtgaccaacgtgcagcagctcgctgcagcggtcgacgacgtcgccacgtcgctcgatccgctcgtcgtcgatttgagccgcctctaccacgaccagatccgggatctcgacggtcggatctcggagttggagaagcgcgtcctccaagaagccaagcggaccggcgtgacggcacgcctgatgacgatgccaggcatcggtccggtcaccgcgatggcgatcgagacgttcgcgccgcccatggagacattcaagcgtgggcgtgactttgcagcctggctcggcctcgtgccgcggcagttctcatcgggcggaaagccggtcctggggcgcgtctccaaaatgggccagcgcgacatccggcggcttctgatcatcggcgccataatggtcgttcggcggtcgacccgcaaaggcgcaccggcgggctcgtggctggccaggatgctggcgcgcaaaccgcgcctggtcgttgcgatcgcgctggccaacaagatggcccgcgcggcttgggccatgctgacgaagaacgaagacttcaaggttccggtgccgacggcttgatcgctcgatgaatgttgtagcttggcatcggtgcgtgggaaggttgaagagggttaaggacggaacgatcggtcagatcgggatcagaaaagcaagactggttgacgagccttgagctcgcttgtgttgatctgcacctgatccgcgcatctccatgctggcccgcggcatggacatggccgcgacgagaggcctgagacatgaccgcacccgatcctacgtcgttaccgctcaacaccctcttgcgcgacggggggcatccagaca

SEQ ID NO: 264 - DNA, 1315 bp, unidentified
  source 1..1315: mol_type = unassigned DNA; note = element_ISMdi14B
tcgggtaatgggcggcagctcttctgcggaagtcgataggatcggctccgctgccggaagaggaggctgattatggagtatttcgctggcctagatgtctcgatggaggagacgcacgtctgcgtggtcgaccgcgacggagtagttgcccatcaggcgaaggtggcctctacgcctgccgacatcgcgcaggaactcgcgaaggcgcctgcctgccgtcgggttgtgttcgagacaggccggatggctccaatgctgttccacggcttggccgaccatggtgtgccggtcgtctgcgccgagagccggcaggcttaccaagccttgaagtcgcttacgacgcacaagaccgaccggaacgatgcgcgcggtctggctcatctggcacgaacaggcttcttcaagccggtgcacgtgaagtcgctgccggcacacgccgtgaggtcgttgatcatcgcgcgcaagaagctggtcggccagcgggtcacgctggagaaccagatccgcggtcttgccgtcgtgttcggggtgcggctaccgcgggcgctcagccctgcgttcatcgagcaggctctgcgttcgagcgaggggatcgctggactgtccgccgccatgcgcggcctgatcggagcacgagctgccgtgctggcagctgtcgccgccatcgatgcagatatcaagcggatggtccgagcctcagatgcctgccggcggttgatgacgatcccgggcgtcggtcaactcaccgcgctcgctttcacggcagccgtcgatgatcctgagcgcttcaggcgctcccgcgacgtcggtccgtatcttggccttgttccgcgacgctaccaatcgggcgaggtcgactacaccggtagcatctcgaagtgcggcgaccggcgggtcagaacgctgctgtacgaagccgccaacgtgatgctgacgcgctgcaggcagcccctgaagctgaaggcttgggctctggccatcgcgaagcgctctacgatgcgcaaggcccgcatcgctctcgcgcgccggctagcgatcatcatgcacgcgatgctgcggcagggcaccgagttccgacctgcgtagcggctgacatcaccggacaggaggccgaaccgagctcccgagcgggagcgacgcccgagggagggagcagaagatggcgccgattctgtagcatgcggccttgcgccgactgcgctttcaaccgagccgctttgcacccagctgaccccatcaagtgccgcacgagcacgtagagaacgcaggcacccgaaagcgtcgaacgctctggattgagctgccgcccattgac

SEQ ID NO: 265 - DNA, 1399 bp, unidentified
  source 1..1399: mol_type = unassigned DNA; note = element_ISMdi9
agatgccgtaatgggcctgccgccggcgagtagcgaggcggggcggctgtccctcagagtgatggtgtgtggcacggggttcgagaggctcggccccaagcatcatcgagggatagccatggactactatgtcggaatcgatgtcacgctagaactcagcagcctctgcgtgctcgatgccgcaggccagattgtctgcgaagcgaaggtcgccagcgagcccgaggcgctgatcgggtacctgaccaggctcgctctgccgctgacccgtatcggcttggaggccggcccgctgtcgcaatggctgcacgccgccctggttgaggcggggtttgcggcggtgctgctggagacgcgtcacgtcaaggcggcgctctcggccatgatcgtcaagaccgatcgacgggatgcgcgcggcatcgcccagctcctgcggatgggttggttccggtccgtgcactgcaaatcgccgccggcccaggaggtgcgggcgctactggtggctcgaaagcagctgcaggccaagatgcgagacgtggaactcagcctacgcggcctcctgcgtggttttgggctcaaggtcggcgagatcagcaaaggccagttcgccgcccgggttcgtatgttggtcactggtcacagcatgctggagcgggtagctgaggcgatgctgcaggcacgcgaggctctccgagcggagttttccaagctgcaccgggccatgctggcgatcgtgcgtacggatgaggtctgccggcgtctgatgacggtgccgggcgtgggggcgctgatcgccgtcaccttcacctcgggtgtggatgatccggcccgcttccggcactcaaaggatgtcggcgcgcatttcggcctgacgctgcgcaagtaccagtcaggcgagacggacatcacgggtgcggtcagccgcgtgggcgacgtgatggtgcgaacggccctctacgaaggcgcccacatcctgctgacacgcgcggggcgcttctcagccctgaagcgctgggcattggaggtggccaagcggcgaggcatgaagcgagcgaaagtcgcgctggctcggaagctggcggtcgtgctgcacagaatctgggtggatggcaccagcttccgctggggcagtgagagcctgccagcctgaaggaggcaaaccgttcggagcggggcagacccgtcctgctcatctgaggtcccgtcgccgggacgcggggagcgacaaagccgtggctaaggccgtaaacgttcttcggaacggaatacgcaccatagatgagcttgccgcccctgtctgaccgcatgatgtggcggcacttcgctgaccacggacagaagcacgacgccggcgacgtgacgatcactcgggacttgacgcaacacgacccattacaga

SEQ ID NO: 266 - DNA, 1418 bp, unidentified
  source 1..1418: mol_type = unassigned DNA; note = element_ISMex12
ggcggtcatggccgatcggtaggtctctagagtgacggtgttcgaagcctcattccggagacggatcgaccatgatcagaccacagcttacgccgccggccggcgttctcgtagccatcgacgtcggcaaggcccgcaacgaggtcctcatcgaggtgcccggctccggccgacgacgccggttgagcgtcctcaacacccgcgccgagcacgaccgtctgatcgcgctgctgtcgaacctcggtcagccggtgacctgcggcttcgaggccaccggcaactatcaccgcccgatcgcctggcgcctgctccaggccggctttaccgtgcgcctgatctcctccgtcgggctcgcccgcacccgcgaggccctgcacaacggctgggacaagaacgacccgaaggacgcccaggtcatgctgcacatgatccgcatcggcgcctcgcaggtgtaccacgacccgctcgccgccggtttcaacgacgtgcaggaactgtccaagacgcacgacgccgtctcgcgggccaagaccgaggtgctgcatcggatcttgacccactacctgccgctgtacttcccggaggtcgaccgcttccgccacaacagccgctcggactggttcttcgccttcctcgatcgcttccccacgcccgccagcatcaccgcgctgagcaaggaggccttcatcgctgccgcctgggatgtcgtcgggcgcaaggtcgccaaggcgcaactgctcggcgacatctacgagacggcccgcagctctatcggcctgccggtgccgcccgatgctccggcggtgagcatgttccggctcgtcatcggcgaggtgcgcgggctgatccagcagcgcgacgccatcgaggccacggccgacgccctcctgagggacagctccgactacaagctgctgcgccgcatccctggcatcggcccgatcaacgccctgaccatcttggctgaggccggcgacctgcgccgcttcggccatcaccggcagttcctgaagttctgcgggctcgatctggctacccagcaatccggcaccttccgcggccagaccaagctgtcgaagtacggcaacgcccggctccggcgtacgctctggctggctgggcaggtggccatccggcagcgggagaacggcttccgcgacaagttcgagcgctacatcgcccgcgaccggcacgatgccgacctgcggcgcaaggcgctgaccgcgatcaccgccaagatggcgcgcgtggtgcacgccgtcatcaagaccggtgccgactaccggcccttcgtcgaggggccggtgccaggtgggagaacccctctcagcagagccgtgagggcgtgagaaccacgaccctgtagataatgctcgggtctcctgcctggatcgacatctcgtgttgaggacggtgag

SEQ ID NO: 267 - DNA, 1132 bp, unidentified
  source 1..1132: mol_type = unassigned DNA; note = element_ISMex17
cttgtaacttgatcccaccttcgccgggtatgctcttcggcgcggtggcgggtgagagaccgttagcctctggggccaccaagcccgcaagtgagccagggtcctcgcccgccgttccatcgaacccgaacagtcgcttgggccgctcaacgcgaagcccgcttgcgcaaggatgggatcagatggacgctcctgttgttgggatcgatgtggcccgtgaccgcctcgatattcatgttcatccctctggagcgaacttcgccgttgatcgtacgaccgagggtgtggagcagctgtgcgaacgcctccggcccctgaagccgaagctcgtcgtcctggaggcaaccggcggtttggaagccatggtggcacgtgctctcaccacctggaggctaccagccgtgatcgtgaacccagcacaggtccgtgctttcgctcacgccttgggccaacgcgccaagaccgaccgcatcgacgccaccgtgatcgcccggttcgcggcggccaccaacccacccgttcgcgctcgggccgatgccgagactcaggccttggctgatctcgtcacaagacgccgtcagatcgtaggactgatcgcgtccgagcggcagcgagcgagccaagctccaccgtgcattcgagacagcgtccggcgcgtcatagaggcgttggagcaggagcagagtgtgatcgaccgctcgatcgatgcagaggtagaccggtcgcttgaatggcgcaggaaggagaccctcctgacctccgttcctggtgttggaccgacgatcgcacgaaccctgatcgcggagctgcctgagcttggaagcctcaaccggaagcaagtcgccgcgctggtcggcttggccccttggacgcggcaatccggtcagtggcgagggaggagcttcattgcaggcggccgcgcacctgttcgcacggcgctgttcatgggggccatggtggccagccgtcacaatgccgcgctgaaaaccttccgcgaccggctcatcgcagccggtaagcccaagctcgttgccctgattgccaccgctcggaagctgatcaccatcctcaacgccatcctgagagacggaacgccatggcaacccgcttgaccagcaagacagtcgctcac

SEQ ID NO: 268 - DNA, 1334 bp, unidentified
  source 1..1334: mol_type = unassigned DNA; note = element_ISMex29
tgatggtgtggatggctcctgctcccggcgttgcgttggggcatagtcgggatgttgtcgcctcaagctgaggagccgcccatgtccgagcttgctacggtcggtatcgacctcgcgaagagcgttttccaaatccacggtgtcgatgaaaacggtcgtgttctcgtgcgtcgccaactgcgtcgaggtcagttgctcgcgttctttgagaagctgccgcggtgcctgatcggcatggaggcctgcgggggcgctcacgactgggcgcgcaagcttcaggaactggggcatgacgtccggctgatgccgccgtcttacgtgaagccctacgtgaagcgcgggaagacggacgcagccgacgcggcggccatctgtgaagcggtcacgcgtccctcgatgcggttcgtcgccgtgaagagcgaagcttgctcttcggtcctggtcgtccaccgcacgcgggatcttctggttcgccagcgcacgcagatctgcaacgcgatccgcgcccacatgacagagttcggcgtcattgcagcgaagggcgcgcagaacgtcgatcggctgaggacgcaactgcatcaaatgccggaagcggcccgattgcccgtcagcctcctcttcgagcagttggtcgataccgacacgcggatcgagcggttgacgcgtgagatcgaagcggcccacgcccaaagcgagacgagccagcgtctggtgacgatcccgggcgtcggcaagctctcggcgacgatcatcgcggcgacgacgccggacgtcggcaacttcgactgcgcgagggactacgccgcctggctcggcctgacccccaaaccgcattccaccggcggcaaacagaggatcgggcggatctcgaagatgggcaaccggtatattcggcggttgctctatctgggcgccatgtcgcagatcatggtgagacacaggtgcggcccgagacaggactggctgtccgacatgctggcccgaaagaagacgaaagtcgccgccatcgcattggcgcatcgcatggcaagaacgatctttgccgtcctcagagacggatcacgctaccagccgctggcgactgctgcctgaacggctgaacgaacggtcagggcgacgtgaggtgatggcgaacgaacggagaggaagaaccaggacaccccgatcaatccgaagcgctctgagcgcgctcgattgagtgggacctgttctccaagcggacttcatcagggcgcgcagcgatcccgctgcagatcagacgccgtatacatggccgcagccgaccagttcacccaaaccgatcgaaatccttgacccgcaggagccatccatac

SEQ ID NO: 269 - DNA, 1091 bp, unidentified
  source 1..1091: mol_type = unassigned DNA; note = element_ISMex31
tagcaaagagttcggtcgccgtgctgggtatcgatctcggcaaaaacagctgtagcctggttggcttcgacccagccggtacggtggttctgcgtcgtcgcgcacggcgtgacacgatcgtcggcctgacggccaagctgcccgcttgtgtcgtcgcgatggaggcctgctgcggcgcccatcacctcgggcggctgctggccgcgcagggacataccatccgactgatgtcgcccgagtatgccaaggcgaagaagaacgacgaccgcgatgccgaggcgatcgccgaggccgccacacgtccgacgatgcgcttcgtgcccctcaaggcgcccgatcaactcgacatgcagagcctgcaccgggtccggtctcggctggtcagcatgcgtaccatgctcatgaaccagctccgcgcgatcctgctggagcgcggtctcgttttcccgcaaggccgccgcaagttcgagacggcggtcggcattctcgtgacggatccccaggcgcagattggcgcgcgtatccaagctcttgtcgccgagatccgtgaggagtgggcaagcctcgacggccgtatcgaagctctcgaccgagagttcgtggcgcatgcccgcgccgacgaggcggcacgtcgcctggtgtctatctcaggcgtcgggccgatgacggccacggccttgcgcgcggccgtcgacgacggaagcgccttcgcgtccgcgcgcgacctgccggcttggcttggcctcgtgccccgacagcatacgaccggcggcaagccgaagctgctcggcatcagcaagaggggcaacgcctatctgcgtgggctcttcatccatggggcgcgcgcagcgctggcctcgctgtccaaggtcgaggatgcgaccggccgatggctgcgcagtctgctggaatgtacacctgtgggccctaaaatagctgtttaagatcaacggcgcgtcaatctgccacatatgatcttctggctttttccacaaggcgagcgcgcttatcgcttggaacggtggttcaaccgttcctgaaccaagccgcgagtcgcaatgatcgaaaaagaagacgcgacggaactcacc

SEQ ID NO: 270 - DNA, 1383 bp, unidentified
  source 1..1383: mol_type = unassigned DNA; note = element_ISMex9
gatggggtattcggggtgcccggcgcggtggaagcggcggcatgatggcgcttcgatccaacctcggagctccgccatggaccagcagcaccacgtcggcctcgatgtctccgtgaaggagacagcgatctgcatcgtcgatccccacggcaaggtcgtgcaccgcgccaccgtcgagagccaccccgaagtgatcggccggcatctgatcgatctcggccatgcctacgcgcgggtcggcctggaggcgggaccgctctcgccgtggctctacgccggcttggtcgaggtcgggctgccggcgatctgcgtcgagacccgtcacatgcacgccgccctctcggcgcgcatcaacaagaccgaccgcaacgacgccctgggcatcgcgcagatgatgcgggtcgggctgttcaagccggtccacgtcaagacgccggccagccagcagcgccgcctactcctgacctcgcgcaagctcctgcagcgcaaggcctacgacatcgagagcgacctgcgcggccagctgcgcaacttcggcctcaaggtcggcgtcgtcggggcggtgggcttcgagcagcgcgtgcgcgacctcgtgctcgatctgcccttcgtcgccgccgtggtcctgccgctgttggaggcgcgcgcggcgcttcggactcaactcgccaagctgcacaagatgctgctggagcaggttcgcaccgacccagtctgccggcgattgatgaccgcgcccggagtggggccggtcgtggcgctgacctaccgcacctgcgtcgacaacccggcccggtttggacgttcgcagtgcgtcggggcgcattacggtctgacgccgcggctctaccagtccggcgagacgatgcgggtcgggcggatctcgaagtgcggggatcggatgatgcgcgccgcgctctacgaagcagcgctcgtgctgctgaccggctcacgcggccggtggtcagggctgaaggtgtgggggttggccgtcgccaagcgccggggcatgcagaaggccctcgtggccgttgcccgcaagctggcgatcgtgttgcaccgcatgtggcgtgacgggacggacttccgttggtcggccgcggccacgacagcggcctgaggtccaccgacgccaccaagtaacatcgagctcctccggcgtggaggaggtccctgcggggacgacgggagcgggtgagaccgaggaaactcgagcgccggttttgccgagcgcgcggcttagatggctccgcccactccctctgatcccatcatgaggcggcacgcgccgacctcggagagaagcaagaactccgcaggaccgttcacgcgctggatagggatgagcacgcaggggagttgaccgatgaaccccgaatagag

SEQ ID NO: 271 - DNA, 1405 bp, unidentified
  source 1..1405: mol_type = unassigned DNA; note = element_ISMlo3
accccatgtggatggctcccccacccgttgacggcattgtgacggttggaagtggtgctgtcgcagcgaccacacgatagaggagccatccgccatgcaaatcaccacgatcggcctcgatctggccaagagcgtatttcagttctatgctgtcgacgctgaaggacacgttgttgtccgcaaagcgttgcggcgggcgcagattctgtcgttctttgccaagcttccctgctgcctcgtcggcatggaagcttgcggcacctcgcatcattgggcgcgcgagttgacaaagcttggccacgaggtgcggctgatgccgccagcctacgtgaagccctatgtgaagcggggcaagacggatgcgggggatgccgaggcgatctgtgaggcagtgacgcgtccaaccatgcgcttcgtgccggtgaagtcggccgaccagcaggcagcgctggcgctgcatcggacgcgcgatctgctggtgaggcagcgtacgcaacttgtgaacatgctgcgtggtctcttggctgagttcgggatcgagatagcacgtggcctgcaccatgcattgcgactggcgggtcggctctccaacggcgaagctcccgaggtgccgccactggctcggctggtggtgaaggtattggcggatcagatcggcactatccagctccaactcgcccgtctggagaaggagctcttggcctggcaccgctccaacgagttgtcgcagcgtttggccacgatcccgggcatcggtgtgatctcggcaaccgcactggctgcttctgttatcgagcctgagcgcttccgctccggccgccagttcgccgcctcgctcggtctcacgccactccagaactgctcggggggccgggagcggatgggtcggatctcgcgaatgggagaccgctacctgcgccggctgttggtggtcggcatgacctcgctcgtccgacgggccaggatacagccggcatcggttgatccgcgcctatctgccatgctggcgcgcaaaccggcgcgtctcgtcacggtggctgccgccaacaggacggcgcgcgtggcctgggcgatcatgacgcgcggaggaaccttcagggcgccgatcagcgccgcagcctgatctgcttcggcgccaagcaaacagatacgaagaagctggaagtttaccagttgcaagggcgaagagatgtgatggcgaaccggtcatatcgggagtcgggacaacccgtgcgaatgtcgtgggcgtcattgcccgcaaagcagagtgggacctgactcgcggataccatcaaggccagcggtcaacatgaacgactgcatcaacaggccggacagaagactgcacctgacccaatcgtcaaaatatcaaatcaccccttgcaccgcgggagccatccacaga

SEQ ID NO: 272 - DNA, 1522 bp, unidentified
  source 1..1522: mol_type = unassigned DNA; note = element_ISMma5
aaaaacacacatgatattcttggaataacatgcccaaaaaatgaaagtctttttcacttagcttttttgataatagaactccatcattacctttggacaggaaggttgtttttactttggttctccgaagccgtcaaaaaactaaccattgaattgccatcgaaggcccagatgtgaccttgatcacggatgccaaattgcctttgaagcaattctactgtcctggaaatgatggagtaatgtaaattggacggagaaataaacaaatcttgtggtttagacattcacaaacgttttgttattgctactatcctcagtagatccggtgaaaaacaacaacatcgttttgccagagatgatgatgggattttagatcttaaaaatttagtaacctctgaaaaatgtgatgttgttgcctgtgaatcaacaagtgatttctgggttccgatttatgaggcattgatagatcatttgcctgttatagttggaaatgctcgagatatgaaagcatttacacataaaaaaacagataaaatagattccgaagtaattgcaaaacttgcattgaataagatggttcaaccatcaagagtttttccgaagaaacatagagaattcaggtcatacgtcaggcttcgcctaactcttgtaagaaaaagaacggacattaaaaatgaagctcatgcaattctttcctccgaaatgttacatctgggtgatgttctgactgacatttttggaaaaaatggtagagcaattctagcaggaatctcttcaggtaaaaatattgatcaaattatagagtcgctttctccaaatgttcggaaaaagagtgttcagataagggaaattctggatagagaaatatcacagagtgctgcaataaggcttcagatatgtctgaaccttataaaacatttagatgaagaaattgaagttcttgaaagagaaattttcaattatgcttatcaaaagcataaaagggaaatggaaattttgatgtcagttccaggtattggggagcttggtgcggcaactctaattgctgaaataggagatttcagggattttccaacgggagataaacttgcttcatggcttggaatagttcctaatgtgtatcaatctgcagataaataccataacggaagaatcactaagagaggatcaaaagtagcaaggtggattctaactcagattgctcaagcagcagcaagaaagaaaaatagcagattaaaggagttttttaacaggaaaaagaagacaattggatatgctaaggcaattattgccttagcaaggaaaattgcaacaataatatggcatttgatcacaaacgatgagatgtacgaagatgaaacaggataccaaaagggagaagttaaaaagagaaagattgttgaggcagacatattctcggttgatgaaaggataacaataattagtggaattatcgcaattatgggaaaaaaggaaggagagagtacgtgatgagttttctcatcatggactttcatgccaa

SEQ ID NO: 273 - DNA, 1359 bp, unidentified
  source 1..1359: mol_type = unassigned DNA; note = element_ISMmg1
tttatggatggcccgcccctcaccgggctgccctgctagccttgcagggtcgctaagttgaagggatggagcgggacgatgacgatcgcggtgctggggatcgatctgggcaagaacagctgcagcctggtcgggctggacgggactgggcgggtcgtgctgcgccgccggatgcggcgcgagacggtgatcgccttcagcgcgaagttgccggggtgcgtcgtggcaatggaggcgtgctgcggtgcgcaccacatgggccgagccctcgtggagcaggggcacacggtccgactgatgtcgccggaatacgtgcgcccgtacgtcaaggcgcagaagaacgacgaccgcgacgccgaagccatcgccgaggcggccacccgcccaacgatgcggttcgtggcgctcaaatccgaggcgcagctcgacgtgcagaccctgcaccgggtccgcgaccagctcgtgggcgagcgcacggcgctgatgaaccaggtccgcgccatccttctggagcgcggctatgtggtagcgcaggggcgggccaagctggctgcctgtctaaccgagttactcgacacggaggcgggctcctccctcacagcgcgcatgcgcacccttgtggcggaggtgcgcgagcgctggcagagcctcgaccggcgcatcgccgcgctggatgccgagttcgccgagcaggcgcgcacggacgagaacgcgcggcggctgacgaccatcccgggcatcggcgcgctcaacgcgaccgcgctggttgcggccatcggcgacgtggccaccttcgcgcgcgggcgcgacctggcagcctggctcggcctcgtaccgcggcaggtcacgaccggagggaagcccaagctcgtcggcatcaccaagcgcggcagcaagtacctgcgcaagacgctcatccagggcgcccgggccgcgatgccgacgctccggcagggtgacacgcggctcgggcagtggctgcgcgggttgctggcgcgagcgcacaccaacacggcggtggtggcattggcagccaagatggcgcgcatcgtctgggcgctgctgcgccacgggcgcgtctacgaggcaacggccgtagccgcctgatccgagttcggccggcgcggcgggcgccggccttccgacgtctgcgagcggtgagaggaagatggcctgacagtcgaccggtgttctggaagcctcccggcaaaaatggcgcatgacgccgacccctttatgaggcccaggacgcgcggatctccatcttggccaacggctctgccagaaggccggatacgtttatgcagactgctcagaccagcggatccagagccacttgcggacggggcgggccatacg

SEQ ID NO: 274 - DNA, 1404 bp, unidentified
  source 1..1404: mol_type = unassigned DNA; note = element_ISMno16
gctgatggtgtggacggccccccacggcatcagtgtgtgccagaatgaggtcgtcaggatctcatccgaggaggccgtccatgagcgagattatccgcattgggctggatacgtccaagtctgttttccagctgcacggggtcgatgcggccgagcggccggtgctgaagctgaagctgtcgcgcagcaagatgctggccttcttcgcccagcagccgccctgcctggtggcgctggaagcctgcggggcctcgcatcactgggcccgcaccctggccgggctgggccacacggtgcgcctgatcgcgccccagcacgtcaagccctacgtgcccggctccaagaccgacgcggccgatgcggcgggcctgtgcgaggcggtcagccggccgcagatgcgcttcgtgccggtcaagaccgccgagcagcaggcggcgctgatgctcacgggcctgcgcgagcaatggctcaagcggcgcacccaggtcagcaacagcctgcgcgggtatgcggccgagttcgggctggcggcgcctcaggggctggcccgtctcgcggaactggtcgcgcgcctggccgaggacccgcgcgtgccggctctggcccgcccgctgtttgcggcgctgtgggccgagtaccaggagatcgaggcccgggtgcaggaggccgaccgccagctcaaagtgtggcagcggggcaacgccagctgccggcggctgagcgccgtgccggggatcggtccggtgggcgcggcgctgctggtgctgaagacgccggccccccaggcgttccgcagcgggcgggactttgcggcctggctggggctgacgcccaaggatcacgcgaccgcgggcaagccgcggctgggcgggatcacgcgggcgggcgacgagcaactgcgcagcgtgctggtggccggcgcgatggcggtgctgcgccagctcaagccggagagcgcggggctggcgggctggctgacgcggctggtggcgcgcaaggcgcggcggctggtggcggtggcgctggccaacaagctggcgcggatcgcctggcggctgttggtgagcggggcgagctacgacccggcccgggccggcccgccgatgggaggggcggagccggcccgggcctgaccgggccggtggcgcgatcaggagggaaccgggggccggtgaggcgcccatgagcttgcaagcgggagatggttggtcagctcggctgtcgtgacatgcctcactccgggggatccaagggccgttcgaggtcactgtgctgattgggcggcgtgtcgcgcaccaccacctgggccgcggtcggcagagccgcacccgaaggccgaacatatggatgcaacggcagagccggaccgggattgtccgcttgcgagaacgggccgtccacata

SEQ ID NO: 275 - DNA, 1798 bp, unidentified
  source 1..1798: mol_type = unassigned DNA; note = element_ISMno20
ctaaatccggtttggctctaagtctttccatcaattcatctaatggaagtggccggacgtcggcgcctcacaaaagattgagtgctgcggtccggatgtctagatatggagccggatcgatcttggaacggcgtaagctatagttgagcagaacatttgttgtgagacgcccaggatactcggcaacgcgcacagtatatggatcggccttaagttcctcagtggtgaccactgggatccagagccacaggtctccgtcccgatcgctgataatgccgcctcggatttgatcccaagggcggtctggatcgaaaacgcactcgccaggcgagaacgccgctgaggcttgcggcccttcggacgtggttgatccatcggccatcagggttcccccattcccttcgatccctgccggatcggttagctctgccgtttcgaccttagcggtgatctggccgggctgctggggcgctttgcggagttgcaatgcaaggcccaggcccgcacgggccagctcgcccggatcgtggtgatccaggaggctggcctggacgggttctggatccaccgcgccctggtctcagaagggatcgagagctacgtcgtggattccgcatcgattgccgtctcacgtcggcatcgacgcgccaagaccgatcggattgacggagaggctctggtacgcaccttgctggcttataagcggggcgagcctcgggtctgcgccatggtccgcgtcccaaccccggaagaagaggatcagcggcgcctctgccgtgagctgaagacgctcgtcggcgaacggatccggcatgtcaacaggctgaagggggtgttgttctcgcaaggcattacagactacgagccgcggcgtccggacaggcgtgaaagactcgacgagctgcgcaccggcgatgggcgtcccttaccacaccatctcaaagctctggtgctgcgcgaactcgagatcgtcgagctgctggatcggcagatcgaggtcgtgaaagcagaacgcgatgctcttctcgcatcggcgcaaccggaggaggtcccctcaaaggcggtccagatgctgctcggcctcaaggggatcggatccggttttgctggtgcgctgtggtcggaaggtctctttcggcactttgacaaccggcggcaggtggcggcatatgcgggcttggcgccgaccccatggaagagcggcaagatcgatcacgagcagggagtgtcgaaagccggcaatccccgcctgcgcgccatcgcggtcgagatggcctggctctggctgaggcatcaaccaggatcggcgctttcgctttggtaccaggatcgcgtgcgctgcctgggcgggcggatgaagaaggtcattaccgtcgcgctggcgaggaaactgcttgtggccctctggaagtacgtgacccacggcgtggtcattgagggggcagccctgaaggttgcctgatcctgcccatcaaccgaactctcaccacttccaccaaggcctgatcagctttggcggatccgggtagacgaaccggcgtacggtatggcctgaccagccgtagttaagaatggtcccgtcctcccgagccccacccacagaatgcgggatgttggtgcagccgttgcaggcggcgaccggatgtgagcttgagcgcgtggtgcaaaaacgtgcttgatggctgggctcggacctgtgatcccgtaactgtcagggagaactggatgaactgaagcaattcagccttgatccaatccccctcatgtgagccgtacgtcaagcgcggccaaaccgatg

SEQ ID NO: 276 - DNA, 1426 bp, unidentified
  source 1..1426: mol_type = unassigned DNA; note = element_ISMno22
gatggggtgattggggtcttagccgagggtggctgctccgttcgggatgttggaacgtggtccgtgttgagcggccacaagcatcgggaaggagcagccgtgaagtattatgccggactggacgtttcgctggaagagaccgcgatctgcgttgtcgacgatacgggtcggatcgtgcgggaggcgcgggcggcgagtgagcctggcgcgctggtgcaggcgctgaaccagatcggcctgcccctggagcgcatcggcctggaagcgtgctcgctgacggcctggctgcacgacggcctgcgcgaggcgggcttgccggcgatctgcatcgagacgcgccaggccaatgccgcgatgaagacgatgcccaacaagaccgaccgcaacgacgcacgcgccctggcgcagatcatgcggacgggctggttccggcaggtccatgtcaagagccgtcagtgccggctgtggcgttcgctgctggtggcgcgccgcacggtgctcaacgagatgcgttcgatcgagaacgtggtgcgggggatcctgcgcgaagccgggctcaagctcggcacgcctggccgtgcagccttcgccggccgcgtacgcgaactggccgagggcgtgcccctgatgacgcagctcgtcgaaccgctcctggaggtgctggccagcatgctgaccgcactcgccggcttgacgaagcaggtcatggatctcgtcaagaaagaggcggtctgccagcggctgatgagcgtgccgggcgtcggccccatcaccgcgcttgccttccgggcgacgatcgaccggcccgaccggttcaggcgctcgcgcgacgtcggcgcccatctcggtctgacgccggcgcgctaccagtccggcgagaccgacatccagggcaagatcagccgttgcggcgacgaactcgcgcgcaccgcgctctacgaggcggcgcatacgctgctggtgcggagccagaaatggtcgagcctgcgcgcctgggggatgaagatcgccaggcgtcgcggcatggcccgcgcccgcgtcgcggtcgcccgcaagctcgccgtcatcctccatcgcatgtggagcgacggcaccgcgttccgctggggtaaggagcccgcagagggtgccacgctcgcaggatgacgccgtcaccgcgaaacaggagggcaaaacaccacgcatgaacccgaaagggtgaaccggatcgttcccgtggggacgatgggcctggcgatctcgttgagagtccagaacctgcgggtgcaaacccgcaaggtcgtgaaacagattgagacgcctcgccctcctgaccccatcatgcggcggccaagcgccgaccgcgaagagaagcgtgtgacccacggggcgacacaagccggagaaaccacaacgagcagcttgacctaaacgaccccaatcagag

SEQ ID NO: 277 - DNA, 1518 bp, unidentified
  source 1..1518: mol_type = unassigned DNA; note = element_ISMno25
agatcccatgagggcggcgcgagacggttagtctggtctccggtgcacgaccttgaggatcctcgctatgacgcagatgcccagctcatcgtctccgacgcctgattacgagcgcacgctcgtcctcgcaatcgagttgagcaacgtgagttgggtcttggccgctcagatccctggcttgccacgcctgaaggccaagcgcagcgtcgcgccggctcccgaggccctgttggcggccatcgaaggttatcgcgagcgagcccgcgcggcaggacgcgacgtcgaacgcgtgatcgcgatctacgaggctggctggtcgggcttctggctggcgcgctggctgggcatgcgcgggattgagacgcatgtcgtccagcccgcgagcgtgccggtggatcgccgggcgcggcgcgccaagtccgacgggatcgatgccgaactgctgctgcgaacgctgcttgcctggctgcgcggtgagccacgcgtgtgctcgatggtgcccgtcccgagcgaggccgacgaggacgcccgacggtgcgtgcgcgagcggacggagctcgtgaccgagcgggtcgccctggtgaaccgcattggtgccgtgctggcgacgttgggcgtgcgcgactacaaccccttgctgcggaaccggcgcgagcggctcgatgcgctgcgcaccgcgctcgggacgccgctgccggcgcatgcccgcgccaagatcggacgcctgctcgaccgcctggatctggtgtgcgcgcagatcacggccctggagcgggagcgcgacgccgtcctcgaccaggaggcgccggacagggccggcgcgatgatccagcaactgagcacgttgcgcggcatcggtgtgcagagcgctaccatcctggtgcgcgaggcgttcgtgcgcgtgttcgccaacgccaaagcgctcggcgcttacgcaggcttggccgcgaccccctacagcagcggcgggacggtgcgcgagcagggcatcgggaaggccgggaaccggcggctgcggaccgtcatggtcgaactcgcttggctctggcaacgctatcagcccggctccgccccggtgaactggttccgtacgcgcgtcagcggtgcaggcgcgcgtggccgcaaggtgatggtggtggccctggcgcgcaggctcctcatcgctctgtggcggttcgccacccagggcgttctgccggagggtgcggtcctgaagcccgcgtcctgatcgcctgcgaagatcgggtatgagccgtcggtcggctcggccctcaggatccaagagggcgtcgccgttgtccggcttggcgcacgaacgccgtcaaatagtggcgccaccctcctggagctctcccgtcccggatgcgggacagtggtgggacatgtcccgccggatgtgaggtttgcagggaagccctgcgctgaagagagctccatcttggacaacaattcccctgtgccccgcaaagttctggaggaacccgccatgaggtagcttgacgactgcgccctcatgtg

SEQ ID NO: 278 - DNA, 1192 bp, unidentified
  source 1..1192: mol_type = unassigned DNA; note = element_ISMno29
cgctccctcttgcatgtttgacgggccgaccagcgcaccaagctgtgaggtgcgtcgcggccggtggccaccggccgcgacgcgggcggccgggatcgatctccctctaggattggcaccgtgggaaagcaggatccggccgccctctggctcttgtcctgaacagatgctggggagcaagtcccgtatgcaaggcaaggaagtgtccaaacaagagaccgcgggcaagtctagcgtggggatcgacgtcagcaagagctggctcgacgtccacgtcctcccctccggccaagcccagcggttcgccaataccgaggtcggcatccggcagctcaagcgctggcttgggcgctttgctctggggctggtcgtggtcgaggccaccggcaagtggcaccgccagacccgccgcagcctgcatgcctcgggcctgccggtcgccgtcgtcgatccgtttcgggtgcgcatgttcgccaaggcgcaaggcatctgggccaagaccgatcggctcgatgcccgcgtgctggcgcagtttgccgcggtgatggcccccccgcagcgcccgccggcctcggacgcgctcgaagcgctccaggaactggtcgcggcccgcgacagcgccgtggccgaacaaaccgccctcaagaaccagctggccgcggccgcaagcccgttcctgatccgccagctccaggaccgtctggccaggatcgccgcggacatcgaggcccttgccggcgagatccgccggctcatcgcggccgatcccggactggcccggcggcatgccatcctggtctcgatcccctcgatcggggacacgatcgcggccaccctggtggccagcctggccgagctgggcacctgcagcagccggcagatcggcctgctggcgggcctggcgccggtcgccgacgattccggcgcgcgccagggcgtgcgggtcatctggggcggccgcccgcccgtgcgccgcgtcctctacctcgcggcgctctcggccgcccgccacaacgccggcctgaaagccttccacgaacgcctgatcgccaacggcaagaagccaaagtgcgccatcatcgccgtggcccgcaagctcgccgtgctggccaacagcctcatcgctcaggaccgcctctggacgccaaatcagccccaacaggcttgacgccaaacacagatgctttcccgg

SEQ ID NO: 279 - DNA, 1147 bp, unidentified
  source 1..1147: mol_type = unassigned DNA; note = element_ISMno7
gccttgtatctctgagttgcccgctggagcgatgccagcgaggctacaaggtgagggtcagcccgcgttcgccttgggcttgcaagcccgcgacagagcatggtgcggccctcaccttcacagtcccgaacccggacagccgctcgggcccgagcccgcatttgcaaggtagggtcatggacgaacaccgcaccatcttcgtcggcatcgacgtatccaaggaccgcctcgacgttcatctgagaccctcggacgaggcgttgcatgtcccacgggacgcgaaagggctggataccctcgctcgccgtcttggccgcctccctgtcgctctcgtcgtccttgaagccacaggcggcttcgaggcgagcgtggctgcagcgttggcagcggtcgggctgccgctctgcatcgtcaacccacgccagatccgcgatttcgccagagccatgggtcgtctggcgaagaccgacacgctcgacgctgaggtcattgccctcttcgctgaacgcatcagaccaccggccaggcccctgccggagccggagagaagccattttgccgagcttgtgagccggcggcggcagatcatcgggatgatcggtatggagacgaaccgtcgcgatcaagccgtggacaagcaactgatccggcgagtcgaccggcacatcgccttcttggagcgggagctcgtggagctcgaccgcgacatcgaccgagccatcaaggcctctccggtctggtgcgagaccgaggcgttgctcaagtccgtccccgggatcggtgacgtcaccgcgcgcacgcttctggctcagttgcctgagctcggcaccattggccgccaccagcttgcagcactcgtcggcatcgctccgatcaaccgcgactcgggcctgatgcgaggccgccggtccatcgcgggcgggcgaacgtcagtgcggggcgtgctgtacatggccgctctgaccgcgatccggcgaggctctcccttccggcccttttatgagcggctcactcagcgcggtcggccgaggaaggtcgccctcgtggccgtaatgcgaaagctcctggtgacgctcaacgccatcgtccgcgaacgcacgccctggcggccactcgccgcttgaccttcaacacagccgctccgtcc

SEQ ID NO: 280 - DNA, 1767 bp, unidentified
  source 1..1767: mol_type = unassigned DNA; note = element_ISMpo4
gatcgggtaatcgggccgttgccagccttccccgcgtcgcggatcgtggcaagctgctcggtggttcaatccggtctgccggcgcgacgcccgcgaccgatcatccgggagcagagtcatgcgctactacgccggtctggatgtctcgttggcggagacgtcggtgtgcgtcgtcgatgaggagggcaagatcctccgcgaggccaaggtcgccagcgaaccggaagcgctggcgacctggcttggcgctctcggcctaccgctgacccgtgtcggcctggagaccggggcgctggcaggctggctatgcgaggagatgaccgaactcggcgtgcccaacgtcgtctgcatggacgcgcggcacgcccgcgccgcgatggtcgcgatgactcacaagaccgaccgcaacgacgcgcgcggcctcgcccagatgctgcgcaccggctggttccggcaggtccacgtgaaggcacgccggacgatggagttgcggaccctgctcaccagccggaagacgctggtgctgaagatcggcgacgtcgagaaccaaatccgcggctcgctctgcctgttcgggatcaagctcggcaccgccaagcgccggaccttttcggagcgagtgcgtgagctgacagcagacctgccgcgcgtcgccgccatcctcgacgtgctgttgcaggcgcattcggcgatgctgctgtcgctcgaccggctcaatcgcatggtactggagatcgcccgcgagcacgcggtctgccggaggctgatgacggtgcccggcgtcggggccgtggtcggcctgacgttcatcgctgccatcgaggacccagcccgcttcgccaagtcgcgttcggtcggggcgatcctcggtctggtgccgcgcaagcatcagtccggggaggtggaccggaacgggcggatcaccaagacgggagacaccgaggcacgggcggcgctgttcgaagcggcgcacgtgatgctgcaccgggtcaagaagtggtccgggctgaaggcgtgggccacgaaggtggcacagcgccagggcaacaagcgcgcgacggtggcgctggcccgcaagatggcggtggtgatgcaccggatgtgggtggacggcacgaccttccgcttcagcgcggttgaggctccggccgccgccaccgcgtaggcatcttacggttcataaagatcggggctgggcgcgcctggcctcgaagggtcgtcctcacggggacgggcgggaggtgaagccggaatgacgggtgtgctggcccctgggccaagtccgctgtcgcatataggctcgtctctcatcggaacgcgatcatgtggcggtccacgtgccgaccacggacagaagccaagagccccgtgggtacgagatcaaaatgtgcgatggcctgaccgtcgagcgcgccttcgcgaccggggaatgcataggctcgacttttgcggacctttctacctgcattcacgcattcgctgatctttttcttggatatactcaacggcagactcgtcattacatctgcttatatgatcattgaccgacatcaataaataaaaatacgttttataaaaaactaatattccaacaaaaaacgagagctaatacaaaagcgtacttcttccaccgcaatgaactgcgagcaatcaacatgatgcgccttctggatctgatcggcatcggcaaaattttttgggatcgcacggatcttacagcaaacgcagtgacaagaccgtcttgacggcagaggcccgattacagaa

SEQ ID NO: 281 - DNA, 1230 bp, unidentified
  source 1..1230: mol_type = unassigned DNA; note = element_ISMtsp17
tcctacgcgctgaagcctcgggatgcacgccgttcgatcatccgccctgcgccacttccggacctttgatcagtgccgccggaatggccgctcgtcactcgacagcgttggggtggacgccccctgacggcatcgatgtgccagagtggaggtgttgcaacaccactgcaggaggcgtccatgggtgaggttagcacagtcgggatcgatctggccaaatcggtgttccaagttcacggctcggatccgagtggcacagtcgtgtttcgcaagaagcttcggcgtgctcaggtgctggcgttcttctcgacccttccgcgctgcgtggtcgcgatggaggcatgcgccagtgctcactactgggcccgggagatcgccttggcaggtcacgacacgcggctcatcccgccggcttacgtgaagccgttcgtgaagcggcagaagaacgacatggccgacgcggaggcgatctgcgaggcggcacagcggccaacaatgcggttcgtccagggcaagaccgcgcaggctcaggcctgcgcggtcgtgtttcgtacgcgcgacctgctcgtgcgtcagcggacccagttgatcaacgccctgcgcgggcacctcaccgagttcgggtacgtcgttcgccagggtgtcgggcacgttggccagctcgtcgcggtcatccgcgaccagacatccgacgtgccggcccaggcacggccggtcctggccgtcatcgcggacaccctgcaggcgctgcaggcgcagatcgcgcttctggaccgcgagatcgcccagcgtgcgaaggacgatgccgtggccaagcggctgatgacgataccgggtgtcggcccggtgatcgcggccgcactggtggcgctggcaccggctgccagtaccttccgccgcgggcgtaactttgcggcctggctcggcctcgtcccgcggcagcactccagcggcggcaaggagcggctggggcgaacgaccaagatgggcgagcgcagcttgcgacggttgctgatcctgggcgcgagctctgcgaccaaggtcgcggcgcgcgatcccgacaaagctggggcatggttggccggcatgctgttgcgcaagccgcgcatgctggtcaccgtcgccctggcgaacaagatggcaaggatcgtctgggccttgatggcccacggcggctgctacagagctccggccacggcgtgaccgccacggcctgaggcgtcagcgagg

SEQ ID NO: 282 - DNA, 1495 bp, unidentified
  source 1..1495: mol_type = unassigned DNA; note = element_ISMtsp6
taagaccgtatgtccgccgagccggggtggctcgccctacactgcgccttcgagggttgctcggcgcggccgagccgatcctcatcgcaggaggacgagccgtgggccatgctaccgaggttttcgtcgggatcgacgtgtccaagatgcgcaatgccgtcgccgttgctgatggcgagcgtggaggcgaggtccgctacctgggtgaggtcgacgcctcgcccgagagcatgcgccggctggtgaggcgcctggcaggccagcacgagcgcctgcacttctgctacgaggcggggccgacgggctacggtctccaccgcctcatcaccgaactcggccactcctgctccgtcgtggcgccctctctgatccccaggaagcccggcgaccgggtcaagaccaaccgccgcgatgcggtggcgctcgccaagctcctgcgcgccggcgagctcacggccgtctgggtgcccgacgaaggccatgaggcgatgcgcgatctcgtgcgcgcccgggccgctgccgtcgagagcctgcgcgtgcatcgccagcaggtcagtgccttcatgctcaagcacgggcgcgtctatccccgcaagaagggctggacgatgcgctatctttgctggctgcaggagcagcgcttcgaccatcccgcccaccagatcgcgctgcaggagctggtcgaggcggtgcggatcgccaaggagcgcgtggcgcgtatcgaggcggccatcgctgagttcgtgcccacctggtcgctcggtccggtcgtgcgggcgttgcagaccctgcgcggcatcgacctcatcgtcgctgtcaccttcgcgaccgaggtcggcgacatcagccgcttcgagagtccgcgtcagctcatgggatatctcggcctcgtaccgagcgagcggtccaccggcgacacggtccggcgcggcgggatcaccaaggccggcaatgggcgcgtgcggcacatgctggtggagagcgcctggacctaccgtcacccgccgaaggtcggagcaaagaagctctaccggatggaagccgcgacgccacgggtgcgcgagatcgcctggaaggcccagacccgcctcacggctcgttaccgggcgctgatcgggcgcggcaagaaggcgacggtggtctgcacggcgatcgcccgcgaactcgtcggcttcatgtggtcggtcgcccgggaggcgcgggtcgcctgaggcggccaccaagcgggacgcttcctcgcgcatcggcgggggcgggaccacggcaggagaacgcccgtcagacgctttgtggccggccgtgaggccgacgcccgctgtaagatcgggacagctccggacgcacactcgggactgcggtagccaacccgcgcatcagagcttgatcaccgacgtccatcggtcccgtctccacccatgcgcgtacatcctcactgcgccgctcctcagagcgaacgatctcgctcgtcccggtagttgactgcggacatcagagc

SEQ ID NO: 283 - DNA, 1456 bp, unidentified
  source 1..1456: mol_type = unassigned DNA; note = element_ISMtsp9
ctgtacctgacgacgagccgtgcttcagtgcggcttgggcgtccggcgatctgaggtatttccggtccgacgcaggcgtagctcagcaacgcctgtgccgcgatcgccgattggcacgatcccggatgccctgtcgcgttcctccgaacagtcgctggggctccgctcgcgcggacgcccgcgtacaggacaggatccgcccatgctcagtcccggactggtggccggcatcgatgccggcaagcacttcctcgatctcggcttccatcctgccggcaagccgatgcgctgcgacaacaatccggccggcatcaagcgcctgatcgcggccttgcggcaacgaggcgtcattcgcgtcgccctggaggcgatcggtccttacgctcagcctctcgtgcatgccctcgttgccgccggcttcacggtggcgctgattgatccgcgacgggtcaaggccttccgcactgccgaggggctgatcgccaagaccgaccggctggacgcggcgctgatcgcccgctttgctcatcgcatgagcgagtctctgcgcccggttcccacggccgaccaggtgaccctcaaggctctgtcgacgcgccggcgccagctcaccgagctgatcgccatggagaagacccggctggcccaggccctcgatccgatgatcgtcgacagccaccgggccgtcctcgaggccctgacgcggacttgtgccgaggttgaagccgagctcgaccggcgcatcgctgccgacccggccttggcccgtaagcgcatcatcctcacctcgatcccggggatcggccggcgcatcgccggcgtgctgatcaccgatatgcccgagcttggacggctcgaccgcaaggccgccgcgagcctggctggcatggctcctcatcccagccagagcggggcccatcccggccgccatgccatcgctggcggccggccgtgcctgcggactgccttctacatggccggcatggtcgccgcacgcgcctgtcccgctttccgaaaaccctatcgcgccatgagagacgccggcaaaccggccaagctcgccatcgtggccacagggcgacgcgtcgtgaccctggcgaatgctctcctccgcgccaacaaaactttcgaccagagcgacctggtgacttgtcaggcgacgtccgggacggctcccctggcgacaacggggcaacaccagcatgcgctggcgtgatcgctggcttgatcggagggtcgatgcctcgcatcgaccctccgcctcatgaccgttcgccggcgggggcgggtcaaggccttgtcgcgcaacgcgcgatggcgcggagcgccagccttgacgcgcacacgacggtgaacaacccgacgctggaacgcctctcgggcggggccagccatcctgtttctaagaggtcaaaccgtcgtatcgcctcccaaggcttgacccgcgatacagtcg

SEQ ID NO: 284 - DNA, 1107 bp, unidentified
  source 1..1107: mol_type = unassigned DNA; note = element_ISNgo2
agggtaatcccatgcgtaacaccgtaggattggacatatccaagctgacatttgacgcaacggccatggtcggcaaaacggagcattcggcaaagtttgacaacgattcaaaaggtttagatcagttttcggaccggttgaaaagcttgggatatcagaatctgcatatctgcatggaggcaaccggcagttattatgaagaagttgccgactacttcgcgcagtattacagcgtttacgtagtgaacccgctgaaaataagcaagtatgcagaaagcaggttcaagcgaaccaaaacagacaaacaggatgcaaaactgatagcgcagtattgccggtcggcgcaggaaagcgagcttgtaaagaggcagaagcctacggacgagcaatacaggctttcacggatgaccgcagcatacgcgcaaatcaaaagcgaatgcgcggcaatgaaaaaccgtcatcacgcggcaaaagatgaagaagcggccaaagcatatgcggaaatcatcaaagccatgaatgaacagcttgaagttttaaaggagaagataaaagagcagacggagaagcctaactgcaaggaaggcgtgaagcgtcttgaaaccataccggcaataggcagaatgaccgcagccgtattgtttcatcatctaacatcttcgaaatttgaaacatcaaacaaatttgcagcattcgcaggcttaagcccgcaacaaaaagaatccgggacaagcgtaaggggaaaaggcaaactgaccaagtttggcaacaggaaattacgcgccgtcttgtttatgccggccatggtcgcataccggataagggcatttcccgacttcatcaaaaggctggaagaaaagaagaagcctaaaaaagtcatcatcgcagcattgatgcgtaaactcgccgttattgcgtatcacgtacataagaaaggcggagattacgatccatcgcgttacaaatcggcgtaaatcccgaaaggaaaaaaggcattttttaaatgcctgctttgccgcgtctgaaatccggtgaattttcaaatattgaaattcaatgggttgaaaatgaattgtaaaaatgctgttgtcaattaaagtagtatct

SEQ ID NO: 285 - DNA, 1121 bp, unidentified
  source 1..1121: mol_type = unassigned DNA; note = element_ISNgo3
aggaaaataccaatgaatataatcgggccggacatctcaaaggacaccatagacgcaacattgcataaaacaaacggaagtatccattacattaaatttaagaataatgatgatggattaaaacagtttagattgtggataaagggaaacagaatcagaaaagtctatatcggcatggaggcaacaggcatctattacgaaaaggcagcagatatgctttcttcctactataccgtttacgttatcaatcccttaaaaatcaaggactacggaaaaagcaggtttaaccgcaccaaaaccgacaaagcagattcaaacctgatagcagattacataaaaaggcatcaagatacattgataccgtatcagatacccaaaaacaaagcactgcaaaaactgattaatcttaaaaaccaattacagcaacagcagaagcaaattaaaaaccgtcttcatagcactgaagaagacttcataaggaacatacatcaagacttgatagataccatacaggacaagatggaacaggtaaaaatagccatatccgaacaaatcaaaaaacaaacggacaataaccattaccgcaatcttcaaaccatcccgagcataggcaaagacaccgcatcagttctttatgcgcaactgacagaaaaacattttaaaaccgcaaaccaatttgtatcctatgccggattaagtcccgccatcatacaatcagggacaagcgtaagaggtcggggcagattgagccgatacggaaacagacgattaaaaagtacgctgtatatgcccgccctttgtgcttaccgttttaacgcatttccgaaattaataaataatctgaaaaaagcgggtaagccaaagatggtaattatcgttgccatcatgcgcaaactggcgaagcccgcctattacattgttaaaaccggccagccttacgatgcggaaagacaccgattgaatcaataaaattcaacaaaattaaacggttgcgcgaatatatttgtgtaaccgtgcatttgcatatcgtaaataaacgtaaataaaaataacaatataaatcagcatgttgcaactttgttttttattttgtgttgacgggcaacatatcatctgcgcgg

SEQ ID NO: 286 - DNA, 1143 bp, unidentified
  source 1..1143: mol_type = unassigned DNA; note = element_ISNme5
tatagtgaattaacaaaaaccagtacggcgttacctcgccttagctcaaagagaacgattctctaaggtgctgaagcaccaagtgaatcggttccgtgctatttgtactgtcttctgcttcgccgccttgtcctgatttttgttaatccgctatatcgacatcgccaaacgaaacttcgtcatcgccgtttcgtctttgtctaaaaccaaaaccgaaaccaacaaccccaaaggtatcgcccatactatcgaataccttaaaaaacacaaggtcgccctcgtcgtgacggaaagtaccggcggtctcgaaatccccgccgccaaagccatccgccgagcaggcatagccgtgattatcgccaacccgcgtcagacgcatcagtttgcccaatcgcagccgctgaccaaaaccgacgccaaagatgccaaaatgcccgccttcttcgcacagatgacggcacagaaagaagattcgcaaaccatgccctaccaaccgcccaccgaagcggaagaagtgttggaagccttggttaaccgccgcaaccaaccggcggatatgcggactgccgagaaaaaccgtctgcatcaggttcacgaaacgcaagtcggaagcgtcaaacaactgattgcccattttgaccggctgattgacgaattggacaaacaaatcgacgaccacacccacacgcattttgacggcaaagcccaagtggcggagcaaatcaaaggcatcggttcgataacgacggctacgctgatggtgatgttgcccgaattggggcggctgtcgcacaaacggatagcgggtttggccggcattgccccgcacccgagggagagcggggaaaccaaattcaaaagccgctgcttcggcggaaggtctgcggtacgtaaggcgctgtatatggctaccgtggcagcgacacgttttgaaccgcttattcgggatttctaccaacgcctgctgtccgagggtaagccgtataaggttgccgttacggcatgtatgcgcaaactgctgacgatatcgaatgcccggatgcgtgattattttgccgaaaacgatactgccgaaaacggtatccggacggcttgatttgagttttggtatttttgcccgacggggtgaaaaatacagttgct

SEQ ID NO: 287 - DNA, 1542 bp, unidentified
  source 1..1542: mol_type = unassigned DNA; note = element_ISPa111
tgatcgaatggactcccctcgcgtcccacacggcttcggtgagccagactgatgttgttgaccatcaggacacgggatcaggagaggagtccgccatgaacgctaccaccaaatccatccgcacagaatcttccgccgtcatgctcgccatcgatcttgccaaggacgtgttcgaactggcctttgccgacgcaacgggccgtatcgtcgagcgcaaacgcctcaagcgcaagccgtttgcgcagtgcctgcaaaaccgggcgccgctgcgcatcgtgatggaagcctgcggctcggcgcacgcctgggcgcggcgctttcagcggctcggtcatgcggtggaactgctgccggcgcagcacgtgcggccctacgtgcggcgcaacaagaccgatcgcgccgatgccgccgggttgctggaggcggcacgctgcggggatattcgcccggtgccggtgaagacgcccgagcagcaaggcacgcagggcctgcaccgcatccgcgagcaccacaaggccgagcgcaccgcggcgatcaacacggtgcgcgggttgttgcgcgagttcggcttcgccattcccgccggggccgacaaggtgcggcctgcggtgctggcgacgctggaagatggcgacaacgatatcccgatggaactgcggcatgccctggccggcctgctggatcgcatcgccgattgtcaggaggcgatgggggccatcgagaaacacctggctgacatcgccaaacgcgacacccgcagccagcgcctgatggccgcttccggcgtgggcctgatcaccgccaccgcgatgagcgccggcatcggcgacttcgcccggttcccgtccggtcggcatttcgccagcgccctgggcctgaccccgcgcgaatactccagcggcggtagccgcaagctcgggcgcatcaccaagcgcggcgatgtgtacctgcgcacgctgctgatccacggggcacgctcggccctggtggcggcgcacaccgcacgaaaacgcggccagccactggatcgcacccagcaatgggcgctggcgctggccgaacgcaagggccacaacaaggccgccgtggccttggccaacaagactgcgcgccggttgtgggcggccgagcatcacggcacgcctttcgatcctgaacacgtcagtcggcccgaagcacacgccgcctgatttcattccaccgcaaccgtgtcggtactgccgccacaccgccacaccgcttcgccgtttcaaccctctgatgttgcaagcctcaactcatgcaagcgtgtcggtccccgaagcagccaagccgataacaatagtgatcttcgtgatcgtttgaacgtctggccctgcttcgcggattccatgatggctcgggcaaaagcccaccgcaaagccgaatacacgaatgcaaccgctcccgccttgccggggttgaagcaaaagcgtcagcagggttaaaaacagagaatcaaacgccgtgaagctgccgcttcacaaaatcctgccgtcaggggttgacgggggagtccataca

SEQ ID NO: 288 - DNA, 1364 bp, unidentified
  source 1..1364: mol_type = unassigned DNA; note = element_ISPa21
atggactctccccgcaccgcgtttcttctataagacacgaggtgtctgtttgccgggagagtgaagatgaaacgcattgcaattgatttggccaagtccgtttaccaggttgccgaaagtatccatgtcggtcgggtggatcgtcgcaggcggctcgatccggaggcgttctggcgttatgtacaggagcagccggcgcctgtcgagtggttgatggaagcctgtggcacggcccaccactgggggcgcctgatgcaggcggcggggcatcgcgtggtgctgctgcatccgcgctacgtgcgtgcctaccggcggcgcaacaagaccgaccgcaacgactgcgatgcgatcctggaggcggctcgttgcgagggtatccgtccggtgccggtcaaaagcgtgcagcagcaacaggtgcagcagctgcacaaaatgcgcgaggcctggaagaagacccgggtccagcgcatcaacctgttgcgcggcatcctgcgcgagatgggcgtggctgcacccaatggcacccaggcgttcctgcgccaggcctgcgagctgatcgagcgtccggaagtctgcgccttgcgcggcgcgctgcaggtactgctggccgagatcagtctctacgaacagtcgatgcgtgagtgcgaagaccaactggcgcgctggcatgccgacgacgacatcgtgcacaagctcgatgaagtcagcggcatcggcctgctcaccgccagcgccctgaaaaccgctgtgggcaaacccgagcgctttgccagcggccggcacctgagcgcctggctgggcatgacacccaacgaatacagcagcggcgagcgccgcaagctcggccgcatcagttgcaagggcaacacctacgtgcgcaccctgctgatccacggcgcccgcgcggcgttgctggccgccaagcgctgccaggcacgtacgccgcaacgcctgacccagctgcagcgctgggccctgcagacggctgaacgcattggccacaacaaggctgccgtggccctggcgaacaaactggtgaggatctgctgggcggtgtggtgccacgaacgtcgcttcagtggcgactggcagagtgcaaggcccgcctgacggcggggtaatcaggaagacgcgttatttcttgcggttgtggtgagaagcgagactgtcggaacaggcgagtcctgcagtggaacaaggccgataacaatcatgatcttcaggatcgattgaacgcttggcccccgctgcgcgaactacagaatggccagggcactgcccacgacaaggccggatatacgaatgcaaccgcgctgacgacaggatcgaaaaagctttcctcactgcttgtggggagagtccat

SEQ ID NO: 289 - DNA, 1410 bp, unidentified
  source 1..1410: mol_type = unassigned DNA; note = element_ISPa25
tgatggaatggactcctcccgcatcgcccacacggcttcgggagccagactgatatttccatcaggacacgggatcacgagaggagtccgccatgcatgctacgaccgttgcggttgatcttgcaaaagacgtattcgagctggcatttgccgatggccagggtcgggtgatcgaacggaaacggctgacgcggcgggcgtttgcccgcgcgttcgagcagcgaccgccgctgcggatcgtgatggaagcctgcggcagcgcgcaccactgggcgcggcgcttcgtgcggcaggggcacgcggtgcggctgctgccggccagcgacgtgcgcccttacgtgcgtggcaacaagaccgatcgcaacgatgcatccggcatcctcgaggccgaccgctgcggcggcatcgccagcgtgccggtgaagacgccggagcagcaggccatccaggcgcagcaccggttgcgtgagcacctcaagcgcgagcgcacggcgacgatcaatctgctgcgcggcgtgctgcgcgagttcggcatcgtcatcgcacagggcgcggcccgggtgtcggcgcaagtgcgcgatgcgctggaggacggcgacaacgatctgccgatgccgttgcggcacagcctgggcgagcagctgcagcggctgctgcacatccaggcagacatgcgggccatcgaacaacggctcgacgagtacgcgcagcgcgatgtcgccgtgcagcgctaccagcgcgtgccgggagtgggcctgctcaccgccacggccctgcgcgccggtgccggcgacctggcgcggttcaggagcggtcgccagttgtcggcgtggctgggcctgaccccgcgcgagcattcctctggccagcagcgacggctggggcggatgaccaagcgaggcgatgcctacctgcgcaccttgttcattcacggcgcccgcgcggtgttgcaaggcgcgcggctcaagcacaaacgcggccagccgctggatccgctgcaggcctgggcgctgggcgtgcaggacaagcgcggccacaacaaggcggcctgcgcgctggccaacaagctggcgcggcggctgtgggcaatggagcaccacggcaagcccttcgatgcacaccacgtcagccggcaaccgctcgccgcctgacccgccacttcaccgttccacccgatcaggcattgccggaaacatcttgctcatggcgaagggttcggtcccgaagcggaacacgccgataacaatgccggcccacgaggccgcttgaacgataggcacccgcttcgcgacttccatgatggcccgggcgcttgcgcccaccgcaaggccgaatatacgaatgcaaccgcaccgcttcccgaccgcaggatccatcgcgcaattactggttgacggaggagtccatata

SEQ ID NO: 290 - DNA, 1534 bp, unidentified
  source 1..1534: mol_type = unassigned DNA; note = element_ISPa29
gaatgaaagggacttccccgtcccaagcgcagcgcgtatttgcgcagaacggcatcaaagtgccacgatgggaagtgcaatctctcatcaacacgcttgtttcattggaaggggaagtccatgaccatcgtaaccgtaggaatcgacctggcaaagaacgtctttgccgtacacggcgtggatgcggcaggcaagccagccctcgtgcgcccgagcgtagcgcgcagcaacctgctggaactcatcgccaccttgcccccgtgcctgatcggcatggaggcatgctccggcgcccaccactgggcccgggaattcgagaagctcggccacaccgtgcgcctgatggcccccaagttcgtcgccccctaccgcctctcgggcaaacgcggcaagaacgacgcggccgatgccgcagcgatctgcgaagccgtcacccgcccccagatgcgtttcgtgccccacaagagcatcgagcagcaaggccagctcatggtgcaccgcacacgccagggattcgtggaacaacgcaccgccacgctcaaccgcattcggggtctgctctcggagctgggcatcgtgctgcccctcaaagccgccaccgtgcgccgtgaagcgctggcacgcctcgaagagctgcccggctgggccaacactgtcatcggcgatctcttgagtgaagtcacccggcttgatgaacgcatcaccgagtacgaccgccacatcgccctcatggcccgccacagcacccaggcgcagcagttgatgcaactcggcggtattggccagaccaccgccatggcactcatcagcaccgtgggcaatggccacgacttcgcctgcgggcgcagcttcagcgcctggctgggcttggtgcccgggcaatacagctcgggcggcaagcagagattgggacgcatcaccaaagccggagatgcctacctgcgcagcctgctggtgatgggagccagagcggtgcttgccgctgccatgaacacccgcacgcccaagcaagaccccatcagccgctgggcccgcagcctggccgagcgccgaggctactggcgcgccgtggtggccattgccgccaagaacgcccgcatgtgctgggccgtgctgcagcgcggagatgccttcaagatgcccgcgtgagctgggccggctacgcacacagacaccagacaagctgacagatcagaaatccgccgcgtgaaggcagtcgttgatgtgcaaaaggcaaggacctgcgccggggaatgctcggttaactcaaggggacccatgggagccatcccaaagcccgactaacgaatggagcccccggcgcgcgtctttcatcagggtttgctgccaaccagaaggcagcgtaatgaccgtttgtagtcacgccgtccgcaccgtttgccaagaagcatcgacgcgctgcatgcacaaggctgggagctgatctgaaattgacgaaaaccatgcctgggttgatcgctgtgcgatcaacccagggagaggtattgcttgcaaaggtggggaagcccttgta

SEQ ID NO: 291 - DNA, 1216 bp, unidentified
  source 1..1216: mol_type = unassigned DNA; note = element_ISPa34
tttcatcgatcaatcacacgaaaaggggaagtcgccatgcagtctattacagccggtgttgacctcgcaaagcaggtatttgccatttgtctcatggatgatgccggtcatgtaaccggccgccgtgagcttcgccgagatgggtttcatcaatggcttgccgagcaacccgaaggcatgatcgtcgccatggaggcctgcagcagtgctcactactggggccgtgaatgccagcgtcacggcttgcagccacgcctcatggccgcccaattcgtcaaacccttccgcaagcgggctttgatcaagaatgaccggcaggatgccgaagccattgccaccgctgcgcgccaaggcaatatgcgcttcgtggccgtcaaggatgagccacagcaggtgcgtctgagctggcatcgcgtacgggagggttacaagaaggatgccctggccgtgcgcaatcgcttgcgcggtctgctggccgagttcggtgtggttatcccggagtcagtcacggcactcaagcgcaccctggctgatctggatcgccatgaactgccaaccggcctgctacgcctgatccgattgcagcaggaacatctcaagatcatcgaggccggcatggccgaatgtgatgcccgcattgccgagcaagccacagcggatgaacgctgccagcgtctacgcgcgctgaccggtattggcccggtgacggcagatgccgtagtggcctcggtcgggaatgcggccgagttccgcaacggccgccagttcgcggcctggatgggtctgacacccacgcagttcggttcgggaggcaaggtcagcctcgggcacatcagttgtcggggtgatcgttacttgcgtaccttgctaatacagggtgctcgcagcagcctgcagcgagcgaagctgataccaaccgacacagccacgccagagcagcaatggatcgtgcaactggcagcgcgcatgagttacggcaaagtgctggtcgccatcgccaacaagcatgcacgacaggtctgggccatgttggcccgcagcgaggcatacgatccggaggcgtggctcaagcacccgatggtgcagcgaacctgagcctcggggaaaccgagcaacaacatccacgccagagcacacgaggtaacaacgggtcagaccgacccggagagagcctgactaacaagttggttgccactgctggtcgtgattgatcctc

SEQ ID NO: 292 - DNA, 1543 bp, unidentified
  source 1..1543: mol_type = unassigned DNA; note = element_ISPa55
gagtaaaaaggagacttcccgcttcagcggccaggccgctcggcatcgggtgccatgattgcgtttgggcagcacaatcaaacgaaggggaagtctccgatggacactgtaacgaaaatcgtgggtgtggacttggccaagaacgtgttctcgatctgcgagctggatgacggcgggcgcgtacgccagcgccgggacttgcagcgcgccgcgttcacggcttggctggcgcagttgtcggccggcacggtggtggcgatggaagcgtgcagcggcgcacaccattgggcgcggcgttgcctgtcgcacgggctggtaccgaagctgatggcggcgcagttcgtcaaaccgttccgcaagagccaagccaacaagaacgaccgcaacgatgccgaagccatcgccacggccgctcggcaaggcaacatgcgcttcgtgtcggtgaagaccgtcgagcaacaggcccggctgtcctggcaccgggtgcgcgagggctacaagaccgaagcgctgtccatcggcaaccggctgcgcgggctgttggccgagttcggggtggtggtggcgcagagcgataccgcgttgcgccaagccctgggcgatgccgcattgcggtccggtttgccggcgatgctgggcgagctgctggatgccttggccggccactggcggcaggtgcacgaacggctggccgagtgcgatgcgcgcatcgccgcgcacgccaaggcggacgtgcgcagcgtgcgagcgcagcagattctcggcgtcggttcactgaccgccgatgcggtagtggcatcggtgggtgacggccaggacttccgcaacggccggcagttgtctgcatggctgggcctgaccccggtgcaacgctccagcggcggcaaggatcggctggggtcgatcagttgccggggtgacagttacctgcgcacgctgctgatccagggcgcgcgcagcagcgtgcagcgggccaaggccgtggtaccggagaaggccacccccgagcagatatggataaaagacctctgcagccgaatgccattcggcaagctgttggtggccatcgccaacaagcacgcccggcaactgtgggcgatgctggcgcggcaggaggagtacgacgccgaagcgtggctgcgacacccgatggtgcagcggccggcgagccggaagggggcggtgatgcccgcgtaacacgagattcgagttcactcgccagagcgaagcggtaacaagcggtcagaccgccctgcggagagcctgactaactaggtggcatcaccacatgccggaactgatccttccggcatggatgaatccggtgaatgagagaggcccacaggtgcggtttttaccctggtccggatcggcaacgacgatcccacaagaccgattatggaaatgcagtctggcattgcttgaaacaccgcgaagatactggcgaagcaacagcgtagtaagcagtgaaaacaggtagagcgaagccgaaagctcaaggcaagggcgtcatgcacctcgggttgacgggaagctccttatg

SEQ ID NO: 293 - DNA, 1426 bp, unidentified
  source 1..1426: mol_type = unassigned DNA; note = element_ISPa71
tgatgggatggactcctcccgcgtcaccaaacggcttcgaagagccagactgatgtttccatcaggacacgggatcacgagaggagtccacgccatgcatgctagtaccgtcgccatcgatttggcaaaagaagtcttcgagctggccttcgccgatgcgcagggccggatcatcgagcgcaagcgcctctcgcgcagggcgttcatccggtcgctggagacccggccgccgttgcgggtgctgatggaggcctgcgggggtgcgcactgctgggcgcgccgcttccagcgccagggccacgcggtgcgcctgcttcctgcgcgggacgtgcgcccctacgtgcgcggcaacaagaccgaccgcaacgacgtggccgggatactggaagctgatcgctgcgccggcattgcgccggtgccggtcaagaccccggagcagcagggcatccaggcgctgcatcggttgcgcgaacacctcaaggccgaacgcacggccacgctcaacctgctgcggggcgtgctgcgcgagttcggcgtggccgtgccgctggggtcgaccaaggtgcccgccgccgtgcgcgatgcgctggaagacggggacaacgacctgccgatggcgctgcgccacagcctggccgagcagatcgacaggctgtcgcagctggccagggacatgctggcaatcgaacagcggctggaggaattcgcctcgcgggacgtggcagtgcagcgttaccgcacggtcccgggcgtgggtctgctgacggcgaccgcgctacgggccagtgccggcgatctgtcgcgcttccgtagcggacgccagttctcggcgtggctgggcctgaccccgcgcgagcattcctcgggtcagcagcgccggctgggaggcctgaccaagcgcggcgatgtctacgtaagaacgctgctgatccacggcgcccgcgcggtactgcaggcggcgcggatgaagcagcgtcgtggacaagacctcgatccgctgcaggcctgggcactgaaggtccaggacacccgcggccacaacaaggccgcctgcgccctggccaacaagctggcccggcggctgtgggcgatggaccaccacggcacgccgttcgatccgcgccacgtcagcgaacgcccccgcgctgcgtagcgcgacggcttcgacacacgttcaccgcttcaacgtcgagagttgcctgacacgatcttgatcatggcgaagggttcggtcccggagcggacaacgccgataacaatgctggcctggcaggccgcttgaacgataggcacccgccccgcggattccatgatggcccgggcatcaacgcccaccccaaggccggatacacgactgcaaccgcaccgcttcccgacgatcaacgatccgctacggcaacgactgcttgacggaggagtccataca

SEQ ID NO: 294 - DNA, 1140 bp, unidentified
  source 1..1140: mol_type = unassigned DNA; note = element_ISPko7
gcctctgtgcgccaaggtgggtctgcaatgatccacaaaggagagcggtcatgtctgagattatcacggtcggactcgatttggcgaagaatgtgtttcaggttcacggggccgacgctgcgggccgggcggtgctgcgcaagaagctgagaagagaccaggtcctggcattcttcggacagcttccggcctgcgttgtcgcgatggaagcctgtggcggcgcccatttctgggggcgtgagatcgggaagatcgggcatgaggtgcggctgatcccacccgcctacgtgaagccattcgtgaagcgccagaagaatgacatggccgatgccgaagcaatctgcgaggcggcgcagcgcccgacgatgcgcttcgtgccggtgaagagcgaggagacccagggcgctgcaatggtctttcgcatccgcgagttgctgatccggcagagaacccaggccatcaatgccctgcgcgggcatttgggcgagttcggaaagatcgtgccgcagggcgcggctaacgtgtcgaagctgattgccattgtggaagatccggaaggcggtctgcctgccgatgccatccccacgctcaaggtgctggtcgcgaccctcgcccatctcgaggcggagatcagcaagctcgataccgagatcgcccggtgtgcccaggacaatgaggtggcgcggcggctgatgacagtcccggggataggtcctctgattgccacggccatcgcagtcctggctccgccccccgagacgttccgcaaggcgcgcgattttgcggcttggctcggcctcacaccccgtcagcattccacaggcggcaagcagcgccttggggccacgacaaggatgggcgaacggtctttgcggcgcctcctgatcattggcgccaacagcgtcatcatcaaacgccatgtccatgctgcggcccggccgggaacttggctgggcgggatgctgacgcgcaagccgccgatgctggtgcgggtcgcgctggcgaacaagatggcgcggatcgtctgggctctgatggcccggggtggcgtctacaaggctccggctacggcggcgtaagccgtccgtcagtcgcgaggaggtcggagcgtaagagggcaaggagcagcttggcgcaata

SEQ ID NO: 295 - DNA, 1342 bp, unidentified
  source 1..1342: mol_type = unassigned DNA; note = element_ISPlge4
taatgagatggtcacccccaccctgtagcggtaagctgacagggtgttttgttttgggagaaccatcatgaataacgtctctttgattggtattgatctcggcaaaaattcattccacgtccattgccaggacgccacaggcaaagctcttagccgtaaaaaattcacgcgagcgaaattattcgaatttcttgccaattgcccttctgcaactgttgttatggaagcctgtgcaggagctcactatatagctcgtaaaatttctgacatgggtcataaaccaaagctgatttctcctcaatttgtccggccattcgttaaaagcaataagaatgatttcgttgatgctgaagccatatgtgaagcggcatcaagaccatcgatgcgatttgtagcaccaagaactgagtcccagcaggaaatacttgctttacatcgcatacgagaatctctcgtcagagataaagtcaaaacaaccaaccaaatgcatgcttttttactcgaatttgggatcagcatgccaaaaggtcttgcagttatacggagactatccgtagtcctcacggaaaatgaattgcctccctatttggcaaaattgttagtgaagttacagagccattatttatatctggttgaacaaattcgcgatatagaaaatgaactaaaactagcagcgaatcaagatgatacaacccaaaggcttatgtctatcccttcagttggcccgattacagcaagcgtcctgatggcaaacctcggtaacggtcaacaatataaacagagcagggattttgctgcggcaactggtcttgtccccaggcaatacagcactggcggccgaccaacattgttagggatcagtaagcggggaaacaaaaatttgcgaaggttattagtacaatgtgcaagggtgtacatccttcacctcgagcatcagtcgggttatctggcagaatgggtgagacaccaactatcaaaaaaacactcatgcgttgtagcttgcggtctggcaaataaactcgcacgaattgcctgggcgattacgacaaaacagagcgtatatatggcttagtttttttatagattcactaaaatttgttgaaacagcagttaccacctggttttgcgaagactggaaattgatgacatgaacggcaaaccggccagatgaaaaaccctttaaagcagataggctctatgaagccgcgggcttttttatggttcatctggcgcagacctcatcgtggcgcaggtacatgttacctataaacgacgccggatagattcaagcaagccatcattagtcaaaaaacagtcttgcaaaaatgggggtgaccataga

SEQ ID NO: 296 - DNA, 1357 bp, unidentified
  source 1..1357: mol_type = unassigned DNA; note = element_ISPlu13
cataaatgccccaaggtaatgagatggttcccctcactctaacggcagtatattagcagagtgattatctttgataagaggctaccatcatgaacactatcgcactgattggcatcgatctcggcaaacattcttttcatgtccattgtcaggagccatcgggaaaagctctgctacgtaaaaaattcacccgaactaaattgatggaattcttagccgattgctctccggcaacggttgtgatggaagcctgtgctggcgcgcatttcatggcaaggcggatcgctgatttggggcatgaggctaagctgatttcaccgcagtttgtccgtccttttgtcaaaagtaacaagaatgattttattgacgcggaagccatctgtgaagccgcctcacgaccttcaatgcgttttgttcagcccagaacggaagcccaacaagccatgcgagcgttgcatcgtgtccgggaatcactggtccgggataaagtcaaaaccaccaatcagatgcaagctttcctgcttgagtttggcatcagtatgcccaaggggattgccgtgataaaacgactctccactgttttggccgaacatcctcttccaccttatttggcgcaaatattactacggttacaggcgcattatcactatctggttgggcaaatcaccgagattgagaccgcactgtcacaggaaatcattcaggatgataccggacaacggctgatgacgatccccggtattggtcccatcacggcgagtgtgctttcctcacaactgggtgatggaaaacaatattctcgcagccgggattttgcggcctcgacgggtttggttccccgccagtacagcaccgggggaaggacgaccttattgggtatcagtaaacggggtaataagacgctccggcaactgttggtactctgcgcccggtcattcatgcaacagattgaacaccggcagggaaaactggctgactgggttaagcagcagcttgaacgaaagcactctaatatcgtggcctgtgcattggctaataaactcgcccggatagcgtgggccattacgacacaacacacggtatttgtcgcctaaagctggcgtcattgtgaacctatttaaatgttaccccactggttttgcgaagactgattattgatgacatgaacggcctaccggcctgatgagaaacctaacataaaaaatggctctttcaagccgacaaggttttaaggttcatcaggcgcggaactcatcgaggcgcaggctccttgcctacagtgacgccggatagatttaagcaagccaaaaattcatcaaaatgagtgttgcaaaaacgaggggaaccatagattttt

SEQ ID NO: 297 - DNA, 1438 bp, unidentified
  source 1..1438: mol_type = unassigned DNA; note = element_ISPpu11
taatcgatggactcgcccccgccgaggcatcacagtgccacggtggtgttcgaagaagccaacggcagcgagggcgagaccatgaaaaagcatagttcgaaacacgattccctgtcttccactgatgtggagctttgcacaaccatctgcgtagacctggccaaacaggtcttccaattagcaggcgaggacgctactggtcgggtgatctacgaagatcgcatcaaatcccgccaagcgttccacgatttcctgctcaggctgccaacgaccgtggccgtcttgatggagtgcggtccaggtgcgcaagcctgggccaggctgctgcaggccaaaggtaatccggttcgcatcctgccggcgcaacgtgtcgccgaacatcgcagcggtgcaaagaacgatcgtaacgactgctatgccattttgcgtgccggtcgcgatacgagcatcgcttcgataccgatcaagagcaccacagcactggctattcaagcgctgcaccgtatccggcgcggtaacatcaagcgacataccgcgctgggtaatcagatccgtggtttgctacttgagcatggcgtatccatgccccagggcgatgccgcgatcaataagcatgtgcctcaggcgcttgaggatgcttccttgcctctacccgacctgttgcgcgagttgctcgatgagttgctgatggactggttgtctctaggtgaacgcataacggcgctgagccgccggctcgaagcgaccgcccaagaggataaagtcgctcagcggctgatcaccattcgcggcgtcggccctatcattgccacggcgatcgtggcgaaacagaccgaccccagccgcttcgccagtggccgaatgtattccgccttcttcggtatcgtgcccgatcagcacagcagcggaaacaaaatcagattgggcaagatgagcaagcgcggtgacggctacatacgcagcctgatgatccagggcgcgcattccgtcttgagccagctaaggcctgattccgatcagccagatgatcgccgcctcttgcgctggctatcccgccttgggcgcaaggaggcggcgatcaggctggctaatcgaaatctgcggattatctgggccctgttacagagcgatcaggtttaccaacgcaaaccgaacgaaaaaccggaggcggctatgagcctctgaccaaccgggtaatgccaccggggcgctaggcgctccaacccctgctagtgaacattgaccctaggtaagaccgtcgcagaccgatgcctccgctcctacaggcctgatagtggcctcaatgtaaacggcacactgcgagctcaccacgatgttggccagaagcaaaaagcttcctcgaataggcctgatacatagatgcaaccgggttcctatgttcaaaaaagcagctagacagtgtgggcgagtccataca

SEQ ID NO: 298 - DNA, 1371 bp, unidentified
  source 1..1371: mol_type = unassigned DNA; note = element_ISPst6
ggctgtaatggactctccctgcaccacgtttcttctataactccgtggtgactgttcgctgggagaggtgcgatgaaacgcatagcgattgatttggccaagtccgtttaccaagttgccgagagtgtccaggtcggccgagttgatcggcgcaagcggctcgatgccggggcatttacgcgatatgtacaggagcagatcgaacctgtcgagtgggtgatggaagcctgtggcacggctcaccattggggccggttgatgcaggaaaaaggccatcgcgtcgtgctcttacaccctcgatacgtgcgcccgtatcggcggcgcaacaagaccgatcgcaacgactgcgacgccattctggaagcagcacgctgccaggatattcgcccggtgccagtcaaaagtgtgcaacagcagcaagtccaacagctgcataagttgcgcgagggttggaagaagtcccgcgtgcaacgcatcaacctgttgcgcggcatcctgcgtgaggctggggttgaagcaccgaacggcatcaagccatttctgcgccaagcgtgcgaactgatcgaacggcccgaagtgcgtgcactgcgtggggcgctgcaagtggtactggccgagatcaacttgtatgaacagtcgatgcgcgagtgcgaagaacaactggcgcgctggcatgcggacgatgagatcgtgcacaagctcgacgaagtcagcggcatcggcctgctgactgccagtgccttgaaaacagccgtcggcaaacccgagcgcttcgccagtggccggcacctaagcgcctggctgggcatgacgcccagcgaatacagcagtggcgagcggcgacgcctaggacgaatcagctgtaagggcaacgtctacgtgcgcaccttgctgattcatggcgcacgagcggcgctactggcagccaagcgctgcaaggcgcgaacaccggagcgcctgacccagttgcaaagttgggcgctgcaaaccgccgaacgcatcggccacaacaaggccgcggtggcgctggcaaacaaactggtgaggatctgctgggcggtgtggtgccatgaacgacggttcagcggtaactggcacagcacaaagcccgcctgacggcgaggtaaataatgaggtgagtgtctagtggttgtggtgagaagcgagactgtcggaacaggcgagtcctgcagcggaacaaggccgataacaatgatgatcttcgtgatcgtttgaacgcttggcccctgctgcgcgaactacagaatggccagggcaatgcccagaacaggccggatatacgaatgcaaccgcgctgacgacaggatcgaaaaaagctattcctcactgcttgtggggagagtccatata

SEQ ID NO: 299 - DNA, 1701 bp, unidentified
  source 1..1701: mol_type = unassigned DNA; note = element_ISPsy35
ccgtcccgccgctacgcgccgcgctgtcgcgcagcaaactgggtgctcgactcagctcctgttgtgatgctgagactttgaaaagcaaagagcggctgccccgtcaggggcagccgctttttcgctttgccaggattgaggagcgcgggacagaggccggtactcacattggtgtgacagcacccgcgtgggagagtggcccgcacggtatcggcgtggagtccttgtcggcacggctagccgtgaccacgtatgagagagtgaaccctttcgccaccgtgtgccccgcgcgcccatcatcctgcgaggaattagcatggcgcgcaaccaatccagacagcgttttgaactggtccatccgcattgtgccggtatcgacatcggtagccgcgaacattgggtcgccgttgatcgtgatcatgagcaaccggtacgcagcttttccaccttcaccgacgacctcatcaagctggccgattggcttgaaactctgaagatcgaggtcgtggccatggaagccactggcgtttactggattccactgtttgagcttcttgatgcgcggggcttcaaggtctatctggtcaactcacgcgcgacgcgccagatttccggtcgtaaatccgatgttctcgattgccagtggatatggcaactgatgagccatggcctgctacgcggagcgtttcgccctgacgatgccatctgttccatgcgggcgctcattcgccaacgagccagcaaagttcgcaatcaggcccagacattgaaccgcatgcaaaaagcgctgagtcagatgaacatccagctcgccaatgtcatcagcgatatttcaggcgtgaccggcatgaaaattctacgtgcgatcattgccggcgaacgcgacccggctgttctggccgagttgactgatcggcggatcaaggccagcaaagagaccatcgcccgcagcctgcacggtaattggcgtctggagcacctgcatgcgctcgggcaagaagtggagtgctacgacttctttgagcagcagattggcgcgtgcgacaaggcaattacggacgcgcttagtcagttgcccgagcgcgaggaagccccgcaaccctcacgaaaaattctgcgtagccctcaccgctgcgcagcagatcaggcggccctgcatcagtcactttggcgcgtcatgggtgttgatctcaccgccataccgaccatcggcgtcgatacggccctgatcattgccggcgaaattgggccggatctgtcccgatttcctacgatggagcatttctgctcatggctgggcgtggcaccaccgacacggatttcgggtggccgtcaactgtcaggtaaaagtcagaaaacgctcaacaatgcagctcaggcgctcaagcaagcggcctctaacgcacgaaacgacaaaagcttcatcggtgccagccatagagcccgactggcgcggatggacaccagttgcgcgatcaaggccacggctcaccaacttgcccggttgatctacgcgatgctgaccaagggccagccgtatgttgaacaggggatcgaagcgtttgaagaacggagcaaagaaaagcagtaccgtgccttgctgcgcaaggcacggaaactgggattggacttggtgaaggcctcttaaattgtgcaaagaaatcagagacttattttttgtttgatgagagtgagcttgct

SEQ ID NO: 300 - DNA, 1201 bp, unidentified
  source 1..1201: mol_type = unassigned DNA; note = element_ISPtu2
atggataataaacccatcaaattattcttttaaaccgagttcgggtaatgtgagacccaggctttagctgcaactaaagctctcttttgtggtagttcgattgagcgatggatcctctgttgagagaccgataacaagaatgaacgccacaaaagactccaagcatcacactcgaatagtctactgggtctcgaacccgcattatgcaagcaagagttagcttattatgaaaacaaatactaatcaaaacattaatgtcggtgtcgataccggcaaatttcaactcgatatttatattcgccctcttgatatctatttcaccgttaagaacgatgaaaaagggattgcagaggctattaaaaaaatcaaaattcactctccaaaccgcatcattattgaagccactggccgccttgaaatgccctttattattgcatgtgcaaaggccaatttaccctttgtcattgccaacccaatacacataaaacgctttgctggcgccattggtcaacgcgctaaaaccgataagctagatgcacagttaattgcacattatggcgaggcaattaaacccacactctccaccctaaagcctgacattatgcagactatgagtgatttggttgccagaagaaatcagctgttagtcatgcaaacgatggaaaaaaaccgcctgcaaattttaccaaaagagctgatttcaaccatcaaacctattttaacggcctttaaaaatcagattaaaaaaattgaaaataaaattctaaaactcattgaatcatgccctgaatattcagccaaaaacacgatcctgcaaagcatgaaaggcattggtaaaattgccgctgcctccatcatcagtaacttacctgagcttggctatatgtcgaataaagaagccggtgcattggttggcgttgcgcctatgaatcgcgaaagtggccgctataaagggcttcgaaaaattcaaggtgggcggcatcaagtacgcaccgttttatacatggcgatgatgtcagccatccaatcaaaccctgtttttaaatcaacttatcagcgattagttgctgctgggaaaccgaaaaaagtagcgcttattgcgtgtgtcaggaagatgattgtgatcttaaattcgatgctcagagacggagtaatgtgggaagcgccaaaagtttaaaattagctattgacgccatagtct

SEQ ID NO: 301 - DNA, 1522 bp, unidentified
  source 1..1522: mol_type = unassigned DNA; note = element_ISPye19
accccatgatcgctgggtgagctgactgggtaggcggcctctcccgcggcattctccgttcgagggttgcaccagattggctggtgccgagcctcaagaatgggggagagaccacatggagagtaacacgtttatcgggctggacgtccataaggcgtcgatctctgtcgccgttgcgcgtggcgagcgaggcggtgaggttcggcactggggctccgtggcgaaccggcctgatcacatccgcaagctggtggaaaagctggccgcgagcggggcgcagctgcggttttgctatgaggctggcccctgcggctatggccttcaccgccagctggtcgagatggggcatgactgcatcgtggtcgcgccctcgctgatcccgctgaaggccggggaccgggtgaagacggaccgccgcgatgcgctgatgctggccaagcttcaccgggcgggcgagctgacggcggtctgggtgccggatgcagcccatgaggcgatgcgcgatctgatccgggcgcgggccgtggcgatgcgggtgaccggcaaggcgcgccagcatctacagggctttctgctccgccacggccggatctatcctggcaagaagggctggaccggaccctatcggcgctggctcgcgctggtgcgcttcacgcagcctgcgcaacagatcgttctgcaggattacatcgacgctgtcgctgatgccgaggcgcgggtggagcggctgaccggacagattgcggatctgctgccgcagtggagcctcgcgccggtggtagcggcggttcaggcgatgcgcggggtcgggttcatcgtcgcggtgacggtcgtggcggaggtcggggacttccaccgcttcgacagtccgcgccagctgatggcctatcttgggctgacaccgtcggagcattccaccggggccagtgtgcgccggggcgggatcacaaaggcgggcagcggcctcgccagacgcgcgcttatcgagggggcctggagttatcggatgcaggcgcggatcagcgtgaagcttctggcccggctcgaggcgctgccccaggtggtgcgcgacatcgcctggaaggggcaactcaggatgtgccagcgataccgccatctggttgcagcgggaaaggcgaaggtcgtcgtcgtgacggcggttgcgcgcgagatgctgggctttgtctgggcgatcgccagagcggtgacggcgccgcctgtgtcgccggtcgccacggccgtctgaaacggaaagaccgcctcgatcaggccgatgcgcagagttgggggcggaacgcggtggggaacccgtgccctgttatgggccgacactgtcgatgcccgatccttagaccgaggcagccccaagacgaaaccacggtcatgcggtagccaacccgcgcatgagagcttgctcaaccgtcgtctcagttccgcctcctgccctgcgcatctataccacaacgcacccggccgagccggaatatctgtcgtggaataaggggttgactgcgatcatgag

SEQ ID NO: 302 - DNA, 1354 bp, unidentified
  source 1..1354: mol_type = unassigned DNA; note = element_ISPye22
atggtgtgattgcggcggtcgctctccggtggtgcacgaagtccggtatgctggcctcacgagaaaacgccgtgaggagaacgaccatggactactatgccggtttggacgtttcgctgaaggaaatctcgatctgcgtcgttgacgagggcggcaggaccgttgcccgaggtgtctgtcctgctgaccctgaaggtgtggcgggctggttttgcacgaggttgctgtcgcccaggaagattgtgcatgaaagcgggcagctatcgatctggcttcagcgcggcctggagcggctggggcttcccgcgctttgtattgacgcccgcagggcgcataagagcctgtctgcgcggcccaacaaatccgatgccgctgatgcggaaggtctcgcgcaactggcacgcacaggctggttcacgccggtccacgttcgcagcgaggaatcagatcggctgcgctctctgatcggtgcgcgtgcgcagctgatcagcctccgcaaggacctcgaaggccacgttcggggaattctgaagaccttcggcatccgtttgacagggatcgggaaaggtgggcagcggcaggcctttcgtgaccaactcgcggctgcgggcgcgcgggatctagtgctgcgcactattgccgacggcttcatcgccgcccatgccaccctttgccaggccgctgcggagctcgattctgcggtgaaggagaaggcaacgaagcatcccgtcgtccgccggttgatgaccattccgggtgtcggcgccatcgttgcactgagctttgtcgctctggtcgatgatccggggcggtttcagaaatccgagaatgttggtgccttcctgggcctcactcctcgaaggcatcagtctggaggagtggattggtccgggcgcatatcgaaatgcggggatggggccatgcggaacctgctgttcgaggcggcgagtgccttgatcggtcgggtacagcgtttctcgacgctgaaaagctgggctgtgcggcttgctggacggcgcgggttcgccaaggcggctgtggcgaccgcgcggaagctcgctgtgctgatgctgacgttgtggaaaaacgagaccgagtacaaatggaaagaggaggccgtagcctgacctgagctcccgccccgggcggcgggcagagcggtcccgaagggggcggaggttggtcgatctcgtgctgggccgatggggatgcggatcattccgcacaacccgatccatacattggagacgaccgccaccggataccatcatgaggcgcaaatctcgacctcgaagagaaccatgaccctggacggacgaaccgctttcccgcttgacaatgccgcaatcagaga

SEQ ID NO: 303 - DNA, 1452 bp, unidentified
  source 1..1452: mol_type = unassigned DNA; note = element_ISPye25
atgccgtaacggggcctgcgtctcgacccgcccgttgctgttgcaagatcgagggcaagctgacgccattcccgtattggatccacatggaggagtgcgggatgaagctgtttgtcgggctggatgtgtcgctggagaagaccgcgatctgcgtgatcagcgcgcatgggaagatcgtgaaggaggcgcaggtggccagcgagcccgaagcgctttcgtgctggatctgcgatcagaacggcgcaattgccgccgtcgggcttgaggctggccccttgtcgcagtggttgcatcgcgggttgtcagatgcgggactacctgtcgttctgatggaaaccagacaggtaaaaggcgccctgaaggccatgccgatcaagacggaccggcgggatgcagagggtattgcacgtctgcttcatcttggttggttccgacccgttcattgcaaatcggtgtctgcacaggaggttagggcagtgctcagcgctcgtaaggctgtgcaacaagggtttatcacgctggaaatgtcactgcgcggtctgctgcggaacttcgggctcaaggttggcaccatatcccgtggtaggttcgaacagcgtatccgcgaactggcggcgggcaatctgatgctggaagcggcaaccgaacccatgcttcgcgcgcgctcggcgctgcggcgagagttggcgggtcttgaacgcaatgtccgtcaactcgcccaggaggatccggtctgtcgtcggctgatgtcgatgcccgggatcggcgccgtcgtggcgttgacctatcgatctgctgtcgatgatcccgctcgcttcacatcctcgaagaaggtcggaccgtgggtcggcctgacgccgtctcgcaaccagtcgggcgagcgcgacgtctcgggcgggatcaccaaggcaggcgacgtcaaccttcgacgcgcgctgtgccaggcggcaaccgtcatgatgcatcgtggacgggcgagctggctgcgaacctgggcggcaaaacttgcgcgccgtcgtggtgccaagcgcgcgatggttgcgctggcccgccgcatcgccgtgatcctgcaccggatgtggaaggataacaccgatttccgctttgacattccggtgcttcatgccggctgaaaatacaggttccagattgctgcccgcctgatcgcgggcctttgaggtccccacgggacgcggttccggtgatgccgtgctcaggactgatgccgatcgtatcgagcacgccaatgagatgggcacaccggaattgcattgaaccagcatcatgttggcggccacagcgctgaccacggaccgaagcatgcacccgggtcgatctcaggcgaaggctgccgaacagggaagcagatcaattgctcgaagaacaagaccgcgctccggcggcacatcccgtatgcgcaaaatcgcttgactgggatgaccccgttaccga

SEQ ID NO: 304 - DNA, 1363 bp, unidentified
  source 1..1363: mol_type = unassigned DNA; note = element_ISPye26
atgatgtgaccgccccccgacggcatctgatgtgccagggtgggtttgcaacgatccacaaaggggagcggtcatgtcggatattaccacggtcgggctcgatcttgcgaaggatgtgttccaggtgcatggagccgacggcgcaggccgcgccgttctacgcaagaagttgcggcgcacccaggtgctggaatttttcagccagctgcgcccttgcatcgtggcgatggaggcctgtggcggcgcgcatttctggggccgtgagatcggcaagctgggtcatgacgtgcggctgatcccgcctgcctatgtgaagccgtttgtgaagcgccaaaagaatgatgccgccgatgcggaggccatctgcgaggcggctatgcgcccgacgatgcgctttgttccggtcaagagcgaagagacccaaggcgcggcaatggtctttcgcgtgcgcgagctgctgatccggcagcgcacgcaagccatcaatgcattacgcggccatctgaccgagttcggtcagatcgtgccgcaaggggcatccaacgccacacgcctaatcgcgatcgtggaagatccggaaagtgacctgcctgccgatgccattcccacgctgaaggttctggtcgcggcgctcatgcacctggaggcggagatcgccaagctcgatgcggagatcgcccgtcgcgccaaggagaatgacgtagcccagcgattgatgacggttccgggcatcggccccctgatcgcgacagccattgctgttctggctccacctcccgagaccttccgcaaggcacgcgactttgccgcctggctgggtctggtgccaagacagcattcgaccgggggcaagcagcgcctcggggccacgacaaagatgggcgaacgatccctcaggcgtctgctgatccttggtgccaacagcgtcatcatcaagcgtcaggtccatgccgcggcgcaaccgggcacctggctggcaggcatgctgtcgcgcaagccaccgatgctggtgcgcgtcgcactggccaacaagatggcacgcattgtctgggccctgatggcgaagggccaggactatcgagctccggctgcgacggcgtaagccgagcatcagtcgcgaggacgtcggagcggaagagggcaaggagcagtttggcgcaacagtcgtgagacgggatcgggagaaccagtgtgcaacagagtgcctatgagcacgcggctttgatctggacccgaccttcgaacaccatacgggccctgcggcatggatcgcgccgcatcatgaggccggacacatgtcagcacccgatgacgcgccaagaccagttcagaaaatccctcttgcgcttggggcggttacaca

SEQ ID NO: 305 - DNA, 1351 bp, unidentified
  source 1..1351: mol_type = unassigned DNA; note = element_ISPye27
atggagtggatggctcccgctcccggcatcacaatgtgccacattggttgctgtcagagtgaccaatgaagggagccatccatgaaggagattaccacggtcgggctggatctggccaagaacttgttccaggttcatgccgttgatgagaacggcgctgttctcgtgcggcggcaggtcaggcgggcacaggtcctgctgttcttctcacgcttgcacccctgtctcattggcattgaagcctgcgcgggagctcatcactgggcgcgggaactggcaaagcttggccatgacgtgcggctgatcccgccttcctatgtcaaaccctttgttaagcggggcaagactgatgcggccgatgcagaggccatctgcgaagccgtcattcgccccaacatgcgctttgtgccgctgaagaccgagaagcagcaggcggtgctgatgcagcaccgggcacgtgattttctggtccgtcagctgacacaacttgccaacgcgatccgggcacatctgggcgagttcggcattgtcgttccgaaaggcgtccataacatgggtcgcctcattgccgaggctgagacagctggtctgccgccagaggcacggatgccactcgacctgcttgccggccagttccgcgacaccaagcagcgcatcgatgtcatgacggctcagatcaaagccgatgcggaagtggacgagacagcccgtcggctccagacaatgcccggcatcgggcccattaccgccagcgttctggcggcaacgttgcccaatgtgtcgagcttccggtcagcccgtgatctgcctgcctggctggggctcacgcccaagccccattcaagtggcggcaaggaacggccgggctccatttccaagatgggcaaccggtatatccgacggctgctctctcttggcgccatgggcgtgatctccgcgcgcaggctttctgaacccagcacagattggctgggccgcctggtcgcgacaaagccgctcaaggttgcagccatcgctttggccaatcgcatggcgcgggcgatctgggccatgctgaaaacgggcgaagcctggagaccggcttgagcagataggattgcaggccgctgctgctggcctgaacgaggtggcgagggcagagtgagatgatggcaaactgacggacatgaggaagggacaccccgttcggaccggagcgccttaagcgcgtgccattgatagggacccgggcctcaggcggacgttcatcagggcgcgcgggatcaccgcagatcagacgccgaatacatggccgcacccgaccagttgtcgaacataacaagcctcttgccacgcgggagccatccataca

SEQ ID NO: 306 - DNA, 1468 bp, unidentified
  source 1..1468: mol_type = unassigned DNA; note = element_ISPye32
atcgggcatgctgttatcggcgcccttcgaatggcacacgattctgacctggtcatggtagagttgccgtgtcgggacaggggcgtcggagtgcgaagaagcgggcaggccgaattgactatgagctgcgagctcgcgttgttatctggccgcccctgcgactatcccgtctgcgctgcgagcgcgtatccgtagatgtcgcacagcccgcgcactccccatcggcaacagggaggattttgcatgcgatccattggaatggatgtccaccgaagcttcgcgcaggtcgcgatccttgagggaggaaagacgacagagatcaggatcgatcttgatcatgaagcggtggtggccttcgggcaggccctacgttcagatgacgaggtcgttctggaagcgaccggcaataccgcggccatcgtcagacttctgacacctttcgtggcgcgggtcgtcatcgcgaacccgctgcaggtgaaggccatcgcccatgcacgggtgaagaccgacaaggtggacgccaaaattctggcgcaacttcatgccgcagggttcctgccagaagtctgggccgcagatgatcagacgctgaacctgcggcgcctcgtttccgaacgcgccgcagcggtgagatcaatccgccgggtcaagagccgggttcaggctgttctgcatgcgaaccttgtcgccaaatataccgggcacctgtttggcaagggcggcaggagatggctggcctcggcaccgctgccgaaggcagaacgtgatctgctgatccggcatctggatgagttggactggctggggggtaagctggcaaaactggaccaaacattggcgggaattgcactcgacgacagccgaatgcgcaagttgatgagcatcgccgggatcaatgtcgcggtcgccactgcggttatcgccgcgatcggcgacatctcccgcttttccgcaccggatcgtctcgcaagctatttcgggctgacaccccggatccgacagtccggcgatcgcggtgccatccatggtcggatctcaaagcaggggaatacgatcgggcgcaccatgctgatagaggccgcctggtcggcggcttccgtgccaggcccgttgcgggccttctttcttcggatcaaggatcgcaaggggcacaacgtcgccgccgtcgcgaccgcgcgcaagattgcagcgctgatctggcaactgctgacaaaggaggccccctatcgatgggcgcgcccggcctttgtcgcgatgaagatgcggaagcttgagttgcgcgccggggccccgcgggctcatgggccagcaggtccgggccacgactattggatcaaggaaatccgtcaccgggagatggaactcgtcgcacaagcagaagcggcctatgcccgcatggttgaagcgtggagggacaaaccatcaaaaccgaacaagacctgagaaaggggctgttcaacaacatccg

SEQ ID NO: 307 - DNA, 1361 bp, unidentified
  source 1..1361: mol_type = unassigned DNA; note = element_ISPye46
atgatgtgaccgcccccccgacggcttcgctgtgccagggtgggtctgggacgatccacagaggggagaggtcatgtcggagattaccacgatcgggctcgatcttgcgaagcatgtgtttcagcttcacggggccgacgcttctgggcgagcggtgctgcgcaagaagcttcggcgggaccaggtgctggcgttcttcagccagctaccatcctgcgtcgtcgtgatggaggcgtgcggtggcgcccatttctggggtcgtgagatcgggaagctgggccatgaggtgcggctcatcccgccggcctatgtgaagccttttgtgaagcgccagaagaacgatgtcggcgatgcggaagcgatctgtgaagcggcgctgcgcccgacgatgcgcttcgtgccggtgaagagcgaggagacccaaggggcggcgatggtcttccgggtgcgcgagcttctgatccggcagcgcacgcaggcgatcaatgccctgcgcggtcacttggccgagttcgggcagatcgtgccccagggtgcggccaacgccgcgcggctgatcgcgatcgtcgagaaccaggacagcgacctgccagcagacgccatcgccacgctgaaggtgctggtcgcggcgctcatccacctcgagacggagatcgccaggctcgatgccgagatcgcccgtcgcgccaaggaggacgaggtggcccggcggctgatgacggtgcccggcatcggtccgctgatcgccacggccctcgcggtcctggccccgccacccggaacgttccgcaaggctcgggactttgcggcctggctcggcctcacgccgcggcagcattcgaccggcggcaagcagcggctcggggccacgacgaagatgggcgaacgctccctcaggcgattgctgatcctcggcgccaacagcgtcatcatcaagcggcatgtccatgccgcagcccggccaggcacctggctgggcgggatgctgacccgcaagccaccgatgctggtgcgggtggcgctggcgaacaagatggcgcggatcgtctgggccctgatggccaagggcggcgtctaccagtctccggccgcagcggcgtaagccgtctgtcggtcgcgaggacgtcggagcggaggagggcaaggagcagtttggcgcaacggtcgtgagacgggatcgggagacccagggtgcaacagagtgccatcgagcacgcggctttgatctggacccgacccgcggacaccatacgggcccgcggcatgacgatggccgcatcagaggccggacacatgtcggcacccgacaccgcgccaacatcagctccgaagatcccccttgcgcttggggcggttacaca

SEQ ID NO: 308 - DNA, 1457 bp, unidentified
  source 1..1457: mol_type = unassigned DNA; note = element_ISPye48
atgccgtaacggggcctgcgtcgcgacccacgtgttaccgttgccaagccgagggcaagctggcgccattcccgtatcagatgcattgggaggacttcgggatgaagctgtttgtcggactggacgtgtcgcttgagaagaccgcaatctgcgttgtcagcgaacatgggaaaatcgagagggaggcgcaggcggccagcgagccggaagcgctgacgcgttggatggggcacctcgacggcactatcgccgccatcggccttgaggctggccccctgtcgcaatggctgtatcgcgggctgaccgaggcgggtctcgacgtcgtgctgatggaaacccggcaggtgaaaggcgctctgaaggccatgccgatcaagaccgatcggcgggatgctgaggggatagcacgcctcctgcacctcggctggttccggccggtccactgtaaatccgtttcggcacaggaggttcgtgctgtgctgggcgcccgcaaggcggttcagcagggcatgatcgccttggagatgtcgctgcgagggctcctgcgaaacttcggcctgaaggtcggtgcgatctcccgcggccggttcgaggcccgtatccgggaactcgcgacgggcaatcccatgctcgtggccgccactgagcctttgcttcgggcgcgtgccgccttgcgacaggaactggccggcctagaaaggcgggtccgtcaactcgcgcaagacgaccctgtctgtcatcggttgatgtcaatgccagggatcggcgcggtcgtggcactgacattccgctcggcggtggatgaccccgcccggttcacttcctcgaagaaggtcgggccatgggtcggcctgacaccctcgcgcaatcagtccggtgagcgggacgtgtcgggcgggatcaccaaggcgggcgacgtgaacctgcgccgggccttgtgccaggcagcgaccgttatgatgcaccgcgggcgggcgacttggctgagggcatgggcggcacaggttgctcgtcgtcgtggccggaggcgtgcgatggttgcgctggcgcggcggatcggcgtgatcctgcatcggatgtggcgtgatggcaccgtattctggattgagccatcggtcacctcccatgcggcgtaaacctctgaagctttatctgttgcctgcctgaccgcaggccttcgaggtcccccagggacgcggttccgacgatgtcgtggtctagactgttgccggccgacaagctcgagcacgccaatgagatgggcacgtcggaattgcatcgaaccagcatcatgttggcagccacgcgctgaccacggaccgaagcatgcacccggggtgatcacaaccaaaggccgcatccgcagaatggcgacgaaagtcatcttgctatcgccgcccttgggcgtccgggaccgtctgtcgaaaactccttgacccagacagccccgttaccga

SEQ ID NO: 309 - DNA, 1638 bp, unidentified
  source 1..1638: mol_type = unassigned DNA; note = element_ISRel25
aacaccttcggaagtctgcgttgaatgaggctttgaccagctgcgtagcccccatcaggcgaagcaggtggtcatagccaggcctcaggtctcacagtggttttgcgaagccacactgtaaaggagacaggctatgaccgattgtgacattaccgcatttacccccgttctggcagctatcgatgtttccaaagaacgccacgaggtgctgatcgaagcaccggacaaaaagcgtcgacgtcgagtgatcgtgctcaacaatctcgatgagttcgatcgcctcatcggcctgctgcgtagctatcagcgtcctgtccgtgtcgcctttgaggcaacgggaaactatcatcgcgcattggcatatcggctcggcttagcgggcttcgagatcaaattgatctcgtccatcgcactggctcggaccagggaggcactgcataattcctgggataaaaatgatccaaaggatgcccaggttatcctccatatgatgaccattggtgccgagcagttctaccatgacccgttgatgcgcggcaccaacgacattcaggagttgtcgaagacccacgatatgatctcaaggtcgaagaccgaactgtggcatcggattctgacgcattacctgccgttgtatttccctgaagcggatcgcttccaccgcagttcgcgcagcgactggttctttgctttccttgaactgtttccgtctccgcacttcatcgcagccatgaacaaggacgctttcatcaaagctgcctgggaggtggttggtcgcaaagttggcaaagagcgtttgttggcagatatttacgcaacgtccgcccgttcgataggccttccagttgcaccggactctgacgctatctgcatgtttcgtatgatcctggccgagggcagaagcctaatcgcccaacgtaatgagatcgaggcgcgtgcggttgcgatgctgaaggacaacgcagattaccagctcttatgcacaatccccggcattggcccaatcaatgctctgacaatcatggcagaagctggggacctgcgccggtttcaacaccatcgccagttcctgaagttctgcggcatggatcttgcgacaatccagtcaggaatgtttcgaggccagaccaaactctccaaatatggaaatgcacggctgaggcggaccttatggatggcagctcaagtcgcgatattgcagcgcgccaacagcttccgcgacaagttcgagcgatacatcaccaaggaccgtcacaacacccatttacgtcgcaaggcgtcaacagcaatcgccgccaagatggcccgcaccgtacatgcggttatcaaaagcggtgaaccttatcgccccttctttgaagggacgatccacagcggaaggacccttctctgacagtgccgtggaggcgttgagctgctcagcgacctcgtagataatgttcaggccttccgctcgacggcaaaaaggatctcgtcttaaggacggtgagagccgcgatcatgcgtactctgtgtttgttatgggagagaccgttcgttgacgattggccgggcctacatcataattcaaacgcatcgggagaccgacgcgataacgacctgctgccaaaacggcgtttcattccgattataggacgt

SEQ ID NO: 310 - DNA, 1553 bp, unidentified
  source 1..1553: mol_type = unassigned DNA; note = element_ISRel9
tcccatgaggagtgaacagcggccgccgctctggcagagtgaggttgcatcaaaacactcgctcaggaggagcagtttatggaacctgcatccattcatccgaccgctgtccgcattgatcttggcgcaatttttgtatcattggaactgagccgatcgacctggttgatcacttcgctgtcgcctggcagtggcgagaagatgtcgaagcacgtagtggccggtggcaatgtagccgagctgctggatcgatttgagcagctacaacagaaggcgcggttgagaacagggaagttatttcccatcgtgacgatccaggaggcaggattggacggcttctggatacaccgcgtgctggagactcacggcatcgaaagttacgtcgtcgacgcagcttcgatcgcgacttcccgtcgacgtcggcgtgccaagaccgacaagatcgatggagaggctctgacgcgcacattgcttgcattcaagcgcggcgagcctcgcgtatgtgcgatggtcagagcgccagatccgaaggacgaagatcgacgtcggatttgccgggaacgcaaagttttgattgctgagcgggtcaggcatgtcaatcgcgtgaaggggctactcttcgctcaaggcgtcagcggctatcaaccgctccgtaaggatcgccgtcagcggctggaggaactccagaccggagatgggcgcgagttaccgaaacacctgaaggctcaaatcaatcgcgaactcgaccgtctcgagttgctgctagaacagatcgctgcagtggagagcgagcgtaattctctcctatcgatggacgagcagccagcggttgaggcaacctcgcccgcagcgatgctgctgtccttgaagggtgttggcgctgaatttgccgccgttctttggaccgaagccctgtcccggcattttgataatcggcggcagattgccgcctatgcaggtttgacaccaaccccatggatgagcgggaccatcgaccacgaacagggtgtctcaaaggcaggaaaccctcggctgcgcaccacgatgatccaactgtcttggttgtggctacgcaatcagccagcatcagcgcttagccgttggtttgtggatcgggttcagtcgaatggtggacgcttaaaaaaagccgcgatagtggccctggcgcgcaaactccttatcgcactgtggaagtttgtcaccgcgggtgttgtcatcgagggggctgtcatgaagaccgcctgacgaccccaaaagattgccgaatacacaaatcttccaggactgatcactcctggcggatccaggtgagcgaaccgcctcaaagtcgggctttaaatgccgcgctttagattggtcccgttctcctgagccttgccgctacgcaagcgggataatggtgctgccggacaaaacggcgaccgtatgtgagtttgaaccggtgacggaaacgtgccgcgtcaagcaaagtggctcagaccatgggttcgaaacgaaattgaagggaacaagctatgaaactatgattgatcttgacggcaaaatcctcatgt

SEQ ID NO: 311 - DNA, 1409 bp, unidentified
  source 1..1409: mol_type = unassigned DNA; note = element_ISRle1
gtgatggatggcgccctccgacggcatcgagtgtgccaagataggttgttgcaaaacctttgaggggagccatccaccatggaagagattacgacgattggtgttgatatcgcaaaaaatgttttccagcttcacggcattaacgctgaaggacaggtcgttctgcgcaaggccctgagacgcggacagatgcaaccattcttcgaggcgctttccccttgcctgattggcatggaagcctgcgcgacagcgcatcactgggcgcgaacgctgatagcatctggccatgatgtccggctaatcccgccgaactacatcaagccgtaccttcgccgacagaagaacgatgcagccgatgctgcagccatctgcgaggccgtcacgcggccgtcgatgcggttcgttccggtcaagaccgaggaccagcaagcaacgttgatgttgcacagcgcacgcgagctgctgatctcgcaacggactgcgcttatcaatgccttgcgtggtcactttgccgagcttggcattgtggccccacagggcgctcgcaatgtccggcagttgatcgccattctggaagatgaacgatacagcccacaagctgttcgcactgctctggcgcctttggcgacagtgttgatagagatcgaggggcagatcacaaagctcgacaaggcgctccttgccgcccatcgcaacaacgatgtcagtatccggcttgcgaccgttcccggaattggccccgtcatcgcaacttgcctttcggccagcgtctcagagccaaagctgttcgagggcggtcgtgagtttgccgcctggctcggtctcgttcccaggcaacattcgaccggtggcaaaccaaggctgggttccatttccaaaatgggcaaccggcacctgcgtaaactcctcgtggtcggggcgtacgcagccctctacaggatgaagaaggggacggctgatacgcctctggcgaactgggcgcgtggcttgttgtcgaagaagcccttcaagcttgttgcagtcgcgctcgccaacaagattgcccgcattgcctgggcgattatggcgaggaacgtgaacttccagtcggagcacgtttcgagatgctccgatctgattccggcttaagcgaaagggccttcacggtcattgctctacggggtaaaccagttggcggagtgacgatggtatgatgtgacagcgaaagcggaatggaccgcacgaactgaagaacccgtggcatcgtatagcgccccaaagcgcggtaagttgatagggatcggttcaagcggacaacatcagggccagcggtcatcacgcgccgcataaataggccggagacatgactgcacccgacccgcaaagctcaaacatcggccaaaatcacattgccaaacgggcgccatcca

SEQ ID NO: 312 - DNA, 1574 bp, unidentified
  source 1..1574: mol_type = unassigned DNA; note = element_ISRta3
ggttgggtgctgttggtgacatgctgtcggcttttgaaccgcctggttccgccctgctgggcgggtcactttttggccgagcgccaaaaagatggaatgaacgcgccccggcccgctccgattaaaggcgccggcaattcaagttgtgacatctggggaacgtgaagggtaggcgggtccccccatcacgaaacggcatcgatgtgccagagtgggagtgtgagcaaccacgcgaggatggagggacccgagatgaatactacgacttacggcctcgacattgcaaagactgtcttccagctctattgggtcgagccttccggcaagtgttgcaaccgccgcttcaaccgtacgaagctgatcgagttcctggccaagcgcgagccgggacgggtagcgctggaagcgtgcgcgagcgcgcattggtgggcgcgtcagttgcagggcttgggccacaagccggtgctgctgcacgcgcgctatgtgcgcccgttcgtgcagaccaataaaaccgatgcggccgatgcgaaggcaatctggactgcagcgcaacagccgggcatgcgcgaggtggcgccaaagtccgaaacccagcagtgcgtgctggcggtgcatgccatgcgttcgctgcgcatcaagatgcgaacgatgctggtcaaccagttgcgaggcatgctggttgaattcggcatccacttccgacgcggccgccaggccgggctcgacgagatcgtgcaacgtctgccggagatcgagtctcgcgtaccgccgacgctgttcgaggccgtacatcagcagttgcgcagcctggagagtctggaccgtgagattgccgagtacgaccgtcagatcactgcctggggtcgtcaggatcgcgcctgtcagactatcagcgccatccctggcatagggatgctcactgccacggccttggtggcgacgatcggtgaagcgcgcacgttcaagtccgggcggcagctggcggcattcctgggtctagtgcccaagcagaccggtaccggcggcaaggtccgactgggtggcatcagcaaacgcggcaatccctacctgcgcaccttgctcatccacggcgcacggacggtgctgagccatctgcgacgcaagaaccagggtggctggagccaggcattggcccagaaacgccccactaacgtcgtggcggttgccatggccaacaagacggtacgcacggtctgggcgctgttggcccacgagcggacctatgaccgagactacgtctcggtcaggcctgcctgatggcaggctgagcaagcaaggaagaatccgtccacaggttgcgacggtaatgtcagcgtgatggcaaaacaggttggaccgcgggagtgcaagcccaattggttactggtgcggcaagcacggcaaaaagatagggacactcccggcgaaatccatcagggcccgcaggcgtggcctgcaccgcaaggccggatataagtctgcagccaatcctgtcccgcctgatgttggcgttatcttgcaaaccgggcgcgttcatataagtaaccaaaaaacgcgtcgcctgtgcggctggc

SEQ ID NO: 313 - DNA, 1915 bp, unidentified
  source 1..1915: mol_type = unassigned DNA; note = element_ISRta4
ggacttcgtagatgcaccggccctctcccccgcccgcccctctcccgcaagcgggagaggggagcaaagaggcgggagggaaaagtcctttgggctcgccagcgatagcgcgtgcgagcgcagcgacgcactccgtgcccgagcaatagacctgagattgggagtgcgcgcagcgcagccgaaggcgtcccaccaatagcgccagcagcaggctgcctacaccctgttgggatcgttcaatagtgggtgatcgtaggcaccgtccctgactcacatagcgttagcaggttcgaacgggcacccacgccaaacggaaatcaccaccgcctgaaccgccaacgccgcggaattgattgccagccgcataggcgacgcgcttcttgcctacttcttggcgctcggccaagaagatggaatgaacgcgcccccggcctctcccgatcaaagaggcgctggtagttcagttgtgcttctggggaacgtgacaggataggtgggccctccatcacgaaacggcatcgatgtgccagagtggaagttcgcacaatccacacaggatggaggaacccgaaatgaatactacgacttacggtctggacattgcaaagggtgttttccagctctattgggttgagccttcaggcgagtgtttcaaccgtcgctttacgcgtaaggccctgctcaacttcctggccaagcgcgcgcctggtcgtgtcgcactggaggcttgtggcagcgcacactggtgggcacgccagctcgccgcacttggccataagcccgtgctcttgcatgccgcctttgtacgtccctttgtgcagaccaacaagaccgacgtggccgatgccaaggccatctggaccgccgtacatcagcccggcatgcgccaagtcgcgcgcaagaccgaaacacagcaggccatccttgccctgcatggattccgcgccctgcgcgtgaagatgcgcaccatgttgatcaaccagttgcgcggcgtgctgttcgagttcggcattcacttccgtcgcggacgccgtgccggattggaagagatcaagcaacatatggccgaactcgaacagcagttgccgcgcgtgctgttcgattccgtggccgagcaattacaagacatcgcacgcctggacgaggaaatcgggcaaatcgaaatccgcttgaacacctggctcaaggaagatcacgattgccagaccgtcgctgccattcccgggattggcccgctcaccgcgacagcgctggtggccaccattggcgacgtgcacgccttccgctcaggccggcaactggcggcattccttggcttagtgccaagacagcgcggtaccggtggcaaagtgaatctcgggggcatcagcaaacgcggcgacacctatctgcgcaccttgctgattcacggtgcgcggatcgtgctcagtcacttgcgtcgcaaggggcaaagccattggagtacggcgctggtccagcgccgtccggctaacgtcgtaggcgtcgccatggccaacaagatggcgcgcacggcctgggctctgttggcccacaaccgaacctatgaccgcgactatgtctcggtcaagcttgcctaacggcaggctgagctagcaagcagggaatccgttcacaggttgcgacggtaagtggaggtgatggcaaaacaggttggaccgcgggagcggaaacccgacgacctactggtgccacaacgagcacgccaaaaagtgagggacgttcccggcgaataccatcagggcccgcaggcttggcctgctaaacaaggccggatataagtctgcaaccaaccgttcgatgcctcatgctcaacttgccttgcaaaccggggcgcgttcatataagtaggtcgccggctacgccggcgaaacagcagcgcccgccaagcacgaca

SEQ ID NO: 314 - DNA, 1331 bp, unidentified
  source 1..1331: mol_type = unassigned DNA; note = element_ISSba8
gatgtgatggacgcctcagcacttaagcttgcagtattatgccaagcttgaagctgataaatagttcaggaggtttccatcatggatattaaagttattggtatcgatttagccaaaaatgtttttcaagtttgtgtttgtcttatggataactcagtcatgagtaacaaaaaggttaacagaaacaagctgctcgataaaattagacaattccccgaaggtagtcttattgctatggaggcctgtggaacagcgcattactggggaagacaatttcaagcacttggttatcaagtacaactgatccctgctcaacatgttaagccatttgttgcaaaccaaaagaatgatgccaacgatgcactcgcgatatgcgaagctgctttcagacctaatatccatatggttccagttaaaactgttgagcagcaagacataaaagcattacgttgtgtacgtagtcgtctagttcaaaatcgaaccgccatggtcaatcaaattcgaagcctagcgagcgagtctggtgtgatcttctctgtcggcagattgcaattacaagcgtcacttagccgtattttagcagataatgagcatgaactgtctcatacgcttcatcacctgttaaaatttttgtatgaagatttatgtgttttaaatgagaaaattaatcaaatcgagcgcgacattaaagcactatgtcaaatccaacctcgctacaatgcattgctgtcgatccctggctttggaccattagtcacggcaagctttatgagtgaattaggttcgggtcatcaatttaaaaatggccggcaattatctgcatggtgtggcttagtgccatcacagtcgagttccggtggaaaagttcgactaggatcgatcacgaaaaatggcagctcagaactacgcgttttactcatccatggtgccagagccgttggccgatttgcgagcaaacgtgatgatagacttggacgatggtttaatgcgcttgcgttaaggcaaggtcgacacaaagccgttgtcgcattggctaataaaatagtgcgtataggatggcggatcctcacgagtaacgataatttcgacgttaataaagcgtttgcgtaagacgttaagtatcacctaaaagtttacatgcactgatgaataaacggtcaaccgtacctattagagcctgacttgaccaaggcattaaatgccgatgtagtgataaggtaataggtttcggatttacatcatggcgcgggtaaaatgcctatttagacgccgaatatatggtagtgaaccaatcattcaaaagtgttgtaaaagctgaggcgtccatatat

SEQ ID NO: 315 - DNA, 1525 bp, unidentified
  source 1..1525: mol_type = unassigned DNA; note = element_ISSde11
tgatgagatggacgctccctaatacggcgtcaatgcgccaaactgatgttgaaccatacagttacttaaggagcgtccaccatgaaagttagcactatttcgattgatttggcaaaaaatgtatttcaactattggggatggataaacacgccaagcaagtgttcagcaagcgcttaaatcgcacacagctgagcgagttcatgtcgcagcagccagtctgtgatgtggtctttgaggcgtgttattcttcccattactgggggcgtaagtttcttgccatggggcataacgttaagctcattccagcccagcatgtcacgccctttgtacgcggcagcaagaacgataaaaatgatgccatggcgatttatgaagccaattttaggcccaacattcgctttgtgccgattaaaaccgaagcccaacaagagatattgatgctgcaccgcgtcagagagcgcttggtaaaacaaagaacggcctgcaccaatcaaattcgtggtgtgttagtggatttcggtatttgttttccacaaggtcacagtgcgtttgagcgagccatgtgggacatcattaacgatgagtcacagcggcctatcatcaagttaatggccaatgatttctgggatgaataccagactgtgagtacccgcttagaccgcattaaccgcctgataaaacagctggtagagcaagaccctaatggcaaaatcttattaagtattccaggtgttggccccattatcgcttcagcgtttgccgctgccattggtgcagggcaagcctttaatagcgctaaagaattagcagtctggctagggttaaccccacaacaattcgcctcaggcaataagagtattaatggcagtatcaccaaacgcggcgacggctacttacgcaaacaacttattcacggtgccagaaccgtagtcagccatgcaagtaagaaaaatgatgatttaaatcagtggataacccaattaagaaaccgtaaaagcatctgcacaactgtggttgccaccgctcatcgactcgctaggctgatgtggattttattgcacaagcaagtgccctatgcgccgcaatacggcgcttatcaaggcataagccatgaagccaattaaccctgttatcgctatcttgctcagctcggtcgtgccaagggcttatagcccgtctggatgataagagcggcaagatagcacctaatactcaaggttgttgttaacgatgaagaaatggctcagtccaaccagtgtaagcccgaacaggccaaggatggggtaacccaatccgtatgggtgtttcacatttacaggcgcagtggtacggatttaattaggggcagcacattcagacgaatgcgtgcatagcccgtatatatggcagtacaaccgcttttagcggaaatgagtcgcatcaataacaatggcaggagtaaagcagttgaacagaaaactaaggcccaaaaagccttaggtgagcagattattgccttgactcaccgggagcgtccatatatgg

SEQ ID NO: 316 - DNA, 1196 bp, unidentified
  source 1..1196: mol_type = unassigned DNA; note = element_ISSde13
atggataataactaagtaatttgggtaaagtgagtcccaagcttttgtcgcaacttaagccttctatatgatagctcgatatccttatggctcctctattgagagaccgataacaaacgtgagcatcatgtagaactccaagcattatactcgaatagtcgaatgggtctagaacccgtatttcgcaataaagagaacgcttattatgaagagccatcacatgcaaaacatcaatgtcggagttgatattggtaaatcacaacttgatatctttatccgcccccttgatatctttttcactgttgctaatgacgaaaaagggattagagatgccatcaataagataaaaattcacaagcctcagtgcattgtagtagaagccactggtcgactggaaatgccattcattctagcttgttcagaagcaaagcttccctttgttatcgctaaccctatgcacgtgaaacgatttgctggcgcgattggtcgacgagccaaaaatgaccgattagacgctgaacttatcgcccactatgccgaagccatcaagcctaaactgactgagttaaaacctgaaaaaataagattaatgagtgatttagttactcgaaggaatcaacttctcaccatgcagaccatggaaaaaaatcgccatcaaatcttatctaaaacactcctttctaccattaaacccattcttacagcgctaaagaaccagataacaaaaatcgagttgaaaatacaaaagttaattgaagaatgtaccgagtatcaaagcaaaaacatcatattgcagagcatgccagggataggaaaaatagcagccgcatcaattatcagtaatgtgccagagctaggctatatcaccaataaacaagcagcttccctcatcggggttgcccccatgaccaaagaaagtggcgactacaaaggcaagcgggtcatccaaggcggacgagcacaagtacgcactgtactctatatggcaatgatgtcggctatgcagtgtaacccagtgtttaaagccatatatcagcgactacttggactaggaaagcccaagaaagtggctattattgcatgcgtgcgaaagatggtcgtcatcctcaattcgatgctaagagatggcgtcatgtgggatgagaatacaggtgaaaataagttgttgacgccatagtcgtttgttatattgcgac

SEQ ID NO: 317 - DNA, 1351 bp, unidentified
  source 1..1351: mol_type = unassigned DNA; note = element_ISSde14
ggatgatgggatggacacctcttgttaaatcggcgtcatttgcgccatattgaatttgtgcgttcaataactaacaaaaggtgtccaatatgaaagttacactaataggaattgatttagcaaaaaatgtcttccaagtttgtggtattaaccaagcagggaagtcggttttcaaccgagctctaaagcgctcacaattgatggcttttctgtttaaataccccgatagcatcattgctatggaagcttgtagtggctcgaactattgggggcgagagctgttaactaaaggcttcgaagttcgcctcataccaccacagcatgtgaaaccttttgttaaaggcaataagaatgatcgaaatgatgcatttgccatatgtgaggcagcattaagacctaatctcacttttgtgcagcccagaacgcttgagcaaactgatatgatcctagctcatcggatccgtgagcggaatgtagagaatcgtacatctttaataaaccaaataagaggattattaaatgaatacggcgtagttatcgcccaaggtaaagagcggctaaaactggcgataccagagctcttagaaaatgctgacagcggtttaactgaaatcgccagacaacattttcaagctcttttagaagagtggaagcaagtggatagaaccattaaaaacttagaaaaaaatatcaaaagccaagctaaattgaatcatcagaccaatcggttaatgggcataaaaggtgttgcagaaattacagcaacagctgcggtcgcctttgctggcaacggtgcgcaatatcataatggtcgtcactttgctgctaatttgggacttgttccaagagagtactcaagtggcggtaagcaaaaactaggcaaaataactaagcgtggaaataactacctaaggcggcttcttgtccagggagcttggtcaatcatacgttatgtcggaaatagcactgaccgtatgtcagtgtgggcgaaaaagttgattgagcgtcgaggtaagcacaaggccgctgttgccgtagccaataaactagcacgaataatttggtcaatgttgtacaaccaaacagaatacagagctaattagaaagagtttagtaataacacatccaacgatgcgatgaagtgtaatgaagtaacaggtaaaaccggcctttgccaatgctgagaaagtacacgggagcgtataaacccgtagggacgataagctacaaaggcgcggtactcattagggccagagaataatactttctcataaacaggccggatatacgtatgcagttttacccactgttgctcaataatatcgcttgaattaagtgaggtgtccatata

SEQ ID NO: 318 - DNA, 1564 bp, unidentified
  source 1..1564: mol_type = unassigned DNA; note = element_ISSep2
taaaacatactaagattagctatgaagaaatctatgacgatagattttttcatagctattttttatagttatagagagaagtagactgtccagactcttggattttaaatccgtataaaaaacaagtcagctttactctcgccttttgaaattcgtttgtagtatgttgggttcttgaaaccgtgtataggaaaatgaaatgagaaaggttaagtaaagtttttagcttctcaattattcaaaggaggtttttttatcgattacttaggtgttgatattagtaaaagaagtagtgtagttgcacattataaaaatggaaaattccaaaaagagtttttcatccagaataataaaaatggttacaattatttactcaagtatttgaatgacttagaccacccacaactcatttttgaatctacaggtatctattcaagaggtatggaacgattttgttgtgtaaatcaaattaactatattcaaatgaatccgttagaagccaaatttaaaacgagcgctctaagatcatggaaaactgatcaggcagatgctcataagcttgcttgtttaggaccgacgcttaaacaaacagacagcttacctatacatgagttaatattctttgaattaagagaacgcgtccgttttcatctagaaatcgagaatgaacaaaatcgacttaaatttcagatccttgaattactccatcaaacattccctggtttagaaagattgtttagtagtcgatattcaatcattgcactcaacatcgcagaaatctttactcatccagacatggttcttgatatcgacaaggaggtactgattacacatatattcaattctacagataagggaatgtcaatggataaagctacaaaatatgcacttcaattaagggtgattgctcaagaaagctatcctaatgtcgatagacattcctttctagtcgaaaaattacgcttacttattcaacaattaaaacaatctattcatcatctcaaacaattagatgatgccatgattcaattagcacaacaactcgattattttgaaaatattcattcgatacctggtattggtaagctaagcacagctatgattattggggagattggtgatattaagcgatttaaatcaaataaacaactcaatgcttttgttggcattgatatcaaacgatatcaatcaggtcatacacactgtagagataccatcaacaagcgtggtaataaaaaagcgagaaaacttttattttgggtgattatgaatataataagagggcagcatcattatgacaatcatgtcgtcgattattactacaaactaagaaagcagcctaatgagaaacctcataagactgccatcattgcttgtataaatcgattattaaaaacaattcattatcttgtaatgaatcataaattgtacgattatcaaatgtcaccacattagccaaacgtacaatcaaatatagtttaacaccttattcaaaaaaattaaaatgaacggtttagttaagtaatgcttattttaattataagtacttgactaatcgtaggaa

SEQ ID NO: 319 - DNA, 1447 bp, unidentified
  source 1..1447: mol_type = unassigned DNA; note = element_ISSer1
cccgttaccttcttcgtggtccccagccggggatcttctggtcgcctggcctggcatgactgactgcccctgtcgttgatgatccggggggtgttgtcaccaggccaggggcgccagccgaccgctgatagggacatgatcgccttcgggcaggtctcgtcgtaggcgtggctgccggcagctgacgccggatcggcgaccaggctgcgacgagtcgaaggacaccacctgtgaccagtggttatgacgtgttctgcggattggacgtcggtaaaggcgcgcaccacgcgaccggcctggcgccggacgccacccggctgcacgacgcggcactgcccaacaccgaagccggattgcgcaaggtcttcgaccggctcgcgcggcacgggcaggtgctggtggtggtggatcagccggcctcgatcggtgccctgccggtggccgtggcccgagcctgcgggcatgacgtggcctatctgccgggcctggccatgcgccggatcgctgacctgcacccgggcaacgccaagaccgacgcccgcgacgcctacgtcatcgctgatgccgcccgcaccttgccgcacgccctgcggcgggtcgacaccggcgaggaaaccctggccgaactggaggtgctcgtcgggttcgacgacgacctcgcaggcgaggccaccaggatcggcaaccgcatccggggcctgctgacccagatccatcccgccctggagcgcgtcctgggacccaagatccagcaccccgcggtgctggaaatcctctcccggtgcggcgggcctgacgggatccgcaaagccggacaacgacagctgacctcgatcgcggccacccgcgctccccgcatgggccaggccctcgtcgaggcgatcgtgtccgcgctcgacgaacagaccgtgtcggtgcccggcgccaagaccgccgagctcgtactcccccgcctggccgattcgctgaaaaccgtgctgcagcaacggagaacagtcgccgacgaggtcgaagggatactcgatgcgcaccctcttgccggggtcctgacctccatgcccggcatcggggtcaggaccgcagcccgcatcctcctcgaagtcggcgacggctcggcgttcaaaacctccggacatctggccgcctacgcaggcctggccccggtcacccgccgctccggcagctccatccgaggagaacaccccaaccgaggcggcaacaaacatctcaaacgggcgttcttcctcgccgccttcgccgccctggccgaccccaccagcagggcctactaccagcggaaacgagacgaaggcaagaaacacaacgccgccctcatctgcctggcccgacgccgctgcgacgtcctgcacgccatgctccgcaccaaaacgaaataccaagcaccagcccctcaagccgcttgacaaccgacatagggacacccccc

SEQ ID NO: 320 - DNA, 1534 bp, unidentified
  source 1..1534: mol_type = unassigned DNA; note = element_ISSfr2
gactaaatgttcgcctggggctgggtgacccgtctcacaatatgcaggtatcgagggttgcgagagcgatcctctcgtagagcctcatgcataggagacgggccatggacgagactatcacatacgtcggattggatgttcacaaagaaacgatttcggtggcacttgccgatggcggtaagcgcggtgacgtgcgcgcgtttggccagatcgtaaacacaccaacggccttggcccgcatgctggcgaagctttcgcagtcggggcggacgctgaagttttgctacgaagccggaccttgcggctacggcattcagcggcaactgtctgccgcgggccatcactgcgtagttgtcgccccgtctttgatccctcgaaagccaggcgatcgcatcaagacggaccgccgggatgccgacaatctggcaaggcttcatcgcgctggggagctgagcgccgtctggatccccgatcccgcccatgaggcaatgcgcgatctggtgcgggcacgcctggctgccgtgcgcagcctgcgacaggcgcgccagcaactcagtggattcctgctgcgccatggctgccattatggccgtccagcctggacgcagatgcaccgccgctggctggccggtcttcgcttcacgcaaccagcccaccacattgtgcttgaggatcatatcgcgacgatcgaggctgcgacggaccggcgcgatcggctgacgaagcaaatcgagatcatgttgagcgattggtcattggccccggtcgtccaggcgctgcaatcgctgcgcggcatggctctggtgaccgcagcaacgatgattgccgaattgggcgatatcagtcgctttaccaatccgcgtcaactgatggcctatctggggctcgtcccatcggagcattcgagcggcgcaacccgacgccagggcggcattacaaaagcggggaacggaaccgcacgccgcatgttgatcgaggcggcctggagctaccggtttcccgcaagggtgagccgcgagcaattgctgcgccaggagcagcttccaaaaacgatccgcgacacggcgtggaaagcgcaggagcggctctgcggccgctatcgcaagctcaccaaggccggaaagccggccacgacggtaaccacggcgatcgcgcgcgaattatcgggcttcgtctgggcgattgcatgccaggtctcaccgcgttgaacatcgccaaatcttaggaaagcaaagaggaggaacgaacccatcagaagccatgtgcacctgggcaaggctgggggcacggtcacggcaggagaaccctcgtttccactatcagccggtttaattccgacgctgccaactagactgaggaagctccgcgacgcatcaggtccggcggtactcaacccgcgtatcagagcatgatcaaccgtcgttcattgaccgtgcctcctgctttccccaggacgcactcatgcgaaacacgacgtccgagaaaatcgggcgggagaatttctatgcctgctgcttgaaaaggcgaacatgag

SEQ ID NO: 321 - DNA, 1544 bp, unidentified
  source 1..1544: mol_type = unassigned DNA; note = element_ISSgr1
cccccgttatgtttttcgtggtcctgcaacggggccgctggcctccgggcccggtatgactgttgccccctgtcgaacgtgatgacctggggggtggtgtcgccagggtccgggggtgttcgtcggagacgctgatcagaggtccggccaccgcctggtccggcgcaatgccggacggttcgcgggcggcaggtctgcataacgtggatgcgcgagcacgacacccaagccgaggccggcaccgtcaacatccccggaaagggcgcgatgttcgagatcgaagacgtgggcgtgttcctcggcctggacgtcggcaaaaccgctcaccacggccacggactcaccccggccgggaagaaaatcttcgacaaaccgctacccaacagcgagccgaaactgcgggccgtcttcgacaagctgaccgagaagttcggcaccgtcctggtcatcgtggaccagcccgcctccatcggcgccctcccgctgaccgtcgcccgcgacgccggctgccgcgtcgcctacctgcccggcctggccatgcgccgcatcgccgacctctaccccggcgaggccaagaccgacgccaaagacgccgccgtcatcgccgacgccgcacggaccatgccgcacaccctgcgctgcctggaactcaccgacgagatcaccgccgaactcaccgtgctgaccggcttcgaccaggacctcgccgccgaagccacccgcacctccaaccggatacgcggcctgctcacccagttccaccccagcctcgaacgcgtcctgggcccccgcctggaccaccaggccgtcacctggctcctggaacgtcacggctccccggccgccctgcgcaaggctggccgccgccggctcgtcgaactgatccgccccaaggccccgcgcatggcacagcgcctaatcgacgacgtcttcgacgccctcgacgagcagaccgtcgtcgtccccggcaccggcaccctcgacaccgtcgtgccctccctggccgcttcgctggcctccgtccacacccagcgccgtgccatggaagcccagatcaacaccctgctggaggcccaccctctttccccggtcctgacgtcgatgcccggcgtcggcgtcaggaccgccgcagtcctactggtcaccgtaggcgacggcaccagcttccccaccgccgcccacctcgcctcctacgccggcctcgccccgaccacgaagtcgtccgggacctcgatccacggcgaacacgcaccccgaggcggaaaccggcagctcaaacgcgccatgttcctctccgccttcgcctgcatgaacgccgaccccgcctcccgcacctactacgaccgccagcgagcccgcggcaaaacccacacccaagccctcctccgcctcgctcgccaacgcatcagcgtcctgttcgccatgctccgcgacggcaccttctacgaaccccggacaccgaaaaacgtcgagctcgccgcataaccccagcaaccccgaaccaccccaaacccgacagggatgccttgacgaaagacatagag

SEQ ID NO: 322 - DNA, 1666 bp, unidentified
  source 1..1666: mol_type = unassigned DNA; note = element_ISShdy1
gaatgaaagggacatcttattcggtctttacgctggggagttactttggaagactgcgtcaacacgatgataagcgtacaaagccattgttaagggatcctctatgactgttgttactgtcggtattgatttagctaaaaatgtgttcgctgtgcatggcgttaatgctgcaggaaaagctgttttagttaagcctcttgtgcgtcgggctaaattgcttgaattgattgcaacacttccagcatgtctgattggaattgaagcatgtacaggtgcacatttctgggcaagagagttccagaaaatggggcatacagttcgaattatggcgccgcaactggtttctccataccgtatgggtggccgtcatgggaaaaatgatgctgcagatgccgctgccatttgtgaagctgttacccgtcctaatatgcggtttgttcccataaaatcagttgagcagcaagggcagttatttgtacacagagctcatcagggatatgtcagtgagagaacagcattgattaatcgcatccggggattgctcagtgagttaggtattgttctcccgcaggcgtttaaagcgtttttatccggggtggctcaggtccttgaggatttgcccggttactgtaatcaggttattggtgatcttcttaatgagctttatcacatagaagaaaagattaaaaacagtgaaaaactcattcagcaacttgccagagataactcagcagcacaactactaatgcaattcagggggataggcccgatgactgcaacagcaatcgttgccagcataggtaatggtcatgatttcaagaacggacgtcagtttagtgcctggctggggctaacaccaagacaacaaagttccggggggaaagcacggttagggagaataactaaagccggcgacagctatctcagaacacttcttgttttgggggcgagatctgtattgttgggagcagctaaaaatgatgatccggtcagtcgatgggccctgcagttaaaagaaaggcgaggatatggacgagcgcttgttgcgatagcagcaaaaaatgcacgtatgtgctgggcaatgttgcacctgagagatgaattcagatttcctgcctagtctactgattattaatgagtttatgaaattgatttctttccttgcatgacgactgcacgatgatgatttaaaaggtttggacctgcgccatggtttactcgagatatgcaagaggctgccatgtttatgtggatatctgtttcgcggatggagtctatggcgtgcgtctttcgtcagggttcgttgctaacaacagcacgttaataaccgtttataggctcgctgtccgtaaccttttactctgactgtgcaagttgtgtgcagaaatcaatctcatgatagataaaagaattattccactgttgcacctggagtgttcggtgctcgctttgctgcgctccgcctcaatccagttgcaacagcgtttaattaaaagcattaaggcttgtgtcattgcgtacttgagctatgcaggagatttttattggttctctgtttcgcggatgaagtctctgacatgagcctttctctcataaaaatcgttctatttcatattgatatattaatttcatcatcatcgttgactctacaacagatgtccttata

SEQ ID NO: 323 - DNA, 1521 bp, unidentified
  source 1..1521: mol_type = unassigned DNA; note = element_ISShfr3
tggccaaggatgatgagatggacgctccctaatgcgccaaactgatgttgaaccacacagttacttaaggagcgtccaccatgaaagttaccactatttcgattgatttggccaagaatgtatttcaagtccttgggatggattgtcatgcaaaacaagtcttcaataagcgtttaaatcgcactcaactgaccgaatttatgctgcaacaacccaattgcgatgtggtcttcgaggcttgttattcatcccattactgggggcgtaagtttctcgctatggggcataacgttaagctcattcctgcccaacatgtcaccccgttcgtgcgaggcagtaaaaatgataacaatgacactatggcgatttatgaagccagctttaggcctaacattcgtttcgtgccagtgaaaaccgaagagcagcaagagatattgatgttgcaccgtatcagggagcgattagtaaaggagaaaaccgcctgtactaaccaaattagaggtgtcttagttgattttggcatttgttttgcccaaggctataaagcgtttgaagtggccatttgggacatcattaatgatgcatcacaacgtcccataatcaagctgatggcaaatgacttctggggtgaatatcaaagtgtaaatacacgtttagacagaattaataccttgataaaaaagcttattgagcgtgaccctaatggcaaaatattactgagtattccaggtgtcggccccatcatcgcttcagcatttgtcgcatcaattggccgaggccaggcttttaataccgctaaagagttgggtgtgtggctggggttaactcctaaacaatttgcctctggccatagaagtgttaatggcagtattaccaaacgaggcaatggctatttacgcaagcaacttattcatggtgccagagcagtcgtcagccacgctagtaaaaaacaagatgatttaaacctttggataatgcagttaagaagccgaaaaagcatctgcagtacggtggttgccaccgcccatagactcgccagactaatatggattttattacaaaaacaagtgccttatgttccgcaatatgctgcaaatcaaggtgtaaaccatggtacttgttaacactgttgtcgctatcttgctgagctcgggctggccaagggtaataaacccgactggatgataatagccgcaagatagcacattaaacactcaccaaggttgttgttaacgatgaataaatggctcagtccaaccagtgctagcctgaataggccaaggatagtgtaaacctaatccgcatggatgtttcaattgataggcgcagtggtacggatttcattaggggcgcagcttgactgttaagcccgtatatatggcagttcaaccgcttctagcggtaaatgagccgcatcaaaaacaatgacaagtgtgaagcaatagaatagaaaactaaggccaaaaagctttgggtaagcagagtattatcttgactcaccgggagcgtccatatatggcc

SEQ ID NO: 324 - DNA, 1205 bp, unidentified
  source 1..1205: mol_type = unassigned DNA; note = element_ISShwo3
cttgtatggataataaactcacctaatttacaaatacttccctgtttcgggtaatgtgagacccaggctttagctgcaactaaagctttccttgtcgtagttcgattgagcgatggctcctctattgagagaccgataacaagaaagaacgcgacaaaggactccaagcaaaacactcgaatagtctactgggtctcgaacccgcatttgcaagcaagagttagcttattatgaattcaaaaactaatcaaaacattagcgtaggtgtcgatactggcaagtttcagctcgacatttatattcggccactcgatatctttttcaccgttaaaaacgatgagaaagggattaaggatgcggtaaacagcattaaacaatacacaccaaaacgtattgttattgaagcgacaggtcgcctagaaatgccatttatcatggcctgtgctgaagccaatctacccttcgttatcgccaaccctatacacataaaacgttttgctggcgcgattggtcaacgcgcaaaaacagacaaattagacgctaaacttatcgctcattatggtgaagcaattaaacctaagctatctactttaaagcccagcatcatgcaggctatgagcgatttggtttcaaggcgtaaccaaattttggcaatgcaaactatggagaaaaaccgccttcaaattctgcctaaagacctagcaatgacaataaaacctatcttaacagcctttaaaaatcagatagaaaagattgaagctaaaatcattaaactcatcgagtcatgccctgactatcaagccaaaaacatcattctacaaagcatgaaagggataggtaaaatagccgcagcttctattattagtaatctccctgaactcggatatatcaataacaaagaagcaagttcactggttggtgttgcaccaatgaataaggaaagtggccgtttcaaaggccaaagaaaaattcaaggaggaaggcatcaagtcagaacagttttatacatggctatgatgtctgcaattcagtctaacccagttttcaaacaaacttatcagcgattagtcgctgctggaaaaccgaaaaaagtggcgataattgcctgtatcaggaagatggttgtaacgttaaactcgatgctaagagatggtgttatgtgggaagcgccaaaagctcaaatttagctattgacgccatagtct

SEQ ID NO: 325 - DNA, 1611 bp, unidentified
  source 1..1611: mol_type = unassigned DNA; note = element_ISShwo5
cttgataatcattgagcctcctccctagcaaaccgcattagcagtatgctgaaggtgacgaaaccaacaggagaaagctcaatgagattttataataactcacatccatactactgtggaattgatttacatgcgcgcttactttatgtctgcattattgattctaaagggaaagttgctgtacataaaaagattgatgcagacaaaggtgacctgttgcgcatacttgaaccatatataggtaatgtcatagtcggcgttgagtgcatgcactgctggtattgggtctctgattggtgtgctgaacttggcatcgactttgtcttaggccatgccctgtatatgaaggctattcacggaggtaaaaccaaaaacgataaaatcgactcctttaaaatagcgtcgctacttcgtggtggtaacttcccaatcgcttacaactaccctaacgaaatgcgtgctgcccgcgacctactacgtcgcagaatgaagatagtccgtcacggtgccatgctcaaagctcatgttgttaatacaaacagccagtacaacttacctgcgacagagttaaatcttaaaaacatttccgcaagacaaaaattacgtcaacaatataaagaccctatcgtacagcgaaatatagacttagacatggcacttctcgattgctatgccaaggaactcgctcaggttgaatggtttattgagaaacaagccaaaaaccataatcccgtttatcttgaattacttaaaaccgttccaggtattggtaagattttatcgctgactatcctttatgaaatcggtgatgtcactcggtttgaatcagttcaaaaatttgcctcatactctcgtttagtgaaatgcaaagctgagtcagctggtaaaacctacggcaccaacggcaataaaatcggtaatgcgcacttgaaatgggcgttctctgaagcggcagtgctttaccttcgtggtaatgataaagcgcgtaactatcttaaccgattacaaaaacggatgagcaaagccaaagcactatctgcgctagctcataagcttggacgttgtgtctacttcatgctgaaaaacaaaacggtgtttgatgaacaacgatttttgaaaggataagtcgcgcaataaggtgagctgaacgtctaactagatactcttaaaaagagaagcgagcatgactgtgaatgatgtggctaatgaaataataatttctcaccatcatcactatgccaagtgcgacttaagctacatagacttgattagacaccttattggcgcgcattaattaatacaatcaacaaagtcgtttaccccctaaatgagcctgaaactaactgtgctataagcacctgagacttgaatagtgccatcttagggttaaccgataactgtctagtgcccctgatattccaaaggattggactgcgtcaggctgcgataagatcgtaataagagagcctctatatgtgtttgctgtaaacgatgatttgacagcgcaccgacatgcgaagtggatgaatttgttgattgatttaaatttgactgcacaagcagccaaactagttaagctcgcctattgactggcgggaggctcatatgtgt

SEQ ID NO: 326 - DNA, 1521 bp, unidentified
  source 1..1521: mol_type = unassigned DNA; note = element_ISSko1
gaatcgaatggactccccgcgtcaccacgccgcgtcaatgcgcaagctgaaactgttgcccatcagtacgcggaatttacgccaggagccggacatgcacgctaccaccaaattcgcaggtaatgaatcgtcggttgccgttaccttggcggtagacctggccaaggacgtttttgaactggcatttgccgatgcggcaggacgtatcgtcgagcgcaggcggctcaagcgtggtccgtttgcgcaatgcctggtcaatcgcgcaccgctgagcattgtcatggaggcctgcggctcggcgcatgcgtgggcgcggcgcttcatgcggctgggacacacggtgaagctgctgccggcgcagcatgtacgcccctacgtccggcgcaacaagaccgaccgcgccgatgccgccggcctgctggaagctgcgcgctgtggcgatatccgcccagtgccggtaaagaccacggggcagcagggtacgcagggcctgcatcgcatccgcgaacaccacaaggccgaacgcacggccgcgatcaatctggtgcgcggtctgttgcgcgagtttggtactgccattcctgccggggccgacaaaatacgtccagccgtgctggctgccctggaggatggcgacaatgatcttccgatgccgctgcgccatgccctggctggcctgctgcagcggatcgcctcctgcgaggaggcgatggccgccatcgagaagcagctggccgacatcgccagggacgatacccgctgccaacgtttgatggctgccaacggtgtcggtttgattaccgccaccgcgatgagtgcgggcatcggcgacttcgcccggtttcccagtggcaggcactttgccagcgcactggggctgacaccacgcgaatactccagcggcggcagccgcaagctcgggcgcatcagcaagcgtggcgatgtctacctgcgcacgctgctgatccatggcgcacgctcggcattgatcaccgcatgcatggcgcgcaagcgcggccagacgctggatcgcacccagcaatgggcgctggcactggctgagcgcaaaggccacaacaaagccgtggtggccctggccaacaagaccgcacggcggttatgggccgccgaacaccatggcgtgggctttgatccagaccacctcagccagcgcgaacaacgcgccggctgatcccgattcccctcgaccgttttactgcaactaccgttgaaccgttctgctgttgcatcgcctcaactcatgcaagcgtgtcggcccccgaagcagccaagccgataacaattctgatccttcgtgatcgcttgaacgtctggccctgctccgcggattccatgatggctcgggaaagcccaccacaaagccgaatacacgaatgcaaccgctcccgtttgccgggttgaagaaaaagtttcagcaggatggaaaatgaagaatcacatgccgtgaagctgaagcttcacaacatcgtgccgtcaggatttgacgggggagtccataca

SEQ ID NO: 327 - DNA, 1527 bp, unidentified
  source 1..1527: mol_type = unassigned DNA; note = element_ISSph11
taatagatcctatgcaggccggatcggctatgccgttgttccgtcaaaccccacggagaacgctaaatggagaactcgtcgtcagattactgccccaagacttctgtcattgtcagcgttgagctcagcaagcgcaactggcttgttgcttcgctctcgccaggagccgcgaagccttcgctacggacaattcctgccgggaacagcgcggcactgatcagtcaccttcgcaatcttgagtgcaaggccgctgatcgtatcggtgaacctgccgccattcgcctgtgcttcgagattggatatgatggcttctggctcgcaaggctactgcggtcgaacgatatcgatacatatgtgctggatcccgccagcttcctcgtgtcgcggcgaggcaggcgcgcaaaaaccgaccggatcgacgccgaagcaatgatcggaatcctcaaagcctatctcgctggcgacaaaagcgtgtgccgtgtcgtggacgtgccctcccccgaggaggaggacgcgcgcagagtaatgcgggagcgcggcgatctcgtgcacgagcgcacccgaattatctctcggatcagggggctacttgcattacagggcatacgatctgtcaaagccatcaagggcggtgactggtcaaaacagctcgacgacatgcgcaccggcgatgggcggcctttgccaccaaaccttcgtcgacaaattgagcgctgtttcgaacggctcgcgttgctcaacgatcagatcaaggacatcgagcgggaccgcgctgaagttgtgctccatgaggagtctaccttcccatgccgagagaaagcggttcgccttgagcagctgaagggcattggtccgaacagcgcggcaatgttggttgctgaggttttttgccgaaagttcgaaagccgacgacacgtcgcggccttccttgggttagctccggcgcccttcgccagcggcgacgtgtcgcgtgatcagggcatcagcaaagccggtaaccgaagcacacgtgtgcagatggtggaacttgcctggtgttggttgaaatatcagccaagtagcgaactgaccgtttggtatcgcaaccggttcaaaggcaacggcgctcgcgcggcaaaggtggggatcgttgcgctcgcccgaaaattgttgatcgcgctttggcgctttgtggagaccggtctggtccctcaaggtgccgagctccgcgccgcctgatgcctatgttgcaacaggctcgataaggcgacgcggattggtgtgatgcgtgaccgggaaagttgatggcgcctgaaaacgcccagtagtagtttggtccgcatccgcctttgctcgatccggggatgtgaatacggattatggtgcgcgggaacggccgcgaccggatacaagtctatgcacggatagtgcatcagctgacctcggaacgaatgaagccaatccttgagcattgcgtgtggggcccccaacgcgtcaacagaaggaaccgttcaatgcgatcttgacaaggcccggatcatacaaatc

SEQ ID NO: 328 - DNA, 1507 bp, unidentified
  source 1..1507: mol_type = unassigned DNA; note = element_ISSph13
cttagacccaatgactgcctgagccatgagggctttgatctgcgatgcttcacctgcggagggtcagcaacggagatgatcgatggcaaagagattgaagtacatcgggctggacgtgcacaaggagacgatcgcggtggccgtggcggagggcgaacgcggcggcgaggttcgctttcatggcacgatcccgaatgaagacgatgccgtacgcggtatggtcaagcgtctggctggacctggcatcacccttgatttttgttacgaggcgggaccttgcggctacggcctgcagcgccttctgacccgacaggggcaaccctgcattgtcatttccccctcaatgatgccgagacgtcctggtgaccagatcaagaccgatcggcgcgatgcaatgacgctggcgcgcctgctccgcgccggagagctggccccgatctgggtgccggatgaagctcatgaggcaatccgcgatctcatccgtgcgcggcggtcggcgcaggaagacacttcggctgccaagcaatcggtgcgcagcttcctgcttcgccatgatcgcagattttccggaaagtcggcatggaccaaaacctactggcgctggctgtcggagcaacgtttcgatttcgcgcatcagcaactggcttttgaggaggccaagcgtcgtgtcctggaggcgcaggcacgaactgcacgcctcgaggcggcgctcgtcgaagcggtcgatggctggcggttcgcaccgctggttcgcagtttgcaagcccttcgcggtgttcgcctgattgtcgcggcaaccctggtcgcggaggtcggcgacttgacgaggtttcagaaccccaagcagttgatggcttacctcgggctggtcccgtcggaatattcgagtggcgcgcgagttcagcgtggccggatcacgcgcgccggaaacgctcatgcccgcaccatgctggtcgaggcgggatggacctatcgacttcctgcccgcgaagagcgacgttaccgggatcgcgttgcggatcttcccgaagatattcaggcgatcggttggaaggctcaggtgcggctatgccagcggttccgccgcctctcggcgacaggcaagccgcaacccaaggtcaacacggcgatcgcccgtgaacttgtgggtttcgcctgggacatcgcccgtcgcgtgcaaccggtggtggcggtctgacccgccaggggtagagcttgggctctggcctttggcgacataggcatggccggtgtgtcgcgggcgcccgactgtgatgggcaatcctcggtgtacgttggggcaggcaagtccgatgcccgtgcttagagtgaggaaggtccagcgacggaaacgggtattgcggtaatcaatccgcggatgagagcgtgatcaatcgtcgtcgatcaggagcccgcggcactccggccatgccaaattcaccgctagcccaaaggccagcggacgcgtaaactcgccttgtaacgcagatggcagtcatgagagcgt

SEQ ID NO: 329 - DNA, 1342 bp, unidentified
  source 1..1342: mol_type = unassigned DNA; note = element_ISSph15
gtcatcgtgtaattgcggctgcttccctcgggccttggttgaggcgcacacttctggttgtcgtatcctgaaggaaggaagcagccatgaagcactatgccggattggacctgtcgatggaatccacgcaggtctgcatcgttgatgacaatggtcggaaggtcgtgtcggagaaattggaaagctctccggaggcgatcgccatgatgctggagcgatacggtcaaatcgagcgggcggtgatcgaaacgggtcgcatgtcgccggcgatttgccttggtctgcgtgaactgggtgtcccggtggtgtgcatcgatgcccgccaggcgcaccagagcctcaaagcaatgaaggcgaacaagaccgaccctcacgatgccgccggcctcgcacagttggcgcgcaccggcttctacaaggaggtgcatgtcaaatctccggcagcgcatggcgttcgcagcgtcatcaccgcacgcagccatctggtggaagcgcgtgtccggctcgacaacacgatccgcggtctctgcgcgacgttcggctatcgacccggcgcaggtcaagggaaggccttcctcgaacggatcatgaaggctgcccacatcccgggccttggcgacgccatcgcatccttgctgtccgtgcgcgcagaactggtcgagcaaatcaaggaaatggaccgccgcctgcgtatcatcgccagccagtcacaggcttgcgaaatcctgatgaccataccgggcgtgggcgtgcagacatctgctgccttcgccgctgcagtcgatgaagccggacgcttccgacaatcacgcaatgccggggcctacttcggccttgtgccccgacgtcatcagtcgggcgagctcgactggacaggcaggatcaccaaacagggcgacagcacggtgcgcaagctgctctacgaagctgccaactcgatcctcacccggagccgtgagaccttcgccctgaaaacatgggccatgaagatcgccaagcgccggggccttaaagaggctcgcgtcgcactcgcccgtcggctcgcggtcatcatgcatgctatgctgcgcgacggtactttgttccaagcgtgaggtagggtagaacctgtttgccagcggtgaagcgttaaagctgatccgagggcggtgtcccgcgagggaacgcagggacgaacgatctgcgaaggtagtcagatgggctgcaaagcccgcttcgagtcaatgcaacgttcgcctctgtgagacccgatacagcacgaccaggcttcggcccggccagtgcggacagatccatgaaaccctcaagggatcaacaccgcctagctctgcaattacagatc

SEQ ID NO: 330 - DNA, 1362 bp, unidentified
  source 1..1362: mol_type = unassigned DNA; note = element_ISSphsp17
tgatggcatggaccacccccatgcaaacgatcatattatatggtgccattaaagtggaggaagcgcgatgtcagttgttacgattggccttgatctggccaaaacggttttccaagttcacggtgtagatgaggccggcttaaccgtgcttcgccgaaagctctctcgggccgatatggcggccttcttcaaaaagcagccgccgtgcctagtcggaatggaagcgtgttctagcgcgcatcactgggcgcgcttgcttgtggagatcggccacacggtcaagctcattccacctcagtacgttaagccgtacgtgaagcggaacaagacggacgccgccgacgcggaggccatatgcgaggccgtcgccaagccgaacatgcggtttgttcctatcaagacgaagcagcaacaggcggttctggctttgcatcgtgtccgcagcctgttggtccgacagcgaacggcgacgatcaatgcactgcgcggactgctgggcgaatacgggcttatcgcgggcaagggcgtgcgacagctcgcgatattgagcgagcgtcttgcaacctcggacaagaccgtcgtcccggacgaagcgcgagaagcgttgcgatgtcttttccggcacatcgacacattaaccgataagcttggcgagatggagaagcggatcgtcgcctggcacaaatcaaacccggacagccagcgtctggctactgctccgggcgtgggcccaattacggcgacagcgattgtggcagccgtcggcgatggcagtcagttcaagtcttcccgtcattttgcagcttggcttggcctgacgccacggattcgagcgagcgggggaaaagagaagattggtcggatcagcaaaggcggcgatcgatatctccgaacgctcttgatccatggagctcgggccgttgtaggaacaacgttccgcaaggacgtgacacctcggccctggcttaaagctttggtcgacaggaggcccgtgaatgtagcctcaacagccgtcgctcacaagacggctcgctcgatctgggccatgttgaccaggaatgaggtataccgccgtccatcgcctttgccgatggcggcctaaccagttcggcgccgatgtgatggtgccgacttgcgagggcaacgacagagtatggcgaaccggtatcaccggggatcgacaaaggtcactgaaatgatgcgaaccaatttgagttcgtccatttgtccggccgtcgatccgcggaaaccataggggcctgcggcgtgttatgccgcacaacaaggccggatacacgaccgcaagatccgaaatcgtcgaaatctgttgaaaagccttgcaaggtgggggtggtccataca

SEQ ID NO: 331 - DNA, 1498 bp, unidentified
  source 1..1498: mol_type = unassigned DNA; note = element_ISSphsp18
acatgggataatcgcggcgcgattcatcctgggcatcagctttttgatatagctgacaggggtggttgccccccgatatgatggaaaaacgggctcacgattggcaccgggcccaagcatcgcacggagagcaaccatgaaacaatatataggctttgacgtttcactaaaagataccgcgatctccattcgtcaggatggaaaacggatctggcgcggcaagtgcgcatcggatccccagatcctggcgcagatagtccgcaaacacgccccgcatgcggagcgggtggtatttgagacaggtccattgtcgacctggttctatcatgcgttaacggcggcgggagttcccgcgatctgcatcgaagcgcgtcatgcgcagaaaatattgaacgagacgctcaacaaaactgatgccaatgatgctgacggtctggcccaactggcagaagccggcttttacaaggcggtccgggtgaagtcgttcgacgccatgttgacccgcacactggtgggcgcccgcaacctgttgcttaccatctcaacgcagctgagcaatcagatccgcggggtcatgaagacgtttggcatcgtcgttcccaagggtacaggtcgtgtattcgacgggaatgtccgcgagcttctggacggcagggatggcctggcacagatcatattgcctttgctggaggcctggcgcgacatccgcaagcgcgccgctgaacttgatcgtcagttgctcgccgcagcccggcaaagccaggcaatcaagctgctgatgacgatcccgggagtcggggcggtcacggccgtctcctatgctgcggcgatcgaagacccagcaaacttcaaaacttcacgcgcggtcggcgcttggctcgggcttaccacgcggcgttaccaatcaggcgaagtggattatgacggccacatctcgcggcgaggcgacaaccatctgcgcggcctcttatacgaggcggcaacggtcattctcacgcgcaccagcgctagcaaccagagcggcctcaaagactggggcctcaggctacgcgagcggctgggcttcaagcgcgccgcggtcgctgtggcccgcaaactggcagtcatcatgcacacaatgctcaaaacaggagaggcattcaacacatcggctggcgtcaccgcataaccaattcaccagcttaacttctcaacgcgtcagcatctgacgtattgaggcgtccttgccgtggacgtgggtcaggtcattccgctttaacggctgcagctttttaaagactgcgcacaaaacataggaagaccttgcctgcggagacccatcatgcggcggctttatgccgaccgcgaagacaaccctgctcccggcatacgaacaccctcgcgcgacacgccgcattgagaaaaacaagcacaaggttgattaacgtgtcgacgcactaaccgacgcgatcagccttcccatgccaaccacgcttgactggagggacgcgattataca

SEQ ID NO: 332 - DNA, 1405 bp, unidentified
  source 1..1405: mol_type = unassigned DNA; note = element_ISSphsp23
tgctggggtggacggcctccgtatggcatcagaatgtgccagagtgagtcgttagatttcgatcgaaggagaccgcccatggaacagattatccgcattggcatggatacgtcaaaacatctctttcagctgcacggtgtgaatgcagcggaacagccgattttgcgcaagaagctgcgacgcaaggaaatgatcgacttcttccagaagctgccgtcaacggtggtcgccatcgaggcgtgcggcgcctcacatcattgggcccgcctgctgggctcgttcggtcatgaggtgaagctgatcgcaccacaattggcaaagccgtacgtgaagcgcggcaagaatgatgccgccgatgccgaggcgctgtgcgaggccatgagccgcccgacaatgcgcttcgtgccggtaaagaccgcagaacagcaggcagcgctaatgctggtcggaatgcgcgacaggctggtgagaagcagaacccaactcgccaatgcgatccgcggctacgctgccgagttcggactaaccacagccaagggcatatacaagatcgagccgctgctcgaacgcactgcaaccgatgagaccgttccgacattggcacgcgaactcttcgcgttgcacgccagcgaataccaacagttggaacggcagcttgaagacgtcgaggcaaagctactagcatggcaccgcaaaaatgagtgcagccgacgcctggcccaaattccaggcgtcgggccgattggcgcatcgcttctcatgatgaaaacgcccgccccggaactcttcgcgtcggggcgtcaatttgcagcttggctaggcctgaccccgaaggatcactcaaccgccggcaaagcaaggcagggcgttatcacgcgcgctggcgacgaagcattgcgaagtatactggtggtcggggccacatcattgcttcgacgtgtcagggatggaagcggaaaaaatgccacgccctggctgctctccatgctcaaacgcaaaccgcccaagctggtggccgtggcattggcgaacaaaattgcgcggatcgcttggaaaatgatggccaccggcgaaacttatcgaaaaagcgtcgtgctatcagagttgaaatgcacggcataagagatcaggcagcgatggtgagcggacagtcagagctaccatcctgaactgatgcgtgaacttgcaagaaacagcagatggtggatcgatcgatccgagacgcgtgatagcccgtatgcgccagtggccgttgcaggtcgcagccttgtttggaactcgtgtcgcggaaaccatcttggccagcgttcatgtgcgaacgcacccacaggccggacatatgaacgcaagcgatccgatcaatattatctgccaaatcttgcagggagggggccgtccacatatg

SEQ ID NO: 333 - DNA, 1398 bp, unidentified
  source 1..1398: mol_type = unassigned DNA; note = element_ISSpi2
acgaatgatatggactccccttaccaattggccactatgtgccatattgaaagtgcaaacattcaatcaaggagagtccatatgtccttaattaaagcaattggcatcgatttagccaaattagtttttagtattcatggtgttgacgaatacggtaaaactaaactaaagcaaacagttaaaagaaacaagctgttagaaaaaatcgctaacattccaccctgtattatcgggatggaagcttgctctggcgctcactactgggcaagagagtttacaaaatacggccacgacgtacgtatcatggcatctaaattcgttattccttatcgccaaagtgaaaagaatgacgccaatgatgctgaagccatttgtgaggcagtgactagaccaaaaacacgctttgtttgtattaaaagcgaagagcaacaagccgttttatgcctacaccgcattcgacaaggccaaatcaaagaccgtacggcgatgataaaccgattacgtggcttactatccgagtttggtattattatgcctaaaggtcgttatcctgctcaaaagcatattgttgaaattctcgaggatgctgagaacggtttgcctgatttagcccgcgaactactccatgatttatggctgagcataaaacaacaaaaccaagacatattaaagtctgaccgaaagctctatgcccttgctaaccagatgaaagacgctaagcggttaatgaccataccaggtattggcgaagttaccgcaacagcagtagtcgcgacagtcagtgatgcaaaacacttctcaactagccgccaatttgcagcttggataggtttggtgccgaagcagtattccactggcggaaagccaacactaggtcgaataagtaaacgcggtgagaagcatatccgcacctcgctaatccatggtgctcgcgctgtcatcgcaaactgtgccaataaaatagatagaactagtttatggattaaagcccttatcgagcgaagaggtttcaaaagagctgtcattgctttggcagctaaaaatgcacggctaatttggtcattattgcaatcaggacaagagtaccaagttaactatgtaaaaacgtaaaaaggattaacccaaacggttaaccccaccgagtcgacgcattagcaattgacgataacacggtcagaccgagagcgatagaatctggttagttgggaagtacatctttcttgaaagagaaagtaatactgtttaacgaatgagatctttgctcaagcgcaaatcatcagggcgatagccaaaagctgtttaggcagcaagctaatcaaacgccgaatgtagagctgctgtcagatccactgtttttgtgtgattactattgcttgacaaaggggagtccatgtagcc

SEQ ID NO: 334 - DNA, 1212 bp, unidentified
  source 1..1212: mol_type = unassigned DNA; note = element_ISSpi5
cttgtatggataataaacccacctaattacacttaattcccagtttcgggtaatgtgagacccaggctttagctgcaactaaagctttcatttgtcgtagttcgattgaatgatggatcctctatcgagagaccgataacaagaaagaacgcgacaaacgactccaagcaaaatactcgaatagtctactgggtctcgaacccgcatttgcaagcaagagttagcttattatgaaatcaaaaactaatcaaaacattaacgttggtgtcgatactggtaagtaccaactcgacatttatattcgaccactagatatctatttcaccgtttctaacgatgaaaaagggattaaagaagcagtgcgcctcattaaaaagtaccatcctgagcgtattgtcattgaagcgacaggacgtcttgagatgccctttatcatggcttgtgctaacgccaatttacccttcgtgatagccaatccggttcacattaaacgctttgctggagcaataggccaacgcgctaaaacagataagctagacgcacagctgatagctcattacagtgaagcgattaaacctaggctatcaacgctaaagcctgatgtcatgcaggctatgagcgatctcgtaggaaggcggagccagcttttggtcatgcaaacgatggaaaagaatcggcttcaaattctccctcaagagcttgcaatgacgatcaagccaatcttaacggtcttcaaaaatcagataacgaagatagaagataaaatcgttaaactcatcgaatcgaacgctgactatcaagctaaaaaccttatcctgcaaagcatgaaaggaataggtaaaattgccgcagcatccattatcagtaacctaccagagcttggctatattaataacaaagaagccagttcgttggttggtgtagcaccgatgaataaagaaagtggacgctttaaaggccatagaaaaatccagggagggcgacatcaagttagaaccgttttgtacatggcaatgatgtcagcaatacaatccaaccccgtttttaaagagacttatcagcgactcgttgccgcaggaaaacctaagaaagtcgcgattattgcatgcgtaagaaagatggttgtgatcctaaattcgatgctaagagatggtgttttgtgggaagcgccaaaagcttaaaactagctattgacgccatagtctcttgtta

SEQ ID NO: 335 - DNA, 1536 bp, unidentified
  source 1..1536: mol_type = unassigned DNA; note = element_ISSpn10
gcatctagtaggatgcaggcggctctgtcaggctgtgataaggattctcttatgcgaggatgttggaacaaggtgtttctgggaaaccttacagtagtcaaaaaaacttccaaatctaatggaaaggagaccttccttaatgaaatgttttgtcggtttagacgtcagctctacaaaattagatgtgtgtatcatgttgaatgatactagcacccccgtcactgcttccctctctaatgacctttctggggcaacagagattaagaatcatatccttgatttgaatcatacctatcacttcgaaaggattgtcattggcatggaagcaaccagtctctacagtttccaccctgctatgttcttccatgaagatagtcagttgaaagaactacatgttgagattatggtcgaacaacctaataaaatcaagaaatatcgggatgctttcgaagaaaacaaaaacgataccattgatgctttctacattgcggattatttccgtattgagcgattttcaccttctttcttaaaagaagagaaatacatggctctccaacatctcacaagaaccagactccaaatcatcgagcaattaaccagaaccaaacagcacttcattgaaaatatctactacaagtgcaataccttggcttatcaattcaagaaagaagaactctctactaacctatggagttcaacgatgatgaccttgataacagatgagatgaccttagacgaacttgctaacatgcctcttcaagaattagctgattggctccaacaactgggtaaagggcattttaaggactctgagaagcttgctcaaaccattcaagccgctatcagaggttcttatcgcctctctaaactccaacaagattcagtcaatgtcattctcggacttctggctagggaaattcgaaacctggaaaaaatgatcaaggaaattgataaggccattgaagatatggtggaaaccattcctgaatatcaatgcctgacctccatacctggggtcggtaaggtctacgctgctggtatcattgccgaaattggacaaatcgaacgctttaaagaccatccccaggtcgcaaagtttgctggtctgaattggagagaaaagcaatctggtaactcaaactcacaacatacttcgcttgtgaataggggcaatcgttatctgcgctactacctggttgaagccgccaactcggtaaggcgctatgatgacgaatacaaggatttctataagaagaaataccatgaagtacctaaacaccaacacaaacgagccatcgtactaaccgctagaaaatttgtgcgcctggtggttgtgctactacgcaaccatcaactctatacgccaccaaggaggcttatggaagataagtaagttatatctgcacctctccttgaaaatctactgaaaacagtttgaaaacatcgttttcagtagagcttctttagtgcaccctttttttgaaatagttttcaaactttgagcgggggtcgcttgacattttaccactagacttt

SEQ ID NO: 336 - DNA, 1363 bp, unidentified
  source 1..1363: mol_type = unassigned DNA; note = element_ISSpo1
taatgggatgtaccggctgcttcacctagcaggttaggctttgcctatttctgcaaatcaggagaagcagtcatgaaatccaaaagcccagaagagatcgcagtcattggcgttgatatcggcaaggaaaccttccacctcgtcgggtttgatcacgcgggtgagcgagttctgcgcaagaatatcaagcggttggcgataaagccgacgtttgagaagctgccacgctgcgttgtcggcatggaagcctgcataagcgcgcattttgttagccgcatgctgcgagagctcgggtttgagcctcggatcatcccggcgatctatgtgaagccgttcaataaggggcaaaagaacgattacaacgatgcggaggctatcgctgaagcagcaatgcgtccaaacccccgcacggttactgagaaaagccaggatcagttggacctgcaggcaatgcatcgtgttcggtcgaggctggtcgcacgccggaccgccacgatcaatcagatccgggcgttcctgattgagcaaggcatcactgtgcgggcggggcggcataggttgcagagctcgtttgcggcgatcctcgaaaaccggcgcgatgaaatctcatcacgcatgcgcgcgatcctgatgggtctctatggagattggctgtgggttgatgagcggatcaaggcaatctcgtcggagatcgaggaaatcagccgatcggaggagaacagcgccaacatcatgaccattcctgggatcggcccgcttatctcgacggccatcgtttccgccattggcaagggcgaggtgtttgatcgtggtcgagacttcgcagcttgggtcgggttggtgccgcgccagtttagcacgggcgggcgaacaatccttggccggatcagcaaacgcggaaacagctatctgcggatgctgttggtgcaggcggcaaatgtcatcttgatgcgcccgcaccgctgggatgccttaggattaggcccatggctgcgtggcgttgtgggccgtatgccgcataacaaggctgctgtcgctttggccaacaagctggcccgtacggcctggagcgttctgcgctacggatcgaagtaccaggttgagagagacgaggccttggccgcgatctagcggccaaggccccacggagttcgcgaaggagagcagcatgggacggagaaactacgcccccagaatctgagagcccaaatggtcgtcaccgatctggttagtaatgagatcaaggcgcgtgcgtaacccacaatggccacggcccgcgagccgataaacaggccgaatacatatgagcgactaccgcaagccacgccaatatctcacttgcgaacagcagccggtacataca

SEQ ID NO: 337 - DNA, 1523 bp, unidentified
  source 1..1523: mol_type = unassigned DNA; note = element_ISSsu10
gggagcgggaaagacatccatgatggctccgccctcacccacagaataatgaaaacgaacataaagccctcactaggtgtataatcttagtgagggctttgtggttaacgagttaatgatgttagtcatcgcgggaaaaactaactcactctactgacgagcaccccaaaatatgcgacaggcatgagtataaaaatacgactaaaattcggtagataagctctctaatttttagaaggagggaattatcatggatgttctctatcaatcttgtgcaggtattgatgtccatcaagccaatattgttgtctgtatcctacatggaccactcacctcaactcgtccaaagcgtgagatggctacatttgatacaacgactaaaggcctacgtgcttgccacgattttctcagtcaatttcatgtggaagctgttggtatggaaagcaccggtgtctattggcgacctgtctggcatgctctctgtgatgacttcgagctgatactcgctcaaccagcccacatgaaggctattccaggtcagaaaaccgacaagaaggacgctcactggattgccaaattaacacggattggtctgcttcctcggagtttcgttcccgatgaaaccattcaagaattgagggagttgaccagacaacgaaaacattatgtggaaagtcgcaatcgagaaacaaaccgtatccataaatttcttcagtcaggtggtatcaagctaacaacctatattgaagatattatggggctatctggtcgcaatctccttcagctactggttgatgggacgcctattacacctcgcattgttcatcaatccgtttataccagcttgaagaagaaagtgccgcagcttctggaagccttggacggttatttctctgaccatcatcgctttatgttaaagcagtccttagagatttatgatttttatcagaagcagattgagttgttggaagagcgaattactgtctatctatcacaatatgaaaaccatgtagaaacattggattccatcccaggcattgatgtcattacagcttctgttatcatttctgaggttggagttgacatgagtcagtttccgacatctggacatttagcttcttgggctggactctgtccaggtaataatgagagtgctggtaaaaaacgaagtaccaagattcgacacggaaattcatatttgaagaaaatgttaatgtcaagccgcttttcgccgctaggacccagaaaggaagtacccctagcagaccgattttatcagattcaaagtcggcgtggctcacaaaaagcaaccattgcacttgcgcatcaactattaaaaatagcctatatccttttaaaagaacagatgacttatcctgaatttttagcacaaaaaagactactagggacgagctagtagcctaatataaaaattgtttcactttgattctatcatagggagggagtttctgcattcttttgagttttcgtataagaactcgactggtcaaaaagagttcgtc

SEQ ID NO: 338 - DNA, 1607 bp, unidentified
  source 1..1607: mol_type = unassigned DNA; note = element_ISSsu15
agacaatatgtaaagacccccagttgagaattcgtggatttacctgtacactagaataaaaaaacaatcaacttctaacaggaattaccacactcaattggaggtcttatatgtttcattttaccacacttttcatcggaatggatgttcacaaagaaagtttttcactctgctattatgatatgatggcgaatcaattcaaacatagcactaaagttggtccaaatgttagctatattgtgaactatgtgaatgagcttcgtcgtttatatggtcaagatgcagaagtgttatgtggctacgaagccggatgtcttggatttaccctatatcaccagctacaagctcacgggattccctgtatcgtgatggcgcctacaacggtgatgaaggaaggatctaagcgtgttaagactgataaaaaagatgcagctcagctcgcaaaagctctggcctttcgtagctatcggcctgttcatattcctactgttgaggatgaacaagtcaaagaatatatccgcatgagaacagaccacaaagtggctctgaagaaaatcaaacaacaaattcttgccttctgtctccgacatgattttcgctataccgagggaagcagtaattggacacagaaacatgtccgctggctccgttccctaaatcctgatggactttacgcagagattttgacagaatatctattgacctatgagaaattagtagatcaaatagaacggtatgatgcacgaattgagcaactgggtcaaagcgacagttatcaagagaaggtctcacggctttcttgctttattggcattaaaacactaactgctctttccattgtgacagaaatcggtgattttaatcgctttgcgacagctcaacattttgcttcttatcttgggctaactcctagcgaaaattctagcggcgacaaggagagaaaaggtgctatcaccaaagctgggaatagccatgtgagacgacttctgatagaagctgcacaatcattggctaaggggacgattgggtataaatccaaagaattgaaaaggagacaaagtggaaaccgagtggaggtgattgcttatgcggataaggctaatgaacgcttaagaagacgttatcgcacacttgttctaggaaaaaataagaaacaaaatgttgctaaaacagctattgcacgagaattgtctggttttatttgggggatgatgacaggaagaatagcttgaagttagcgcttgttttcatgtacacttttgaccattaagttttatcatcgcagagcgatgaggaatccctatttctatccaaaatcactgggtgaatttggacagaaataaggattgaaatcatgtttgaatggaaagtatcttgaaggagtttaggacttcaaggtttgagtcatctacgaaacgactaagtggcacaattgtgatccacgcttatagagagtaggactcgcggcagaaccattgacctgtaggtaaccaatccacgaatatcagagtggccaatgcccgaagctaagaactaggctctttctagatacttttcattttttaatcagttcgattgtttttacttgacaaagggctttacatatc

SEQ ID NO: 339 - DNA, 1619 bp, unidentified
  source 1..1619: mol_type = unassigned DNA; note = element_ISSsu7
catactaagattagtagtgaggaaatctccgacgggagaaagtactcactactttttctttatgataaagtagaggtgtcttgttaagtcgtagggctttttgacgctagacgtcgcaacaaaaactggcaagacacctgttttagaaagaatgttatcaaagtatgtgggacgccagacgtcgagtattgaaaatgacatcactaaaacaaggaatcattcaagacaaagaggtaatatcatgcgagtagtatttgggattgacgtgagtaaagtaagttcagaagtagccattctagtcaacggcgagaaggttcataactacaccatgtccaatgatgccattggcttttctcggctacttggcgatttgaaaaccgtccacaagccagaaatcatctttgaagcaacaggcgtctattctcgtcgtcttcaatcttttctggatgaacatggctacgcttatacacgactcaatcccttagaagccaagaagcaactggatagcttgcgtgtgagaaaaacagatcaaattgacgccgaaaaactagctcaatctcagtttgtactgaatcgtaaaacgacgtatgtccaagaagaaatctaccaaaacttgcgggatctcagccgtttctatcagaatctgaccgaggacatcgttcgagctaaaaaccgcctgcacaaggccttacaggtcacttttcctgaattggaaaatatcttatcaacaccatctggcgaacaatactggaacttagttatagcttttccttgcaaggacttcgtgcttgatttaagcaaggacgaactctcagagagcattcgtcagtccacctcaaaacgtatttcggacaagcgtgtggcgtatttagctgagaagttgatagcactagctaatcaatcgtattgtgctgtcaagaaaacctctccaatgctggaagaggtccgttactatgcaaaagaattgtttcggctttctgaacagagacaaactatcctagacgaaatggtggaactagctcagccattacctgaatatgacattctgctctctattcctggaatagctgagactactgcaacaagtattattggtgaactgggagatattcgccgttttcagtcagccaatcaaatcaatgcctttatcggtattgacctgagacactatgaatctggtaacttcctcgctaaggaacacattaccaagcgtggtaatccctacgctagaaagattctgttcaagtgtatccacaatatcgcttcagctagtcataccaatccttgccatatcgcagacttttatgagaaacgaaaaagacaatcgcaaacgacttcaacgaagccgcacacgattgcctccatacatcgtctcattcggacaatgtattacctcattatgcataacaaactttacgattacgcttcaacccaaaatcggtaaaactgtttatgctctatcattgtaacaccttatcaaaaaatttcaacataaggtgttggttttgtatgcactttttacactaaactttagtccaaaataaaacaatttccttattttgactattgaactcaaaatatttttcgtcaaataccttgatggacttgacaaatagtag

SEQ ID NO: 340 - DNA, 1484 bp, unidentified
  source 1..1484: mol_type = unassigned DNA; note = element_ISStac1
cccccgttatgttcttcgcggtcctgcaggagggccgctggcctctgggcccggtattgctggtcccccctgtcgaacggatgacctggggggtggtgtcaccgggcctgggaggcgtcgttggagacgctgatgagaggtccgactaccgcctggcctggtgcaacgcccggccgcttgagggcgggaggtctgcataacgtcgatgcgcgcacgacgccaacgcccaagccagcacacccgacatgcgtccgggaggacggcgtgaacgacaacgacgcgataggtgtcttcctcggcctggacgtcggcaagagcgcccaccacgggcacggcctcacccctgccggcaagaaggtcttcgacaagcagctgcccaacaccgaaccgaagctgcgggacgtcttcaccaagctgactaccaagttcgtcggcatggtcctggtgatcgtggaccagccggcctcgatcggcgccctgcccctgacggtcgcccgcgagacgggctgcaaggttgcctacctgcccggactggccatgcggcggatcgccgatctctaccccggcgaggcgaagaccgacgcgaaagacgccgcgatcatcgccgacgcggcccgcacgatgccgcagaccctgcgttcgcttcagctgaccgacgagatcaccgccgaactgaccgtcctggtcggcttcgaccaggacctcgccgccgaggccacccgcacctccaaccgcatccgcggcctgctcacccagttccacccgtccctggagcgcgtccttggcccgcgtctggaccaccaggccgtcacctggctgctggaacgctacggatccccggcagccctacggaaagccggccgccgcaggctcgtcgaggtgatccggcccagggctccccggatggccaaccgactggtcgacgacatcttcgaggccctcaacgggcagaccgtcgtcgttccgggcaccagcacgctggacatcgtgatcccctcgctggcccgctcgctcggcgccgtccacgaacagcgacgggcgaccgaagcccagatcacaaccctgctggaggaccaccctctttcgaaggtcctgacgtcgctgcccggcgtcggcgtcaggaccgccgccaccctgctggtcaccgtcggcgacggcaccagcttccccaccgccgcccacctggcctcctgcgccggcctcgccccgaccacgaaatcgtccggaacctcgatccacggcgaacacgcaccgcgaggcggcaaccggcagctcaaacgcgcgatgttcctgtccgcgttcgccgccctgcacgaccccgcctcccgcacctgctacgacaagtgccgggtcagaggaaagacccacacccaggccctcctccgcctggcccgccagcgcatcaacgtgctgttcgcgatgctccgcgacggcaccttctacgaacccagaaccccacgcctcgcttgacgaaagacatagag

SEQ ID NO: 341 - DNA, 1484 bp, unidentified
  source 1..1484: mol_type = unassigned DNA; note = element_ISSto4
ctcccacgggggattctcgtaaatcaagtgaacggataaaaccaagtattacgagagtaaaataaataagcaagtaaggagaaaaacaccataagcccaaccacactaaggggttaaaaccccatcataaggctggctgtgaagcccctagaacgatctaacaagaggggttaaaaccccgagtgggaggatgtaacaaattaccctaggggctgaatatagttaacattatgtaaagaaaacacggtattatgaacacaaaaaatatcttgtaaaacgagaaatattcaaacatgacaaaggactttgtaagcaaagccttcgcaatagacatctcacaaagcaaactaacagcagcaaagggagaactagttataaaacaagaaaaaccatcagtaacagtcaaggaagtaaaagaattcccttacaacaacgagggaatagaagagttaataaaattccttgagggatacaacgagggaatattagaggcaacaggagtatacttctactacctacacgaaaaactaacagaaaaaggattcaaagtaacagtagtaaacccagcacacttgacagaaatactaggaaaaaagacagacaaactagacgcacaaagactactagtagcatacatgaccggagtaataaaaggatcatacataccaacgggagaaataaaagaactaagagagttaacaagacatagggaaaacctagtaaacaagataacacaagtaaaaaacgagataagaaaaaccttggaaattgccgggtataaaatagaaccattcgacaaaaaaggaagacaactactagaaaaactagcaaaaggagaagaattgagcaaggaagagaaggaagagttaaaagagaaactagggagaaacttgaatgacgcagaaaaactaacactaaaacaactagttgagttattgaaaagcttggagaacatggttaaggaagttgaggacatgataatatccaagataccaaaaccggtaatagagttatccaagatccctggaattggtttaatcactgcagcaacaatttatgctgaatttggtgatatctcacgttttccaaactcaaaggcagctagggcttatgcgggtttcgcacctagaacaaagcagagtggtaatagtgagtcccactctggtatgattaggggtaataagcgcttacgtaggggtttctacttagctgctaggagtgccagatggcttgaaccatttaacgagttttacgagaggctcattgctaggggtaagagtgtaaggcaagctacatgtgcacttgcggggaagcttgcttgcatagtatatcacgttttaaaggacggtgtttacaagggcatagtcaagaagcgtcttaggatacccaagggtggggaagttaatgtcaaggatttcgacgtgggagacgcactggactcgttatccccgtaggtttgttagaggcggtagcgtgtagtgcct

SEQ ID NO: 342 - DNA, 1246 bp, unidentified
  source 1..1246: mol_type = unassigned DNA; note = element_ISSto6
cctatataggttttaatagccggggagagtaatactcctcggctggggaaacatggtcgatctcctatctgaagcaaagtcttcgtacgagggcgtgacaaacccctaccatcggactgaacattgtggaaaaatccacgaatataggtgtggtaaagaggtaggggtattaggaatagatgtatcaaaagattatctaattacaagtagggggagggaaagaaaatacaagaacaacttgaagggttacgaggaaatcctcgaaatgaagccttgcctaatagtcctagaacctacgggagtatacgcaataaggcctagccagtacttcaaggagaagggtgtaaaagtactacaagtaagcccaaacgtgttatcaagagaaaaggagtttagggggaagaaaacagatttttatgatgctgaaaaattagaaaacatggttgacaaggctaaggaatacgagtacaaccccttgagggaactggtaacactttacctcttcctcaaggatatagaagtaaagtacaagaacaggctgaagaggacattattcttagtaagtgataatgacaagataagtaaggaaaggttagaaaagctcgcaaatggagattttgcgcaagaagaactatatcaactagaatatacaccaatagtacttgaggaaattagagtattggcaaaaacactcttggaaacacaagagaggttaaaagaagttaagaaaatgattgaggagcaagttcccgagaaccacgttttgttaacgatcccggggattgggaggcttgcagctggtataattattggtgttgttggtgatgttaagcgctttcctaagcctgagtcttttgtggcttattgtggtttagatcccgttgtggagaggagtggtaggagtgtgataagtagggggatttcgaagaggggtaataagtatttgcgtagcttattctactttttggctgagatgaattattctaggaatccaacattgttgaagttttatgagtctcataaggataggttgcaaggtaagaagttgtatactgctttggcaaggaaattagctaggattgtatggagtgtttggtataataataagccttatgagccaaagtgattaaaggtcccttccccttaatcgccacgtgggtctagagggcccacgtggcaatcttagctagtactatgcttgaaatatgaccgaaagatttattactgaacgcccccatttttgtaa

SEQ ID NO: 343 - DNA, 1571 bp, unidentified
  source 1..1571: mol_type = unassigned DNA; note = element_ISVisp2
tagacataatgacccccacgaaaggtgctagcctccaatatcgtgggttagcttaaagccagagccataattagtgcgtcaaacaactaaatttggaggctagcatgaataaagatagcataatttttattggcttagatacgcataagtcatttattcaagtcactgtattacaagaacatcgtggggcaaatccacttcaccttggccgtattaaatcgaataagtccgcgttgattaaattggccaaacagctgcaatccaagtatcccaaagccactctgcactttgtctatgaagcaggaccatgtggttactggacttatcgcttaatgacgagccttggacactgctgctatgtcgtcgctccatcacttatacctaaaaagccaggcgatagagttaaaaccgacaaacgagacgctgcaaagctcgccaagctgttaaaagccgaagagctcacacccatctatgtaccggaagcaaaagatgaagccattcgagacctctcgcgtgccagagaaaccgcaatgaaagatctcaaagacgcaaaattccaactcaaaggctttcttcttcgcaataatatccaagcgacggtgaatgataactggtctaaaaagcatctacggtggctaaccgacctcattcttcctcatcatagtcagcaaatcgttttacaagagatgatcattaccatcaatgagcgaatacagcggcttcaacgactcgataatgaactactccatcaagtcaaaaactggcgatactatcctgtggtgaaagccattcaagctatgcgtggagtccggttactcgtagcactcggcacaatagccgaactgggtgacttacgacgatttgatcatccaagaaagcttatggcttacctcggactcgttccaacagaaaactccagtggcggtaaaactcgtcgtggcagcttaacaaagtgtggcaacagtcgggccagacggttgctggtcgaaggcgcacacacctataagcacaaagcgaacatctctgtagagctccaactaaggcaagaaggactgcctaaagagatcgtcgatatcgcttggcaggcccagcaaaggttatgtcgtcgttaccaacgattgctacaaaaaggtaaacaccgaaatgtcgttgtagtcgccatcgctagagagatgatcgcttacatctgggcgattgctcgtgaagtagtcatcagcgacgtcgatcctaaaactcgaatcgctcgattaccggcatgaagacagaattagtgttatcgcattggataaagcatcgggagtggcacaaacaccggcggcgttaggacggcaatatagcttcggctgtattgaaccacgagcatagactgaagacaggtgccacgacggaacaagtaaggtaggctctactcatcaaacgatgagcaatccacgtatatcagcatgagaaccgacgacattacttgcttcatctatgcggtaacactatcccctaagcaacaagaaaagctctgataatacaggagagaaacttctacgtttttaattgacagtgggggtcatatcaacgcc

SEQ ID NO: 344 - DNA, 1364 bp, unidentified
  source 1..1364: mol_type = unassigned DNA; note = element_ISVisp6
acgaatgacatggattccccctaccgaggatctgccacacttatgtggtacttaaatgcatcggaggcaccatgtctgattattcttatttctgcggtatcgacctagctaaaaaccactttagtcttcatgccgtagaccaaaatggtaaggtcatacttcataagtcagtaactcgctctaaactactgactacaatagcaaatatgccactcatgcgtataggcgttgaagcgtgtggtggtgcacattattgggcaagaacactcaataaacttgggcacgacgcccgcattatggctgttaaatacgtaattccttatcgaactaagggaaagaacgaccttaatgatgctgttgctatctgcgaagctgttcagcgaccatctactcgctttgtgcctgtaaaatcccccgagcaacaagccatcttatcggtacatagaatgagagagcattgggttcgtgagcgcaccgcgcttatgaatcgcatgcgtgccctactttctgagttcgggttaaccattcctgttggccgctcttcattaatgaaacaggttcccttaatgctggaagacgcagaaaatgaactaccacacctcgcgagaacagtgattgccgatgcttatcgccaccttggtgaattgaatcaacgtatcgccgatactgaacaagtcttcgattcttttgctaaggtcagcattaatgttcaacgagtgatgaaagttcggggcattggaccgcaaaccgctactgcgatacttgcttcgataggcaatggttctcaatttgataaaagccgtgatttctctgcttggctaggactagtaccaaagcaatattcgacgggaggaaagcctcgcttaggtcggataaccaaacacggcgacaaatacttgcgaacactattagttcacggggcaaggacagtcattgccaaccttggcgacaagcaagataagctaagtcagtggtgtcgaggcgttctagaacgaagaggaatgaaccgagcgatagtggcacttgccgcgaagaacgcacgaattatatggtcgcttttacacaatcaaaccgaatatgaaaactatgctgcttaagtagaaacctaagcagcataaagagttaaacccaccgggtcattgcagacgctaatgatggagataggttaagaccacttgcggagagcctgttaatgcggcggacacactagatgtcatctaacgaataaggcaccgcagtcgcgcaagtcatcagggccacgacgtatgcgaatcgtcgataagtaggccgaatgtagagcggcagtccaaaacccatcaacataagtttagcggatgtttgacaaccgggggaatccatgtagc

SEQ ID NO: 345 - DNA, 1618 bp, unidentified
  source 1..1618: mol_type = unassigned DNA; note = element_ISWpi13
caacgaacagataaaatctgttaaacgatgaagaaactccattacttatgcttttaacagtctttgagtataattttgtggaagcgcttttgcagttataaccggactatccaatggtgccataagtgcccgcaggcaagcatggttttggaggaaacggttaaactattgatggagtcttttagactacctcgcttagaagattgtataatctaaccgtccccaagctgaagcgcttctccattataagttatataggaggaatttgacatgacaaaagcaaaaagtaaattagaaatagtgaatccgaatgcatcaggaatagacattggttcagccgtacactatgtatgcgtacctgagggaagagataaacaacgtgttcagaaatttggctgctttactgcagaccttcataatttggcacgctggttgaagaagtgcaaagttacaactgtggcaatggaatcaacaggagtgtactggatttctttatttcaaatacttgaatcatatgaattcgaggtcaagttggtaaatgcacgacatgtaaagaatgtacctggcaggaagtctgacgttcaagattgccaatggcttcaacaattgcatagctacggattgcttcgtggatcatttagaccagataatcagatgtgtgtattgcgtagttatgtgcggcaacgtaaaaaacttactgagagtgcatccacgcatgttctgcgtatgcagaaggcattaattcaaatgaatattcaattacacaaggttattagcaatattactggagtgactggtatgaaaatcattgaggctataattgaaggcgaaagaaatcctgagaaattggctgaattcagaagctcgaatataaagaatgataaagctactatagcaaaagcattaacaggagactatagagaagaacatttgtttgtattaaaacaagaacttgagctatataatatttaccaggaaaaaatagcagagtgtgatgaaaatatagagaattactataaaacatttgaaacaaaattctgtggaaataagcaatgtagtaaaataaagaataggtctacaaaaaacaggccaaacttttctatacatgaggaattgcatagagtaacaggtatggatttcactaaagttccagggcttgatgcattaagcatacaaaccataatttcagaaactggtataaatcacaataaatggccaacagaaaagcacttttcgtcgtggttgggactcagtcctgctaataaaattacaggagaaaaagtgtttagcacaagaacgtgtagagtcattaatcgtgctgcgaatgcatttcgaatggctgctcactgtgtatcaagaagcaacagcggaataggtgcatattgtagaagattaaagaaacgactaggtgcaccaaaagcgattactgctacggcaaggaaattagcatgtatcttttacagtatgctaaagcatggacaagagtatgttgagaaagggattgactactatgagaaactatataaggagagagtattgaaaaatttaagcaaaaaggccagtgaacttggttatgttttaacaaaaaaacatgaactaatatagggagtttgttaga

SEQ ID NO: 346 - DNA, 1360 bp, unidentified
  source 1..1360: mol_type = unassigned DNA; note = element_ISXpo1
tgtagtgatgtgatggacgtccccctcttcagttgtaaacagtgtcatcgttaacttgatactgaatacattgcatttcgggagtatttctcatgaacataatcaaagtggtgggtattgatctcgctaaaaatgttttccaggtctgtgtctggttaacggataactctatcgcctggaacaaaaaagtctcacggcaaaaattgctggatacactccgggcgtttccgcccaatacccttattgcgatggaggcttgccagggagctcattattggggaagaacgctccaggctatgggctatgccgtccggcttattccgactcagtatgtcaaggcactctgtaaaaatcagaaaaacgatgccaatgatgcgctggctatctgtgaaacctcctgccgtcccgggattcattttgttccggtcaaaacggttgagcagcaggatatcaaagccctgcgcagtgcccggcaactcgtggtagaacagcgtaccaccctggttaatcaaatccgggcattgcttgtcgaacaggggatcgttatcccagcaggcattcagcaactccggcacgccctgcctgatattctggaagagggaaacaatgccttatcctttgttctgcgccgccttctccattcgttgcaggaagatatgcagcgatttgatgtccgtatttacgacatggataaagaaattcaggccgtttcaagccagcaatcgggttatgcccatttactgaccattcccggtgtggggccactgattgccgccgcttttgtcagtgaagtcaatgcagaacaattccaaaatggtcgtcagctttcagcctggtgtgggctggttccacgccaatacagttctgggggaaaaaaccgtctgtctggtatgaccaaacagggcaaccgtcacttgcgaacgttaatcattcacggtgcccgtgcggtgatgcgctgttgtcaaaaacgtgaggatgttctgggcggatggttaagaaaattaattgcccgatgtggcttcatgaaggcaacggtcgccttggccaacaaactggtgcgtattatctggcgaattttaaaggatgatgttgattttatgatgaagaaagccgtgaattaaccgtaagcgtacggggaaccccacctagccaggataaatccattgattaaactagtttcacctattatgatgatggaaaaaactcacatgagccaatccaggtttactcaagccgagtggcgggacctgtttgaacagcagaaaaaatccgaactgactgtcccgcagttttgccaaaaaatcggtgtgtcgacaacccggttctatcaccaccgccaacgcacctcccatccaccaga

SEQ ID NO: 347 - DNA, 1376 bp, unidentified
  source 1..1376: mol_type = unassigned DNA; note = element_ISYen1
taatgaaatggacgctccaacttttacggcatcagagtgcctaaatgtgagtgttaaaactcagaagaaggagcgtccacatgaaagtatctactcttggtatcgacttggcaaaaaatgttttccagcttcatggtgtcggctgcaacggtcaaactgttcttaagaagaaactcacccgcgataaattccttccttttctcatgcaacttgaaccttgcttgattggcatggaggcctgtgcttccagtcatcattttgcgcgtgttttacggcagtatgggcatgaggttaaactcattccccctcagtatgtgaaaccttatgtcaaaacgaataagacagatgccgctgatgcagaagccatttgtgaagctgttgcacggcctaatatgcgttttgttcagattaaaacggcagagcaacaagctattctggtgctgcataccgagcgaaacatccttatccgcgaacgcacggcttgtgctaatagtatgcgggccattttggctgaatttggcatcatcatgcctcgcacattaagtcagctgtataagaaaatccctgaaatactggaagaatatgataacgagttatcaccttttgtccgttgtagtgtcgcgcgtcaacttgaacaccttcagggtgtggaagatcaaatcacgttgatcgaacaagaacttagcagttgggcaaaaacacaacccgcctgccagcgggtcttgaaagtccctggtgtgggattgatgacggcgacctaccttgtggcgtcagtggggaatgggcaacaatttcattcagcgaaacagtttgccgcctggttgggattggtgccgagagagttctccagtggcggtaagcagagattgggccgaatcagcaaaagaggtgaccgctatttccgttatcttctggtccatggtgcgcgggcagttgcagccgttattgaaagacacaaagacaatatgccgtggctttacaggctgttgagtaaaaaggcctataacgtggccgttgtggcacaggccaataaaacggcacgtattttgtggtcgatgctggttcagcatacggaatatcgaaccttatccgtggtttgagataatctcaaacacggataaggctcaagaacaaaagtgaatacgtttcaggtaattgcaagtgtaattattgagatggcaaaacaggtaagaccgcaagtgagaaactccgtgagccgctggggcatttggcccgtaaggatgataggaactcacttggcggatttcatcatggttcgggcgcaatcgcgcccataaagaaaccggatatatggctgcaatacctgagcgctattttcaagaaaaaacacttggtttattgggagcgtccatata

SEQ ID NO: 348 - DNA, 1577 bp, unidentified
  source 1..1577: mol_type = unassigned DNA; note = element_ISYps2
tccgtgatacctattgagtgcatccagctagcgtttaagtcagctattttctacaacttgtaatgtctgtgtctgtcacaagtggagaaaatcaatgaacactttagttagtaacatcggtgtgtcggggactctgattgccctagatatcgctaaaaaacatcacgatgcaaaaattcggcacccggatggacgaacatcctacctgcgtattgaaaattccctggaagggttcaaccgactgcttgcgctcaccgcttcaccccatgaagatattatcgctgcctttgaacctacagctgattatcaccgcaacatcgcatggtggttacataagcagggagttcagtgccatcttgtttcatctatcagatgtgcgcgagctcgtgagatgctgtttaagacctgggataaaaatgatcgcaaagatgccagtgtcattatgtatttgctcgaacaaggattatcttcaccattttatgatcctctggcgaatggcattatcgatatacaggagatatcaaacacatatcatcaggttactctggcactaacacgatgtctgaacagcctggttaaccactatctgaccctttattttcccgaagctgagcagtttctgcatatgtcccgggcagagtggttctgccagtttttacttcaattccctacaccgtcttgtatcacgtcactgaaccgggatgtgtttgtaaaacagtcatgggatgttgttggccggaaacagtataaacagcagtttcttgaacatctctatgatgttgctgcggattccattgcattaccgttgtcagaagattctctggcagtgaccacgttcagattgcagcttcaccgttatgtcgggctttcggctcaacgattgcagcttgaaaagcagtcagaaaaatatttacaggaacggagcgactacagacacttacgtacgatcccgggtattggtgctgtcattgcccttatgataattgccgaaagtggtgatttgacacgtttcgctcattatcggcagtacctcaacttttgcggttttaatctttccgccagtcagagcggacaaaagcacagtggttacagattgtcgaaacgtggaaatgcgcggttaagatatgccttctggcttgccgccaccgtagccgtaagaacgagagaaaacagcttccgctacaaatatgaacgttatattcgggaaaatggagataagccagatcagaaaagaaaagccatgacggctgtggcaacaaaagtcgccagagtggcgcatgcaattgtaaagcaggatattgattacaaagggtattatgaaataagccatgggacgtgattcaacgggccgtaaggcgcatcgcgaccattagataacgctcaacgtccatggtttcccaaaatgctgtgttaagtcctgtcgggccatttcggacccttgtatgtcatggtaagcatatttataagccgaaaggagatgagcaatatcggatacaaaaatgaaccatcgtcttcgtattagatggcaggatccctgcgtgtaaaatagttgactcagacggtagtccgttatcaga

SEQ ID NO: 349 - DNA, 1429 bp, unidentified
  source 1..1429: mol_type = unassigned DNA; note = element_001fad1
  misc_feature 1..3: note = core
  misc_feature 4..119: note = LE
  misc_feature 120..1157: note = CDS
  misc_feature 1158..1429: note = RE
  misc_feature 1181..1381: note = bridgeRNA
agatggggtattcggctcgagcccatcctccgaggtgggagtaaggtgctgcgcttcgagctgatgataaaacgtggtctgtttggaacggccacaagcatcaggaaaggaagcgcagcatgaaacactatgcgggattggacgtttcggtgaaagagacgtcgatatgcatcatcgacgaaaccggcaggatttgccgggagatgaaggcttcaagccacccggaagaccttatcaaggcgttgaaggcacccgagtggcgatttgtccgggtcgggcttgaagccgggccgttgtcgcaatggctgtttagcggattggtggaggtgggcctaccggcgatctgcatagaaacccgtcatgcgaaagcgttcttgaaagcgcaggtgaacaagaccgaccgcaatgacgctcgtggcattgcacagatgatgcgggtgaatttattccggccggtacacgtcaagacactggcgaaccaacggcgccgggctctcctgaacgctcgcaggctcttgcaggagaaggccattgccatcgagaacgacgtccgcggtctcctgcgcaacttcgggctcaaagtcggcgtcgtcgggacggtcggcttcgatgcgcgcgtccgggagcttgtcgccggaatgcctgaactgggcgagatcatgaggcctttgctggcagcacgacagaagctgcgggaggccttcatggaactccatcgcaagctgctggcgattgtccgggacgacgaagtttgtcgtcgattgatgacgatccccggggtcgggcccgtcacctcgctcgcgttcaacagcaccatcgacgtcccggcgcgctttgcccacgctcgctccgtcggtccggcgttgggcctgacgccgatccttcaccaatctggcgaaaaccatcaggtcggccgtgtctcactctgtggcgacggcatgatgcgctccctgctttacgaggcggcgcaggtcatgttgagccgagtgaagaaatggtcctggctgaaagcctgggcgatgaatgtcgccaagcggcgcgggcggcgaaaggccattgtggcgctggcacgccggctggcggtgatcatgcatcggatgtggagcgacggcaccgaattccgctggacaagggaagaattggtcaaggctgcctgacggttacggggaaggagactactaaagttccgcctgctggtggaaggacgtccttcgcgggacgacggatgggacgagctcgctttgggtcttgtgccgatcgcaccatagcgatcaggacgcgagtcagattggaccgcctcattctactgatcccatgctgggagggccgacgagccgatcccgaagagaagcgggagcccgcggaagacctcaaatgccggcgaagtggaatgctcgaaagcgcttgacctcaacacgccgaatagaga

SEQ ID NO: 350 - DNA, 1204 bp, unidentified
  source 1..1204: mol_type = unassigned DNA; note = element_0020f6d
  misc_feature 1..2: note = core
  misc_feature 3..130: note = LE
  misc_feature 131..1189: note = CDS
  misc_feature 1190..1204: note = RE
cttgtatgttcaggcctgaccagcacggtagagtccgatcaccgctgaggtgaccggaccggaccgtgcagcctgagcccggctggggccgtcgagttcgctcgtaagcccgtctctgagtcgattgcgcatggactccgtgctggtcttcccgatgcccgaacggttagcagagccgctgtcggcgagctcgcatgcacaagcaagggttacgaagaccatgtctggatcatccgtgatggtgggcatcgacgtcgccagcgagcacgtcgatgtggcggcgatcggtgccgaactgccggctgcgctcgcccgagtgagcaacgacgccgatggccacagcgcgctggccgaaggcctggtacgcctggccccgggtctggtgctgatggaggccacaggcggctacgaggcggcgctagcgtgcgcgctgcaggccgcgggacttcgggtttcggtgatcaacccgaggatggcgcgcgacttcgcccgcgcgatgcagcggctggccaagaccgaccgcatcgacgccgcaacgctcgccgaactcgccgaggtgctggcgcgccggcccgatgccgagcggttcatccgcccgctcaccgagcccgagcaacaggacctggcggcgctcgtgacgcgccgccggcagctgatcaccatgcagctctccgagcgtcagcggcttcggctggcgcgccccgtggcacgcccgagcatcgaggcgatgatcgaggcgatcaagcgtcagctcgacgacgtcgaggccgagatggcccgccacgtcgggcagcaccacagtgccttggccaaggtcctgcagggcgtggccggcatcggcaaggtggccgcggcaactctgatcgccgagctgcccgaactggggcgcctgaaccggcgccagatctgcgcgctggtgggcgtggccccttacgccaacgactccggctcgagccgaggacgacggcggattgcaggcgggcgcttcgaggtacgacgcacgctctacatggccaccctcaccgcgacccgccacaacgccccgatccgcgagttctacgagcgcctggtgaccgccggcaagctcaagaaggtggccctgatcgcatgcatgcgcaaactgatcacccacctcaacgccatcgcccgcgaccacctcaacgctccccatcggcccgcgatcgcttgaccgaagacacggtta

SEQ ID NO: 351 - DNA, 1432 bp, unidentified
  source 1..1432: mol_type = unassigned DNA; note = element_0021d87
  misc_feature 1: note = core
  misc_feature 2..62: note = LE
  misc_feature 63..851: note = CDS
  misc_feature 852..1432: note = RE
  misc_feature 1210..1426: note = bridgeRNA
tactggcatggtccgccgcctagccccctggagggtgtagaggtgtagacaggaggcgtcccatggagattcacacgatcggcattgatttagcaaagaccatttttcacctggtaggtgttaccgcacgcggcgaagtcgtggtgcgcaagaagtgttcgcgtaatcagcttctgcgcttcacatcgaatctgcgcgtgtccctgatcggcatggaggcctgcggaggatcccacttcctgggccgggctctacgagaacaggggcatgatgtacgcctgatgccagcccagtatgtaaagccgtacgtgaagacgaacaagaacgactacatcgatgcggaagccattgctgaggccgttacgcgtcccagtatgcgtttcgtgccgatcaagacggatgatcaactggatctgcagtctcttcaccgggtacgcgagcggtgggtggggcgtcgtaccgcggtgatcaaccagattcgtggaatgctgctcgagcgcggcatcacggtgacgaagggacgccgccatatcgaagagtccctgcccggtatcctggaggactccgacaacaagctctcaggtgcgttgcgggtactgcttaccgagttacgactggagatgcagtatctcagccgacagatcgaggaatcggaccagctgattctgcgcatcgccagcgaacttgaaccctgccggcgactggtcgcgatccccggaattggaccggtgatcgccactgccacgattgcagcgatcggtaacggagcagcgttcaaaaagggccgcggatttgccacttggttgggagtggttccaggcgagcactctagcggaggcaacaaacactgacggagacgagcaggcgcggaaacaggtacttgcgcaaactcttcgtgcagggggcacatgccgtactgcaacagaggaggacacaatctaccggcctgagcacgtggctggcacaactcacaacccgtaaacgcattcacgtcgcggcagtagctttagcgaataaactggcgcgcatggtctgggcggttttgtacaagggagaagcatatcgcccgccgctgttaccgcaacctgccgtagcttgatggcctgcacatgacgcctggcaaaaacgccaggcttggaaatcgctgcagcgattcccacatctgcagtccaatggcgacggctactgattttactttttcaaaccctgccaggtttgctggcgcaccatgagatggcacaacggtcgatcccggcgctcccgaaacctgtaatccggaaaagcctaccaaggccgcgttactaggtaggacgagggcgcagcgcattccaatcaggccaggagacagctactccaacaaaggccggatacattcgcgcagaccaacacgccattcccatttttcgcttgcaatacggcggcggaccataca

SEQ ID NO: 352 - DNA, 1417 bp, unidentified
  source 1..1417: mol_type = unassigned DNA; note = element_0024046
  misc_feature 1: note = core
  misc_feature 2..93: note = LE
  misc_feature 94..1134: note = CDS
  misc_feature 1135..1417: note = RE
  misc_feature 1182..1412: note = bridgeRNA
taatggaatggacgcccacttcctaatacggcatcgaagtgccaaagtagtggtggctttactaccactaaccaaagaaaggggcatccaaaaatgaagattacgacaataggcatcgacttggcaaaaaatgtttttcagctccacggcgtggatgagcgcggcaaggtggctgtgcgcaagccgctcaagcgtaaggagatgtcgagctattttgccaaccttgagccgtgcctgatcggcatggaggcctgcggcagcgcgcaccactgggcgagaaagctggaaggctttgggcacacggtcaagctgatggccccgcagttcgtcaaaccctatgtcaaaaccaacaagaacgacatggccgatgcggaagcgatctgcgaagcggtgggcagaccgaatatgcgcttcgttgcaatgaagaacgtcgaacaacaagccatcctgtccgtgcatcgcgcccgccagggcttcgtcaaagcccgcaccgcacagggcaaccagatacgcggcctgctctccgagttcggcatcgtcatcccgcagggaatcggctcggtcatgaagcaggtgccggaaatactggaagacggcgaaaacggattgcccggtacgatgcgccacctgatcgcacgtcttgccgataacctgaaagaaatggatcgtcaggccaaagaactggaagcacagatacagttgtggcacagagagaatgcagccagccgcaaactggccgagatacccgggctgggcccgatcaccgcgagcgcgatcgtggcgaccgtgggcgatgcgcgagagttcaagaatggccgtcagctcgccgcctggttggggttggtgccccggcagaattccagcggcggcaaacagaacctgctgggcatcagcaagcgcggcgacacctacctgcgcaccctgatgatccacggcgcaagatcggtcgtgcgggttgccgagaagaaggcggagccgggaagctggatgaaaaacttgatggggcggcgcaacaagaacgtggcggcggtcgcattggcgaacaagaatgcccggatcgtctgggcactgctggcccatgacagaatgttccgccccgattacacatcggcagccgtagttgccgctatgtaatcgaggcggctgagtaaaaccagattttaacgagttgaaggagtagcacgtaccaccgattgcacaggcaatcatgaaatgatggcgagacaggtcagaccgtgagtgagtaattccgattagctccacgggcgaaaagcccgctaacgtgatgggaactcattcagcaaattccatcagggataggggcgagagcctcacacgaaatccggatgtatggctgcaatctttacctacctcaaaatcgtcaattgaaagcttggcaaaagtgggcatccatgta

SEQ ID NO: 353 - DNA, 1551 bp, unidentified
  source 1..1551: mol_type = unassigned DNA; note = element_002e543
  misc_feature 1..2: note = core
  misc_feature 3..268: note = LE
  misc_feature 269..1531: note = CDS
  misc_feature 1532..1551: note = RE
  misc_feature 6..262: note = bridgeRNA
ctaatggggctcaccgggtcggccctgcgggtgcaggctcggtgccggtagcgaccggcagggtcagcactcccaccgcctggacgttgagtcctttggtcagatcgtgcgccctgtcggccgtggggagacgtgatcgctgatgggatgacgtgccccgtccgcgctcgggttcgctcggtgtggcggtgagcacttgaccattaggtcgctgacgggtctcctctttcgctgccgatcggtgtccgcgcagggagaagaggtcagggtgttgttcgtcggggatgactgggcagaggaccaccacgacatcgaggtggtggatgagacgggtcggcggttggcccgggcgcgggtgccggaggggatcaccgggatcacccggttgcacgagctgatcgcggaacatctgggtgaggaggcggtcgacccggacaccgggcaggtcgccgggcaggtggtggtcgggatcgagaccgaccggggcagctgggttgcggcgctggtcgcggccggctaccaggtgttcgcgatcaacccgatgtcggcggcccgctaccgggagcggcactccacctccggggcgaagtccgatgccggggacgcgcacgtgctcgccgagatcgtccggctggaccgggcccatcaccgccgggtcgccggggacacccccggggtggaggggctgaagctggttgcccggacccatcagagtctgatctgggaccggacccggcagctgctgcgcctgcgcagcgcgctgcgggagttcttccccgccgcgttggccgcgttcaccgcggccgggctggacctgaccgaccccgacgcgctggagctgctgggccgggccccggacccggaccgggccgggtggctgtcccgcccggcgatcaccgctgccctcaaccgcggccggcgccgtgatgtcgacgccaaggccgagaagatccagacggtgctgcgggccccggagctgcgccaacccgagccggtccagcgcgcctacgccgccatcgtcgtcgcccaggcccgactgatcgccgcgctcagcgcccagatcgcggagctgcaggcggtggtggccgagggttttggccagcacccggccgctgagacctacctcagccagccgggactgggcccggtcctcgcggcccgggtcctcgccgagttcggggacgaccccacccgctacgccgacgcccgcgcccgcaagaactacgccggcacctccccgatcacccgcgcctcggggaaacggaccctcgtgctggcccggtacgcccgcaaccgccgcctcggcgacgccgaccaccaatgggccttctgcgccctgaccagctcacccggagcccgcgcctactacgaccgcctccgcgcccgcggcaccggccaccacgccgccctacgccagctcggcaaccgcctcgtcggcatcctgcacggctgcctcaaaaccaacaccccctacaccgagaccaccgcctggcccaccgccgaacaccccccactgaccgccgcagcttgacacccaagaccatgggatgt

SEQ ID NO: 354 - DNA, 1341 bp, unidentified
  source 1..1341: mol_type = unassigned DNA; note = element_002f21a
  misc_feature 1: note = core
  misc_feature 2..68: note = LE
  misc_feature 69..965: note = CDS
  misc_feature 966..1341: note = RE
  misc_feature 1104..1331: note = bridgeRNA
tatgggatggcccgcccttccgagaacatcgagtatgatgtctcttttgaagagaaaggagccgagccatgcagatttccatattgggtgtcgacattgggaagaacagcttcagtgtcgttggtgttgacggccagggtgccgtgattttgcgtcgaacaatgcggcgacagacattgattgattttgtcgagaagctgccacgctgcgtcatcgcgatggaagcatgctgcggcgcacatcatcttggtcggctctttgccgctgctggtcatgaagtgcggcttatgtcgccggaatatgtcaggccttacgtaaaagcacagaagaatgatgatcgagatgcagagggaattgccgaggcggcgtctcgcccgacgatgcggttcgtggacctgaagagccaagagcaacttgatatccagacgctgcatcgggttcgatcacgcctggttgctgagcgcacgaccttgatcaatcagctccgcgcaattcttctggaacgaggtgtggtgttccctgccgggcgcgtgaagttcgaaagtgctcttgatgaccttattgccggaggcaacgacgtattgtcgccgcgcatccgaagcctgatcctggaattgcgagacgaatggcgaaggctcgaccagaagattgagacgttgaacacggagttcgtagcgctcgccaagcagaacagcgcaatgcgtcgtctgacttcaatacctgggatcggtgtcttgaatgcgaccgcgctcgttgcagcgatcggagatgccagcagcttccagcacgcccgagatcttggagcatggttgggacttgtgcctcgtcagttcacgaccggtggcaaggcgcggctgcttggcataaccaagcgcggcaatacatatctgcgaaccctgctcgttcatggtgctcgagcggcgatgcacacgctcagtcagagcgacacgccgatcggccaatagctcagagcgatgttgtccagaggcgtggcgcgtaatgtcgtcatcgtggccttggcgaacaaactggcgcgtatcgcgtgggcggtgttgcgcaaaggtctgccatacgagcggtcctatggcgtcgcggtaaattaggtaattggctgctctgatgcgcagcctacgatgtttgcgagtggaatggagatggcctgacagttgatcggcgttcagatagcccagcagtggaaatggttcttggaaaccgtgttgattatcgtggcgctgaacgtgcggatatccatcttggccacggtatgaccgtgagaccgaatacgttgaagcagactggtcaggtatcaaaaaatcacttgcaagcagggcgggccatacg

SEQ ID NO: 355 - DNA, 1357 bp, unidentified
  source 1..1357: mol_type = unassigned DNA; note = element_0041c38
  misc_feature 1..2: note = core
  misc_feature 3..86: note = LE
  misc_feature 87..1106: note = CDS
  misc_feature 1107..1357: note = RE
  misc_feature 1126..1343: note = bridgeRNA
gatggtgtggatagctcctgctccaatcggcgtcgcgatgcgccatactgcagttgttatctactgcttatgagaggagctacccaatgcaggttacaacagtcggcctcgatttggccaagaatatctttcaggtccacggcgtgagtgagaatggcgaagtcgctttcaaccaagctttgcgacgcgcgcagttgttcgcattctttgagaaactcccaccctgtctggtcggaatggaagcctgcggttccagccattattgggcacggcaactgagtaagttgggccatgatgtgcgcctgatccccgcgatgtatgtgaagccctatgtgaaacggggtaaatcggatgcggtcgacgccgctgccatctgcgaggcggtgacgcgtccaacaatgcggtttgtctcgatcaaatctgaagagcaacagggcgttctctttcttcaccgcgctcgcgatctgattgtccggcaacgaacccagctgagcaatatgctgcgtggcttgctgggcgagttcggtattgtgattgcgcaagggatcggcagtgcgattaagttcgcaaagaatgtgctggatggagacaaacccggtattcctgaagtcgccgttgatgtgctcaacaacctcagcaaccaacttgttgctctgcacctgcgtgtgcgctggtacgagatgcgtatgcagcttcaggccaaacaggacccgcgcgtgatgttgctgcgcacgatccccggcgttggtccagtgaccgcgtcagcaattgtcgcaacagcaggtgatgccagtcagttcaggaacggtcgcgaatttgccgcctggctggggctaacgccgctcaaccgatcaagtggtggcaaggagaaacttggacgtatcacaaagatgggggatcgatatatcagacgcctgctggtcaccgggatgacttctcggctgaggcagatgaaaacacatcccgaacgcgttgatccgtggtcccgagcgttgcttgaacgcaaaccaatccggcttgccactgtggcaatggcgaacaagacagcgcggatcatctgggccgttttgaccaagaacgaatactacagaccacatacggtctaaactgaggagaacagaccacacgagacagcaagaccattgaaatgatggagcacagtcagcccatcagccgagacaccccgtcgaatgtcagggacatcacttgtccgcagaccggtttgggacttggtttgcggaaaccatcagggccagcggccgcgtgcgccgcgcaaacaggccggacacacgtctgcttctggccagtgcaaaattaacttctaatatgtcttgctttgcagcagctatccacacag

SEQ ID NO: 356 - DNA, 1761 bp, unidentified
  source 1..1761: mol_type = unassigned DNA; note = element_0046f74
  misc_feature 1..3: note = core
  misc_feature 4..239: note = LE
  misc_feature 240..1454: note = CDS
  misc_feature 1455..1761: note = RE
cttatatgttactattttgccagaccctctcgacgaagggtcagcagggaacagccctgctcgatacgcactgccgaggaaaggcttcgttctccacacggctcgaccgataagaaaagatcgtccttcccttggcagccttcctgggctaatcgatgattggagggtcgttgcttcgagcacccattatagaaggacccgacacccccaggaaatgcgctagagaaggaaagatgaacatgtggtacgttggactggactgggccgacacccatcatgacgtggaggtgcaggatgagggggggaagtgcgtgggaacacgacgctttgcccacagccacaaaggtttgaacgagttgaaagcgtttctgctcggcattgcggcgtcgcccgagcaactggcctgcattgtcgaaacgaaccacggtttgctcatcagcttcctgctggaagcgggcatccccgtgtatccggtgaacccgaagagcgccaatcagttgcgtaaagcggcaggagcaaagaccgaccgcattgatgcgcatttgctggccaagctgggtcgctttgaccaggcggaactgcgccgactggagccggatagccccagcgtggctgagttgaaaacgctcacccgcgatcaggatgcgctgatccagacgcaaacgcgcctggtcaaccagttgacggcctgccttaaggagtactacccggcggctttgcacctgtttgccaaagtgcagcagcgttccaccttggtatttttgctggcctatcccacaccgcaagccgcgctggccgcgtcggtggaggagatcacagccaccttgcgcaggggcaaacacaccaaccccaggcacgcggctcccaagatcttcgaggaactgcaccgtccccagttggtggcaagcgaagtcatcgtgcgtgccaagtcgcgcttgatgctttcgttggtcaagcaactgctggtggtgatcgaggagattgccagctatgacaaggccatccgccccctttttttgagccatcctgatcaggagctgtggcgttcgctgcctgaggctggcaagcgcctggctccacgtctgttggccgagtggggcgatgatcgccgtcgccatgccgatggaacctccgtccagactctggccggcaccgcacccgtgccctatgaaagcggcaattacgccatagcgcataaacgcttcgcctgcttgaagccgctgcgtaacgccctgcaccagtttgcctggcaatcgacgcagcacgaagcttgggcacgggagtactaccagcgcaaacgcgcgcagggcaagacccatagtatggctgtccgcgccctggccaacgtctgggtgcgcatcatctatgccatgtgggtgaacaagaccagctatcagaccgccacttttgaagcggcacagcacgctcacgcaccccggcaacgcatcgcctgagtcgaagctgtatctttccttcacaccccgttgggtgcgctcagcgctgcgaagtccttcgccagtgcagaaagcctgtgctccaacgtctgccgcagcccgccaccgcgttcccgactcccggtgtgggttgaggaccggagaccacgccgagtcaaggccgcgcaggtggtggaaaggtcgggtgcgggcgcgctcgtcttggccttgaccggtgtggtagacttgcaccaccacacgggaggcagcttcacccactttcatcttgcttcctcctttccgcgtcttgactcttgacatagagggt

SEQ ID NO: 357 - DNA, 1641 bp, unidentified
  source 1..1641: mol_type = unassigned DNA; note = element_004eae7
  misc_feature 1..3: note = core
  misc_feature 4..125: note = LE
  misc_feature 126..1442: note = CDS
  misc_feature 1443..1641: note = RE
aaatccactaagcttaaaggcgtacatgatacccgacggggtccatgtacgcctctattactttatagtggtattgaagcagaagccgcgggttgccttttggctctgtgaagccgtagtagaaagtggctacttcatttgtcttagcaaattcgctcaaagtagattggtccgagagaccgcgttttgaaaacttgattactaagattttagtgagggtgcttcagaaaggtagtgtaacaatgcgaaaaattatcggtatagatgtttcaaagtcaacagctaaactgtcagtggccattgatgctaagactgtttacgagggagatatcacgctagatatgattggattcacgagtctcaaggctatcattgactcatacggcggtgcagaagtggtgttcgaggctactggtgtgtactcacgtcgattagagcgatacctactggacgaaagcattacatatcatattcttaatccactcgtcgctaagaaacggttagacgatggctcaagaacaaggaagaacgatgtacgtgatgcccgcgggctagcaataactgagtttgccaaacaccccaagccgttcaaaccacgcttctatgaccctgtatatcgcgaattgatggatattagtcgatactacgatcagcaaacagaggatttaaaacggaccaagaatcggatacatcgactcatacagctctcatttccaggaattgaggaagaacttgatttgagaaagccatcagctttacacacgctaactcttttttctcacccggcagaactgactggattaagtttcgagaatatcaagacgcagattctggatatgcacttaaagggggtgggagcggtcagatccagcaatttagcacgcgcactatggagatctcgagccaggtcatatccagctgttagcggcaactcgtttgttgtccaagctgtaaagcatgagactcaaaaggcgttaaagttgcttagcgaacgtgaagaaaccgtacaagccatgatcagcctagcagaaaaaacaccggagtacgttatcctcctgagcattccaaacatcgcggaaaacaccgctgtacgtttgattgcagaacttggggatattcgccggtttgaaaccagagcgaaactcaatagctttattggtcttgatttgcgagagatacaatcaggggactatacggcacaaaggaagatcaccaagcatggcgatgctcatactagaaagctactgtattggacggttataaatatggttagctcaggagcacagccgagtcatatccgtgacttttatgcaaaacgacaagcaacagcttcccggaggaagccgctgcttgtcgcctgcatggatcgcctactaaaaacgattcactaccttgtaaacacgaatcagttatactcatacgaactcgcttgttcaagataaactgactcaatacacttactgtacatacctgcacaaattttggaaagcctgcaggtttatttggggtgtcggactaaatgttttaaggttattttagatcagaatttaagattggattcagcatcctgtggctaagaaatttcgatattcaaaatcgaattcattgacatatcgggatttaaacttgacagggcgtaga

SEQ ID NO: 358 - DNA, 1334 bp, unidentified
  source 1..1334: mol_type = unassigned DNA; note = element_0053ab9
  misc_feature 1..2: note = core
  misc_feature 3..258: note = LE
  misc_feature 259..1320: note = CDS
  misc_feature 1321..1334: note = RE
ccgacttatatcgccggtagcggtgtcgtggtcgggatagctacccgtagcgtgccgcagcgggccgggtggtttgactcctgaggttcctgtcgctgaaagacttcggctgactctgcgggggtatgtcgcgccacccggcctgcgttcgcggcgtgactgaagagatgcatgaccacaggcacaggcaaggtacttgaagtcggattgtccgccgcggatcccaacccgtaactgtgagaagggaatccgtgcttcatgatggtcatcggtgtcgatccgcacaagggcacccataccgccaccgcagtggaccctgccaccaacgccgacctcggttcgatccgtgtcgaggccacgttggccggatacaagaagctgatcgcgtgggccaagccgtggccgcagcggcggtgggcggtagagaacgctgacggactcgggcggcacctcactcgatggttgatcgcgcgtggcgagacggtcgtggacgtgccgactacggcgaccgcgcgagtgcgagagctctcccgtggtggccgccgcaagaacgatcgcatcgatgccgctggtgcggcgtgtgtcgcagcactgcagggcgattgccgtccggtcgttcccgacgaacactccgatgccctgcggatgctcgatgagagacgaaacaacctggccgccaaccggactcgtgcggtaaaccagttgcatgcgctgcttcgggaactacttgccggtggcgctccgaccagcctgaccgccaacaccgccgccgctgtgttgcgcgggttccgggcacggacgctgtccgatcgcgtccgtgtcggcctgtgcaaggacctgatcgccgacgtgcgccggctcgaccaactgttggccaccaaccagaaagacctcgatggactgctcgacgagcacggcacccggttgcggaccattgatggcatcggcccggtactggcagcgcggctgatcggccgcaccggccttgcgacacggttctcgacagcggccgcgtatgccacctacaacggcaccgcgccggtcgagatctccagcgcggaccaccgagtgcatcgactgagccgctacggtgaccggcagctcaacgccgcgattcacaccatcgcgatggtccaggtccgcatgcccggcagcgccggtcgcgcctactacgaccgccgcatcgccgccggagcctccgcacgctcggcgatgcgctgcctgaaacgacacctgtccaacgtcatctggcgcatcatgaccgccgacgacacccgccgccttagacaacaatccatcgagtcctgttccgcaacttgacaaatagagaggca

SEQ ID NO: 359 - DNA, 1400 bp, unidentified
  source 1..1400: mol_type = unassigned DNA; note = element_006c6c6
  misc_feature 1: note = core
  misc_feature 2..223: note = LE
  misc_feature 224..1387: note = CDS
  misc_feature 1388..1400: note = RE
  misc_feature 13..238: note = bridgeRNA
ctacttatctactggtgttacgaccgcagcccggccaggctaggtcgaggtgaccggcgggatagctctctcatcggctgcccgccgtaggttggtgtggctctcttttggcatgcgccccgccggtcaccgtggcgcggagaggctccagaggggtttgcccagctcaaagtagcgatgccctcctcgccgacatcagctcagtctgatcgaggagggcaccgtgcggcgtgtgatcatcgggatggatccacacaaacgctcggccaccatcgaggtcatcgacgaccgcgagaaggtactggcccagggccggttcggcaccgacaccgtcggctaccaggcgatgctcaaggtcggccgaacgtatccggatcgcacctgggcggtggaaggctgcaacggcatcggccgccacatcgcccagcgcctggtcgccgacggcgaaaccgtactcgacgtgccggcgaaactgtccgctcgggcccgggtgttcgccaccggccagggccgcaaaaccgaccccgtcgacgcccactcagtggccgtggtcgccttacgcaccaacggtttgcggcaggtcgccgtcgatgacaccaccgtggcgctgcgactattggtcgaccgccgcgacggcctcggccgggcccgcaccgagaccatcagccggctgcaccacctgctgctggagttggtgccgggcggggcaaagaagtacctgtccgcaccccaagcccgcgcactactcaacacggtccgcccccgcgacatcgtcggccgcacccgccgccaactggcctccgagctcatcaccgaactcgccgtcatcgacaagaagatcaaagcggccaacgcgcagctgaccgaactcgtcaccaccaccggcagcagcctgcaagaactcaacggcatcggcccgtccggtgccgcccggctactcggcgacatcggtgacatcacccgcttcgccagccgcggccacttcgcctcctggaacggcaccgcaccgctggacgcctcctccggcgaccaggaacgccaccggctctcgcgcgccggcaaccggcgcatcaaccgcgtcctgcacatcatggccatcgtccaactgcgcaacgacaccgaaggccgcgcctactaccggcgcaaactcgccgccggcaaaacccccatggaagccatacgcgccctcaaacgccgactgtccgacctggtctacaagcagatgatcagagatgccaacgcggcgaggacgggcccgggaggacaagcgggagcggctcttcaatccagcgcggctgacccaattcccaaggtcagctcttcggaacagtcacttcccggacccgccgacacccaccctagaacactcctcctcgccgcctcttgacacagaggggagc

SEQ ID NO: 360 - DNA, 1492 bp, unidentified
  source 1..1492: mol_type = unassigned DNA; note = element_00743d6
  misc_feature 1..2: note = core
  misc_feature 3..245: note = LE
  misc_feature 246..1472: note = CDS
  misc_feature 1473..1492: note = RE
  misc_feature 6..230: note = bridgeRNA
ctaatgggagctaccgggtcagccagtaaggcagactcggtgcctgcagccccgataggtgagcacttccacagcctgaaccgtcgagttctggtgtcagatcgtgcccctgtcggcggccgggagcggacaacttttgggatgtcgtgcccgccaacatgattggtgtgagcactggtccattagggcgctgggtctcccgcgggctgcgaataaccggacacggcaaatttcaggagcgttgagtgctgttcgtcggagacgattgggcggaggaccaccacgatgtggaggtccaagacgagcaaggccgcacgttgaaggcggccagagtgcctgagggcatcgagggcatggcgcgtttacatgagctgatcgcccggttcctgccagaggattctgatcccggccaggtgctggtgtgcatcgagaccgatcgcggcccgtgggtgcgagcgttggtcgcggccggctaccaggtttacggggtgaacccgaaacaggcagcgcgacaccgggaactgctgtcgctgtcgggcgccaaggacgacaaggcagatgcccgcaccttggccgacatgctgcgaacccgccgccaccagctgcgtcaggttgctgccgactccgaggaggccgaggcggtcaaggtcgcagcccgcgcccatcagacgatgatctgggaacgcacccggcacatgttgcggctacgcaccgcactgcgtgagtacttcccggccgcgctcgaggcgttcaagccgctcgggctctcgggcgctgacaccctcgagctgttgaccaaggcagccgatccgggcgccgcggcccggctgacgattggccagatcaccgccgcgctcaagcgggcaagacgtcgcgacgtgcccgcgaaggccgccgcgatccaggcggcgctacgtgccgagcagctgggccaggccgatatcgtggctggcgcctatgccgtgtcggtccgcacgacggtcgcggtcctgcgcacgctcaacgagcagatcaagatcctcgagggtgaggtcgatgtgtgttttggccggcacccggacgctgagatctacctcagccaacccggtatgggcgtgatcaccggcgcccgggtgctcgcagaattcggcgacgccgagaaccgttatgccgacgccaaatcccgcaagaactacgctggcaccgccccgatcacccgccagtccggcaagaccaagactgtccacgcccgattcgtccacaacgatcgcctcgtcgacgccctgcacatgcaagcccacgccgcgatgctgcacgacgccgcggcacgcgcctactacgacgaactacgagcccgcgagatcggccacaacgccgcgctacgacagctcggcaaccggctcgtcggaatcctgcacggctgcctcaaaacccaatccccttacagccaaaccgccggctgggcacaccgctatcaacacctcgccgcttgacatccaagctcctgggatgt

SEQ ID NO: 361 - DNA, 1422 bp, unidentified
  source 1..1422: mol_type = unassigned DNA; note = element_0074fd6
  misc_feature 1..2: note = core
  misc_feature 3..75: note = LE
  misc_feature 76..1107: note = CDS
  misc_feature 1108..1422: note = RE
  misc_feature 1197..1416: note = bridgeRNA
taatgagatggtccgccgccccgatcagccgacgtaggatgatcggagcagcagtacagattggaggatcatctcatgcttatcgcttcagtcggtattgacctcggcaagactacttttcatcttgtggcgctggatgatcacggcaacgtcgttattcgcaaaaagttctcacgtaatcaactcctgacctacaccgcaaacttgcaaacatcattgatcggcatggaagcttgcgcaggagcgcacttcctcgcagccgcgttacgtgatcaaggacatgatgttcggctgatcccggctcagttcgtgaagccattcgtaaaatccaacaagaacgatttcatcgatgccgaagccattgcggaagcggtgacacgccagaacatgcgcttcgtaccgatcaagagcgacgagcaactcgatctgcaagccatgcaccgcattcgcgagcggttggtgcagcggcgcacggcactcatcaaccagattcgcggcttcctgcaggagcgcgggatcaccttccccaaagggccagcacatctgcgcaaaaacatggcagccatcgtcgaagacgccgacgctaacctgacgcgacgaatgcgcacgctgctcgaccggctctgggtagagtggaggcagctcgattacgacatcgaggtggctggcgaagacattgagcgcatcgccagcgaagacgatgcctgcaaacgactgcgccagatcccaggcgtcggaccactggtttcgacggcgaccgtagctgcgatcggcaacggagccgcgttccgcaagggacgcgagttcgcagcctttctcggtcttgtaccgcgacagcactcgactgggggcaagacgacgctgcgcggaatcagcaagcgtggcaaccgctatctccgcatgctgttcattcacggtgcacgagcggtcctgctcagagcgaagtgcgataacggcagctttggtcagtgggtacgccagctggagttgcgagcgccgcgcaacaaagtgatcgtggcagttgccaacaagctggctcgtgtcgcctgggccgtgctgttcaacggtgcgccgtatcggtatgaatccgtgtgcgcgcaaccataaacccggccgtggaaaacacgctgacgcttggaaatcgctagcgcgattcccagtttcccaccgccgcggcggcgggcattaagaactcaccaagtctgctaaggagagaaacaggacgaaagaacagtcaaacggcgtgctggaaaaccttgggatacttgagtgtcgtaaaagaccgctcgcctaatcaggatcagcacgcgcgaatcatcatcgtgagcccggagaacaatctccatcagaggccggatacatagacgcagactgaactttctccaaacgatctccccttgcagtcaggcggcggaccataca

SEQ ID NO: 362 - DNA, 1360 bp, unidentified
  source 1..1360: mol_type = unassigned DNA; note = element_0078451
  misc_feature 1..2: note = core
  misc_feature 3..1103: note = CDS
  misc_feature 1104..1360: note = RE
  misc_feature 1076..1348: note = bridgeRNA
tgatggggtggacgcccccgacggcatcgttgtgccagcatgggtgtttcaactcattcacaggaggcgtccgtgtccgaggttaccacgatcggcctggatatcgcgaagaccgtgttccacgctcatggcgccgacgagcgcggccggggggggtctcgaagcgcctgacgcgggcgaagctgcttgccttctttgccgcgcagccgcgctgcaccgtggcattggaagcgtgcggcggagcccatcattgggcccgcgagctgacggcgctgggccatgaggttcggctgatcccgccagcctacgtgaagccgttcgtgaagcggcacaagaacgatgcggtggatgccgaggcgatctgcgaggcggcccagcgtccgaccatgcgctttgtggctgtgaagagtgaggagcagcaggcgtcggcgctcgtgttccgaacccgcgatcttctggttcgccagcgcacccagctcatcaatgccatccggggacacctgaccgagtacggctgggtcgccccaaaggggcctgcctacgtctcgatgctcggcgatcttctcgaggacgagatgggagcctcgttgcctccagcggcgttctcgatgttccgtgtcatgctcgacctcctggccgatgtcgacgagcgcatcgccgctctcgacaaggagatcgcccagcgcgccggcgaggaggagacggcgcgaaggctgatgaccatccccgggatcgggccgatcaccgcgactgcgctaatagctctggcgcccgcagccgagacgttcgccaaggggcgggactttgccgcctgggtcggactgacgccgacgcagcactccacaggcggcaagcagaagctcggcgccacctccaagatgggcgagcgaacgctgcggcgccttctgatcatcggagccagcgccgtgatcctccaagccacgcggcgcggaacagcgaagggatcgtggctggagcagatgctggtgcgcaagccgcgcatgttggtgacggtggcactcgccaacaagatggcgcggatcgtttgggctcttcttgtgaagggcggaacttaccgagctccgacggcggtcgcggcgtaagccgaggtcgtcgtcagaggccgtcgggacgcgaggtcggtcgaaggagggtatggcgcaacagtcggcgagacggggccggaagaaccagtgctttccaccgtgccgtcgagcacgatctgggtgttttggttccggtccgcgaactcccatacgggcccgcagccgcgtgctgcatcagaggccggacagatagcagcatccgacatcatgccaacccgacagaaaccgcttgcgtccaagggggcgtccacaga

SEQ ID NO: 363 - DNA, 1372 bp, unidentified
  source 1..1372: mol_type = unassigned DNA; note = element_007871a
  misc_feature 1..2: note = core
  misc_feature 3..79: note = LE
  misc_feature 80..1108: note = CDS
  misc_feature 1109..1372: note = RE
  misc_feature 1082..1359: note = bridgeRNA
cgatggggtggacgccccccggcggcatcgaatgtgccaaagtagtgggtgttgaaacacttctacgaggagagcgtccatgaacgaggctagcatcatcggcctggatctggccaagaacatatttcaggcgcatggcgccgcgggagatggttctgttttattccggcgcaagctgtcgcgtgcgcagctgcttgatttcctgagcaagcaaccgccttgcattgtggcgatggaggcctgcgccagcgctcatcactggggccgtgcaataggcagcctcggtcacgaagttcggttgatcccaccagcctacgtgaagccgttcgtgaagcgccaaaagaatgacatggccgatgcggaggcaatcgcagaagcggcatcgcgtccgaccatgcggttcgtagccgtgaagagcgaggaacagcaagcagcaatgatggcgtatcgtacccgcgatcttctggttcggcaacgcacacagacgatcaacgcccttcgagcccatttagccgagcaaggcatcgtcgcgcccgtaggtcccgctcatgtcggccgcctcgctgcggtcatcaatggcgacgacggcgctttgcctgcggtggtacgagatctggcgcagctgctcttggaccagatcgctggcttgagtgagaaggtggcgaacttggatgctgaactgcgcagacgtgcaagcaccgacgacactgcgcggcggttgacgacgattccaggcatcggtccaatcaccgcggcggcgatcactacattcgcaccacccatggaaaccttcaaaaaagggcgcgacttcgcggcgtgggttggccttacgccaagacaacattcaagcggtggaaaggaacggcttggccgaacctcgaagatgggccagcgtgacatccgaaggttgctgatcgttggcgctgttgcagtggtcagatgggcagcacgtaagggcgccccagaaggctcgtggcttgcgagaatgcttgagcgcaagccaaagatgctggttgcggtagcgctggccaaccgaatggcacgcacggcctgggcgctcatgcgcaaagctgaagattacagagatccggcgatggcgaccgcataggtcaaactcgccggggtgtcgccgcgaatgtgagcaggacggaggaacgtaagggcaaacgatcaagagattggatcgggaaaaccatcattgcggacgatgcgctatcaagcgcgggtaagcgaactggacccgatctgcatatctccatacaggcccgcggcgtataaaggccgtaacttcgaggccggacacacgactgcacctgatcacatgccctatcgtgccaaaaaaagtacttgcattcatgggggcgtccacaca

SEQ ID NO: 364 - DNA, 1436 bp, unidentified
  source 1..1436: mol_type = unassigned DNA; note = element_0079ae6
  misc_feature 1: note = core
  misc_feature 2..234: note = LE
  misc_feature 235..1260: note = CDS
  misc_feature 1261..1436: note = RE
  misc_feature 12..246: note = bridgeRNA
ctgatggaggatcgaggtcgacgctgagctcgtgctcgtagcgtcgttggacctcgggtcggctggctctagaagtgcctgctgctcggcttgttcgggttggcttttgaacgaagcgcccgccggctcggggtccatgtcacggcgtggctcgaaagaggcgagcagcacgaacccacatcaggagtgcccgtcgtgacgcaacaccctggcgtccacgaaaaggagcatgtcatgacgatcatcatcgggatcgatccgcacaaggccacccacaccgcggtggccatcgacgaacacgaggatccgttggcggaggtcacgctggcagcggatcgctgccagacgtcacggttgttggcgtgggccgcgcccttcgacgatcgggcgtgggcagtcgagtccgctgacgggctcggcaagttgttgtcccagcagctcgtcgccgaaggcgaacacgtcatcgacgtccctgcgacgctcgctgcgaaagtccggctgctgggctcgtcgaaggcatcgaagaacgacccgaacgacgcatactcgaccgccgtcgccggactgcgccactgcgggctccgacgagtcgtcgcagacgatcaccgccaggcgatccgcatgctgatccgccgctacgacgacatcactgctcgccgcacccaggctgtgtgtcgcctgcacgcggtgctggtcgagctcatcgctggcgggatgcccaggaaactcaaggccgacaaggcctccgcggtgttgcggcgcattcggacggacaacccgatcgacatcgcccgcaagcacgtcgccgcggatctgatcgttgacatgcgccgctgcgaccgcgaactcgaacagctccgggcgaggatcgccgaggcggtgaacgcatcaggttccacgattctcgaggtctacggggtcggcccggtcgtcgccgcgttcatcctcggctacgtcggtgacccggcacggttcgcgaccaaggagaagttcgcgtcctacaacggcaccgccccgatcgaagcttcgagcggaccgagcaagcgccaccggttgaacccgcgagggaaccgaaagctgaaccacgccatgcacctgatcgcgctcgcccagatcagccacgccggcacccccggccgcgtctactacgaccgcaagctcgccgagggcaagacgaagaaggaagcgatccgggcgctcaagcggcgcgtgtccgacgccgtgtggcgccagctccaggtcgacctcggccgccgatgagaaggtgacccgggtgggcactcaggaacgtctctgaatccagcgtgaccggctctgcatcctgaagcggccggctcttcggagaagccacacccgggccaccaacaaccgtacgcccctcgacccagggtctgcttcgacgcgcccgaaacttgggccttgacagaaagaggctt

SEQ ID NO: 365 - DNA, 1576 bp, unidentified
  source 1..1576: mol_type = unassigned DNA; note = element_007b3fc
  misc_feature 1: note = core
  misc_feature 2..244: note = LE
  misc_feature 245..1468: note = CDS
  misc_feature 1469..1576: note = RE
  misc_feature 6..223: note = bridgeRNA
tcgtattatgagatcaaccaattctttctggttgatcctttttgtattaacttcgaggattagggtagccgggtcgaacgtacctgcccgtgggaccagatcccgagcgctataatgttcacccctacttgtcatgaccatgattgaggctggttgggacatcgatcccgtatcacatgcgatgctgtggagcgacaaggagttcattggggctaccggttaattgatttcgaggagagataaaatgaaccctgttatcgggctagacatatctaaagaagaaagccacggacaagctttcttagatcgaggaaaaacataccgagggattttctatttccaacacacacgggatgggcttgagatattgcttcaagttattcaggacatcgaacgtgaatcaggtcatcggcctacaatcattctggaagcaaccgggcactatcaaagccctgtcgttcaatttctagaggaacatcactatgtatttatcgtaatcaatccgctcatttccaatcggtttcgaaaaacgaatctccgtaaagtgaaaacgaatgctgctgacgcatatcttctgggcgagctgtactatagagaggaattcgaaccattcaaaaaaagaggtgtgcaacttcttaatatacgttacctgacgcgacaacacgagtccttctctaagatgtgtgtgcagacgaagttgcaattccaagctgttctggatcaggtcttcccagcgtataaaggtgtttttggggctatgtattctaacgtatctcttcgcttcttgcatgagtttccgacctcatcctacgttttaaaagtcagtgaagagacacttaaaatgacaatcaacgcactgctatcttcaaaacgtgggcgatcagagaggtggattaatgaacgggttcaacggttgatggtggctgcaaaacaaaacccatttcagcaaactatgtatgagagccacgtcatcaatcttaagatcttaattagcctgattcttcagtaccaggagcatcttgctatgttggaacaaaccatcgatgccctggctactgagattgaagagtatgatttaatccagtcgattcccggtattggccctaaaattgctgcaacaattttatcggaaattggtgaagtcgatagatttgatcatcctaagaaactagttgcctttgcaggcatagatcccagtgtttttgcttcaggtaaatttacagcaacccggaatcgaattaccaaacgtggttccaggcagcttaggtacgcactagttatggcggtacagtgtggcctaatccgatctcgcaacactcgaattaaagagttttacgaacgcaagagagctgaaggcaaacctcacaaagtggcattggtagcatgtgcgaacaagctagttcattggttgtatgccattttgaaaagtaagaaacgttccgttcggtataacaaaataatggtataactctccaattaagctcggattggaaggttatttggtatgcttattaataaatataacacaggctctcgagttgttttgctggaaatgttgacaagctattagctggta

SEQ ID NO: 366 - DNA, 1436 bp, unidentified
  source 1..1436: mol_type = unassigned DNA; note = element_007da4e
  misc_feature 1..2: note = core
  misc_feature 3..227: note = LE
  misc_feature 228..1421: note = CDS
  misc_feature 1422..1436: note = RE
  misc_feature 10..220: note = bridgeRNA
tccctaccttgttgatcgggatgagcgagccactcgtagggttggctcacccagggtgtcgggtgtggctttcagaggtctgccgcccgtggcttccatcgatgcgccgcccgacacccccgacgactcggctgctgattaggaattgcgactccgatcgctgtgtagggactcgacagcgaggtcgtctgtggtgcacgtaggcaaacgacccgtggagagcgcacgtgagagcgatctgggccggtatcgacgccggcaaggcccaccaccactgcgtggtgatcgacgacaccggtaagcggctgctgtcgcggcgtgtggccaacgacgagctggaactccttcagctcctcgccgacgtcctggccctgggcgaccaggtcacctggggcatcgacctggccgacggtggtgccgccctcgtgatcgagctgctgctcaaccacggccagcacgcgctctacattccgggcatggccgtcaaccgcgcctccgagggttaccgcggcgacggcaagaccgacgccaaggacgcggcgatcatcgccgaccaggcccgcatccgccgggacccgcaacctctgcgacccggcgacgaactgatcaccgagctcaaagtcctcaccggccaccgccgcgacctcgtggacgaccgcacccggacggtcaaccggctgcgcggacacctcaccggtatcttccccgctctggaacgagccctggacctgaccaacgccggcccgctggtcctcctcgccggctaccaaaccccggccgccctacgtcgcaccggtgcccggcgcctggagacctggttgcgcaaccgcaaggtccgcggggccgcacagctggccgcggacgccctggccgcagccgggagccagcacaccagcgtgaccggcgagaagcccacggcccaactcgcgcaaaccctggcgagggatgtgacgcgcctcaaccagcaggtcgccgacatcgacaaggtcatcgaggcccggtttcgcgagcacgcgcacgccgaagtagtcgcgagcatgcccggcggcatcgggcccctgctcggcgccgagttcctcgccgccaccggcggcgacctgtccgcattcgccaccccggaccgccttgccggattcgccggagtcgccccggctccccgcgactcgggcaagatcagcggcaacctccatcgccccaagcgatacagccgaggtcttcaacgcgtcttctacacctccgcgttgatcagcatccggtgctgcgaggagtcccgccgcttctacgaccgcaagcgcgccgagggcaagcggcacactcaggcagtcctcgcccttgcccgacgccgcgtcaatgttctgtgggccctcctgcgtgacggacggtgctatgagccgctaccgcccgtcaccgcggccgcttgacaacaacattagaaa

SEQ ID NO: 367 - DNA, 1718 bp, unidentified
  source 1..1718: mol_type = unassigned DNA; note = element_00809fb
  misc_feature 1..2: note = core
  misc_feature 3..349: note = LE
  misc_feature 350..1576: note = CDS
  misc_feature 1577..1718: note = RE
  misc_feature 45..322: note = bridgeRNA
ctcgtataatatatttaagataccaaaccgtatcctatttgacttaaaaatttaatcggcttagttaagcccatgatataattgtcttagtgtcaatcaggtaatagttctgtttcctcctgttgaacctataacggttacttcatagtaagtctgttcccctgacatggaagttagcttcaaaccgctggctgtttgcttaagttcatggacaaccatttagcagtgtggtttcgcatctgtccatcttaagccggattcttatatgcgagggtgtcgatgctccatgatcatgggttttaccaagctgattgaacacttgaatctacaacgaaaggaggtgataactatgaacacactttacgtcggtattaatgtaagcagcaaatccaatgttgtttacctgatgcttcctaatggtgacaggcacagtaacttttctgttgctaactcgcatgaaggttctatccggttggtaaaaagaatccattccgctttaacttcacattcccttgacacggttctgattggtcttgaatcaacctctgtttatggagacaatctcgtgtacttcttaagggaagatgccactctgacaccgtttaacagaaagattcatgtcctcaatcccaagcaggtcaaaaaatttcatgatatttacaacgacctgccaaagaatgattatgtggactcttttgttattgctgactgcctgcgtttcggtagaatcaacaaagaggtatatctgggagactatcgctacaaagctctccagaacctcacaagagcacgtttcttcgctgtccagaatcttactaaagaaaagcaaagattcataaatgtgctgttcaagaagtattctacgataacacaggagaaggtattcagtaataccttcagcactactgctcttgctgtctacgatgaatttgaatcagtagaagcactggcaaatatggacttacatgagcttactgagttcatcattgaaaaaggaaagaaccgctttcccgatcctgatgcagtagccaaagccattcagaaagctgccagaagttcataccgtttaccaaagacggtaaatgactccgttaatcaggtgctttctatatccataacctccatgaaggcattggaatctcaaatcaaagagttcgataaagctataaaaagtcagatggaactcttaccaaatgtattgatttctaccccgggaatcggtcctgtattatcagccggaatagtagctgaaataggtgatataaatcgttttgaaaaccaagcaggacttgctaaatatgcaggcttcgcttggcgacaacaccaatccggtaattttgaagctgaaaatgcaaggctcattcactcaggtaaccgatttttaaaatactatctgtgtgaagcagctttttctcttgtaagatgcgacaaagagtattctgacttctaccacctcaaatacaaagaggtgaacagatatcaacacaaacgcgcactcgcattaactgctcgtaaatttgtgcgattagtctttcgactgctgaaagacaatcgtctttatacctcagcacgatagttttactatctgctgaatcaagccgccctgctcttttaaaaacaaggtcgacagggcttaggtggatgttttttgtctttgtgaaatatatcaaaaataaaaagatcttttatttaaattcacttgacatcacaccgctgga

SEQ ID NO: 368 - DNA, 1394 bp, unidentified
  source 1..1394: mol_type = unassigned DNA; note = element_0080dc3
  misc_feature 1..2: note = core
  misc_feature 3..91: note = LE
  misc_feature 92..1120: note = CDS
  misc_feature 1121..1394: note = RE
  misc_feature 1091..1381: note = bridgeRNA
agatggaatggttgccgccctcccccctgacggcatcgcgatgtgccatatgtggtgatgttgaacgccacacaacgaggaggaaagcgagatgggtgatcttatgatcggggtggatctggcgaagagtgttttccagatacacggtgcctcgctgacggggcacgtgaagttccgcaagaaaatcacgcggacacaatttcggaaattcatgtctgagcagcccgcatgccttgtcgtattcgaggcctgcggcagtgcaaactactggacgcgcgagatggcgttgctcggccacgaggtgaagctgattgcgccgcaatacgttcgccccttcgtgaagcgccagaaaaacgacatggccgatgccgaggcgatcgtgatcgcagcgcgccagcccgagatgcgcttcgtgaccccgaaaacagaggaacagcaggtcagggccatgctgtttcgaggtcgcgaacgccttgtccgtcagcggaccgacctggtgaatgcgttgcggtcagtgctctatgaatatggccatgtgtttccagtcggccttgtccacctgaagcggatcgccaccctgctggaagatcctggctgcggtcttcccgggcaggtggtcacggaatgcgaggatctgctgaaacagattgccgagatgacggaaagtatcaccgggaggactgcagcactgaaggcgctggccgcgcagacggagacggcgcgccgcctccagaccatgcccggggccggtcccatgacggcgctggcggtcgaggccttcgcgcctgacatggcggagttcaaatgcggacgggacttcgcggcctggctggggctcgtcccttgtcagcactcctcgggtgggaaggcgcgccttgggcgaatttcaaaagctggccaatccgatatccggcggctcctgatcatcggggcaatgtcccggatcgtggggcgtgcgggtaggaaagtgccggccgaaagctggctcggaaggatgctcgcgcgcgagccgaagatgctggtggggattgcgctggccaacaagatggcgcgacagatctgggcgatgttgacgaaagaagaggattacagggatccggggttggcagttgcggcatgatcatcatggggtgaacagccagctccggtgcgaaggggagtgtaagaaagcaacgacctgaatgggcgcaatgatcgaacagatccggaccgggaaaaccatattcgtacttggagcagcaagctcgtactgaagatttggacctgatccgctgatctccatgccggcccgcggcttttgaaaagcgccgcacatcggggcctgaaagaagaacgcattcgatcactcaccggcaaggtttgaaacttcttgcatcatgggcggcaaccaaaga

SEQ ID NO: 369 - DNA, 1448 bp, unidentified
  source 1..1448: mol_type = unassigned DNA; note = element_0085a3d
  misc_feature 1..2: note = core
  misc_feature 3..224: note = LE
  misc_feature 225..1433: note = CDS
  misc_feature 1434..1448: note = RE
  misc_feature 9..219: note = bridgeRNA
gccctacctttcagaggtgcatctggtcgtccggaacgattggtatgtgcaggcgggaccggtatggctttcatgcgtgctgtccttgatggctcaggtggcttggccgccggtcccgccaccttgttctgactgctgattaggcactgcggaccatcgctatgtagggcgttgacagcggagcggggttgcactgcacatgtcaacgatcgagcggaggtcagatgggtgtcacgattggtttggatatcgcgaaggagttccactgggcggtagcggtctcgaccgacaccggcgatgttcttgtgtcccaacgggtgaataacgatccggacagcatcgccgggttggtcacggccgtgcggggccttatgcgtgaacacggcgaagtgatggttgggatcgacatcatgggcgggatcgctagcttgctgaccgcgatgctgctggacgcgcagctgcccctggtgcacgtccccggcctggtcgtcaaccgagcccgacacgccactcgcggtggcgagcataagtctgatccgcgcgacgccaaggtcattgccgatcagctgcggatgcgccaggactggcgcgtggtcaccgacgaagaccctgtggtggccgatatacggatgctcatcagccgccgtcgcgaattggtcaccgaacaaacccgcaggctcaacaggctgcgcgagctgctgaccactttctttcccggcgcagagaaagtcgtcgatgtcaccaatctcggtgacctgcatctgctgtcccgttacgtcaccccggcacaattgcgacgggctggcacgcagcgcctcacccaatacctgcgcggcctcggcgtcaaaaccacttacgccgaccggctcgtaaccaatgtcctgaccgctgcccgcgcccagcgcatcgaagtcaccggccaatcccggctggccgagttcgcacgagaattcgccatcgaagccatcggcgtgcgccgacgcatcagcaagatcgatgccgagatcgccaaggccctcgacagccaccctgacacgactctcatccgtagcctgcccggaatgggagccactctcactgccgaattcatcgcagcggcaggcgacttggatcgattccccagccccaacgcactggcatcggcagccggactggcacccgtgctccaacaatccggaaagatgcactacctgcgcagggccaatgccggcagcaagagactcaaattcatcttcacccaatcggcgttcgtagcgatccaacgagaccccgcaagcagagccttctacgaccgaaaacgtgctgaaggtaaacgccgagaccaagccctcatcgcgctggcccgacgccgcgtcaacgtcctcacagccatactgcgcacacgccagccctatcaacccggataccccaaccaggccacccacgccgcttgacaaaaacattaggca

SEQ ID NO: 370 - DNA, 1616 bp, unidentified
  source 1..1616: mol_type = unassigned DNA; note = element_00860ff
  misc_feature 1..2: note = core
  misc_feature 3..289: note = LE
  misc_feature 290..1507: note = CDS
  misc_feature 1508..1616: note = RE
  misc_feature 19..312: note = bridgeRNA
ctcctactataggttttgtgatggtacagaccgcctgacatccagccaggaatctgttcctctcgttgcttaaactgctagaatgttgggcatggtttatgacgtaatcctccttggaacctgttcacttgaaacagtgtccgtatgaaagccagtcagccagccgtactcattcgcagttgttcgatttacgtaggttgaacctcagcgttcgtgtgataccccaggagattgaatcagcaatgagaaaactggaaccattgcaaatcttattctggaggtgtttagtatgataaacgcagtaggtatcgatgtctcaaaaggccggagtaccattgccgtcctacgtcccggcggtgttaccattcgaagaccttttgatgtctcccattcgtctgcagatctcagcagtcttgtccagtacataggatcactggaaggtgataccagggctgtcatggagagcacagggcggtatcacgaaccggtacttcacgctttgtcggatgcagggattttcgttagtgcggtcaacccacacctgatccgaaattacggcaacaattctctccgtaaggtgaaaaccgaccccgccgatgccatgaagattgcccgatataccattgacaactggtcagaactccgtgagtatactggcatggacaatattcgctctcaactgaaaatcctgaatacacagacagcatttctcatgaagcagaaaacagctgtcaaaaacaatctcattgctctccttgatcaaacttatccgggagtagacaaactctttaccagtcccgtccgcacggacggaagcgagaaatgggtggattacgtctactctttctggcacgttgactgtgtccgcaaaattggcatcaaagccttttcagaacgctatgcagccttctgcaaacgccatggatataatttccaaaaaggtaagccccaggagttgtttgatgcctctaaggagcttatcgctaccctgcccaaagacctgatctgtaagaagatgattcagaacagcattgagcagctcaagctactttccaggcatatcgttgagcttcgtttcgaaatggaccgtcttgcttcaacactccccgaatactccacggttatggaaatgtatggtgtaggtccggtttacggccctcagctcattgccgaaattggtgatgtgtcccgctttccacgcagggaatcactgactgcctttgccggcgtggatccggggaaaaatgattccggccaacgcatcagcaagagcgtacatgcctcaaaatgcggttcctcgcggttaagaaagactttgttccagatcatgtcgaccattctccaattaggcgataatgatgatcctgtctatcgctttcttgataaaaaacggtcggagggaaaagattatcttgtttacatgaccgccggagccaataagtttcttcgcatctactatggcaaagtaaaggaatgcctgagacaacaaacaaacgctactgaataacccgacaaatgtcttttctcattcggccgcccgagtgacggtctttttgtgctaccttcctttccgcctacaaatctttcaaaataaggcttgattttttattagtagg

SEQ ID NO: 371 - DNA, 1434 bp, unidentified
  source 1..1434: mol_type = unassigned DNA; note = element_009a237
  misc_feature 1..2: note = core
  misc_feature 3..72: note = LE
  misc_feature 73..1110: note = CDS
  misc_feature 1111..1434: note = RE
  misc_feature 1210..1428: note = bridgeRNA
taatggcatggtccggcgcttttacccggtaagaaggctgggattataagaagcatacagagaaggagtgccatggaaatatttacgctcggtatcgatttggcgaagactacattccatctggtggggatgaaccaacggggagaggtagtggtgtggaagcgcatgtcccgcacccagctgttgcacttcacggcgaacctaaaagtggaactgattggcatggaagcctgtggtggatcgcatttcctgggtcgtgcgttgcgcgagcagggtcacgaagtgcgaatcatcccggcgcagtatgtgaagccttacgtgaagacgaacaagaacgattacatcgacgcggaagcgatcgccgaagccgtcgggcggccaaccatgcgttttgtgctcgtcaagagcgaagagcagctggatctgcagtccgtgcatcgagtgcgcgagcgctgggtgatgcgccggaccgccgtcgtgaaccagattcgcggactcctgctggaacgcggcatcacgctacgtaagggtcggcgctatgtggacgcagcgctgcccgggattcttgccgatgccacatcgaagctatcgggctcactgcttgtactgctaacagagctgaagctggaactggcgcaactggcggagaagatcgatcggtctgatactgccatcgcgcagattgctgggcagaacgaagcctgtcagcggctggttgccatgccgggaatcggtcccgtgacagcaaccgcgatcatcgcgacgattggcaatggggctgcatttcgtaaggggcgcgactttgctgcgtggctgggcgtggttccggaagagcactcaaccggaggcaagcagacgctctgggagcttcctcggcgcgggaacaagtatttgcgcaggctattcgtgcaaggggccagagctctaatgcagcacaaggcgaaacagtcatccgggctaactgcatggctgacacagctgacggcgcgaactcatcacaacatcgccatcgtcgtactggctaataagctggcacgtatggcgtgggcggtgctcgcgaagaacgaagtttaccggccgccactgatcgaagtgaccgctgcaacttaactggcctgcagatgacgcctgtaaagccaggcttggaaatcgctcacgcgattcccacatccgcagcccatcgacgactatggagtttaacttttcctgccaggtctgctggcgaagaatgagatggcaccacggtctaaccgtcgctctgaaaacctgcttcaggtaaaggtctttgaagaccgcgaacttaattaggaacagagcgaagcgcattccatcctggcccggagcagtcacgcactccaacaaggccgtatacatacgcgcagaccctacttgctcatttcacttttcacttgcgacaaggcggcggaccataca

SEQ ID NO: 372 - DNA, 1417 bp, unidentified
  source 1..1417: mol_type = unassigned DNA; note = element_009dd87
  misc_feature 1: note = core
  misc_feature 2..70: note = LE
  misc_feature 71..1123: note = CDS
  misc_feature 1124..1417: note = RE
  misc_feature 1196..1411: note = bridgeRNA
taatgggatggtccgccgccttttgacttccgccagccggaggtattaacggtgagcaaggaggcgtcccatggaactgcatgcgatcggcatcgatttgggcaagacggtttttcatcttgttggtttgagccagaccggagagatcacggtacggaagaagttctcgcgcactcaacttcttcgtttcactgcgaacgtgcaagttcatctgattggaatggaagcctgcccaggctctcattttctgggtaaggctcttcgcgagcaagggcatcaagtgcgcttgatgcctgcacagtatgtaaaaccgttcgtgaagaccaacaagaacgactacatcgatgcagaagccattgctgaagcggtgagccgaccgacgatgcgcttcgttccgatcaagaccgacgatcagttggatatgcagtcactgcaccgggtgcgtgaacgctggatcatgcgacgcacggcagtggttaaccagatccgaggactactgctggagcgcggcatcacggtgcggaccggaagatgccatttggacgctgcgttgcccaacatcctcgaggacggttcgacgtccctgtcgggagcacttcgctttctgctgatcgaactgaggcaggaactggaacagctggcaggccacatcgaacaagccgagacgctgattcagcgagctgcgcagcagagcgaggcctgtcagcgactggatgcgatcccgggcatcggaccgcttaccgcgaccgctctgattgccgccatcggcaacggtgaagcctttcgcaagggccgcgagttctcggcctggctcggactggttcctcgcgaacactccaccggaggcaagcagaagctgctcggtataagtaagcgcggcaactgttatctgcgaaaactgtttatccagggtgcacgtgcagttctgcagtttagagacaagcagtgttctggcttgaggtactggctcgcagagctgtcctcgcgcagccactacaacgtcgttggcgtggcgctggccaacaagctggcacgcatggcgtgggccgtgctggccagaggcgaagcttatcggccgcccctgctggctgacatgaatggtctgcagatggcgcccggatagctccgggcttggaaatcgctatgcgattcccacatccgcaaaccaacgacgactgcgaaatttaggatcctgccaggtctgcaggcgaatcatgagatggcacaacggtcgaacccggcgctccccaaacccgaacccggcagaagtccttcgagactgcgtaactaatggggaacggagcgcagcgcattccatcctggcccggagccttggctccaacaaaggccgaatacatttgcgcagaccaacctgtcactctcacttttcgcttgcggcaaggcggcggaccataca

SEQ ID NO: 373 - DNA, 1392 bp, unidentified
  source 1..1392: mol_type = unassigned DNA; note = element_009e4ae
  misc_feature 1..3: note = core
  misc_feature 4..90: note = LE
  misc_feature 91..1122: note = CDS
  misc_feature 1123..1392: note = RE
  misc_feature 1093..1379: note = bridgeRNA
agatggggtggttgccgccctccccagacggcatcgcaatgtgccaagatagtggtgttgaaaggccactgagcggaaaggacggcaaccgtgacaaaggatatgatgatcggggttgatttggcaaaagctgtttttcagctgcatgccgcgtcgatgacaggtcagcttcggttttgtaaaaagctgtcgcggcagagtttcctcaagtttatggccgagcagcctcgtgcggtggttgtgatggaggcttgtggcagcgcgcattactgggcccgcgagatgaccagcctgggccacgaggtgaagctgattgcgccgcaatacgtgaagccgtttgtgaagcggcagaagaatgatgcggcagacgccgaggcgatcgtgatcgccgcccagagaccggaaatgcgcttcgtcgagccaaaatcagccgagcagcaaggtcgggcaatgctgttccgggcgcggacccggctagttcagcagcgcaccgaactggtcaacatgctgcgcgcttttctttacgagctcggtcatgtggtgccgcagggcatcaataacgtgtcccggatcgccgcgatcatcaccgagcccaacagcgatctgcctgagattgcccggattgaatgccgcgatttgctggagcagatcgaagcaatgaccgtgcggattgcgacaagcgaccgccggatcaaggatctggcagggcaagcagacatggctcgaaggctacagaccatgcctggagtggggccgatgacggctctggcagtcgaagcgtttgccccgccaatggagagcttcaaatgcggcagggactttgccgcttggctgggattggtgccgaaacagcattcgagcggaggcaagacccgtcatggccgcgtctccaaagccgggcaaagcgacattcgccagctgcttatcatgggcgccatgtcgcgattgaactggatgggccgaaaatcgatctcagaaacatcgtggctagcccgcatgctggcgcgcaagccacggatgctggtggcaatcgcattggccaacaagatggcccggatgatctgggcgatgttgacgaaacaggaagattatcgaaccccggcaacggcaatcgccgcctgatagaaaggctgcgcaaggcccaagctggtaagggggagtgagaaggcgacgacccgaatgggcaaaatgatcgaacagatctggatcaggaaaaccagttaagagtcccgagtttcgagctcgtgaatcagatttggacctgatccgcggatcaccataccggccagcggcttctggaaaacgctgcaatcaaaggcctgacagaagaccgcgctcgatcacctgttcaccggttcaaatacttcttgcctcacgggcggcaaccacaga

SEQ ID NO: 374 - DNA, 1240 bp, unidentified
  source 1..1240: mol_type = unassigned DNA; note = element_00a0078
  misc_feature 1: note = core
  misc_feature 2..209: note = LE
  misc_feature 210..1205: note = CDS
  misc_feature 1206..1240: note = RE
  misc_feature 6..194: note = bridgeRNA
cctttagatttacgttttaatgattcttagtagttttaagaaaaaagaatggggtgaactttctggccggctaagctaatgacttactgcctgtattagtccccattctttccaagttgcactagaaccatttagaatgttagactttgaggtcttaataaaggtcttagtttaagcaactttagttattcaaacgtaaacataaaattatgaaatttttagaaactgctggcattgatgtatcaaaagatacaatcgattctacacttcatgtaaaaaagtgtagtaaacagtttaaaaacaacaccactggatttagatctttcattagatgggctcaaaatcaatctggattatcaataaaccagatacaaatatgctttgagcatacgggtttatattcattaaatttagctatgtttctttcaaacaatgagattaaatttagtatggtcccggcacttgaaatcaaaaaatcacttggtattgcacgaggtaaaaatgatcaacttgatgccaggagaatagcagaatatgcttatttacgcagagagaaactagccttctacaatgtgccttccataaacataataaaacttcaggccttaactactttgagagcacatatggttaagaataaatctggttaccagagttcattgcaagggttaaaaacattctttaaacaaaaagataacgataatatttacaaaacaatacaatctgaaatatccggattaaacaaaaaaatcaagaagatcgaaagggaaatccttcaagtgattagaagtgaggaatctttatatcatttgtatagtttaatcacttctgttaaaggagtcggattgatcctggctgcaaattttctggtaatgaccaactgttttacaaggtttgaaaccagcaggcaatttgcttgttatagtggaatagctccttttgagaaacaatcaggaacaagcttaaaatccaaaagtaaagtaagtcattttgctaataaaaggatgaaaacattgctaaacctggcagcttcttctgctatccaatgtgatccagagttaaaagcgtactataatcatcgtatagaaactggtaaaagtcggatgagtactttaaacattgtccggaataaaatagtctatagggtttttgctgttgtaaaaagaggaactccttatgttcctcttcatctgcacgcagcttaatctttttttaatatatttggttttatcttagaata

SEQ ID NO: 375 - DNA, 1517 bp, unidentified
  source 1..1517: mol_type = unassigned DNA; note = element_00bd0de
  misc_feature 1..4: note = core
  misc_feature 5..250: note = LE
  misc_feature 251..1492: note = CDS
  misc_feature 1493..1517: note = RE
ctcactggtgcaccatcctcgtgtcggtagttccagatgggctaccggtacacccctggtccccaccggaccatcgccaagatcgctcgaccctcgaggtccagcatgagttctgcgaggtccggtggcccaggacccccagaccggctacagggctatgcgccgatgagcgccgatcagtgagcgaccggctgcgggatcccgggaccaccgggtgttctctcactgctccaacagcgaggaaacaacaatgagtttcacccctgcgaccactccggcgcgagtctgcgccggcctggactgggccaaggacgaccacgccgtgtgcatcctcgggcccgacgggtcggtcttggaccggttcttcgtcgttcacgatgcggccggcctgaagaccctggtgcgtcgcctgctcaaggccggagtagacgagctcggcatcgaacgaggcgacggacccgtcgtcgacgcgctgctccaggccgggctcacggtgctggtcatcgcacccgggcaggtcatgaacctccgctcgcgctacgggtcggccggcaacaaagacgaccgcttcgacgcctacgtgttggccgacgtcgtgcgcaccgaccgggcccggctgcggcccctggtccgcgacagtgccgcgaccaccgcgatgcgcaccaccgtgcgagcccgacgcgacctcgtcaaacaccgcgtcgctgccgcgaaccagctccgcgcccacctgcaactcgtgttccccgccgcagccagcctgttcgccgccatcgacaccgccatcagcctgagcttcctcgagcgcttcaccacccagagccaggccgactggctctcgcccaagcggctcggcacctggctgagcagcgtcggatactccgggcgcaccgaccccacgatcctgcacgccaaactgctcgccacaccccgcgggaccaccggcaccgacgccgacgtccacgccgcgaccaccagtgcctacgtgacactgctgcgggtcctgaacacccagatcgctgtcctcgaggacaacctcaccgaccagctcaagacccaccccgacacccacatctacgcatccctgccgagggtcaagaccctgcgcaccgcccggctgctcgccgagatcggcgacgcccgaggcaagttccccaccgccaactccctggcagccctggccggcgtcgcgccctcgaccagacagtccggcaaggtcaaggccgtcacgttccgctggggatgcaacaaacaactccgagacgccctgtgcgacttcgccggcggctcccgccacgacaacgcctgggcagccgacctctacgaacgcgccatcgcccgcggccacgaccacccccacgccgtacgcatcctcggcagagcctgggcacaggtcatctggcgctgctggcacgacaacctcagctacgaccccgcccaacatcgagccctccaaagcatcctcgccaacacagccaacgaagcggcctgaacggctaggggtagacacagggcaa

SEQ ID NO: 376 - DNA, 1585 bp, unidentified
  source 1..1585: mol_type = unassigned DNA; note = element_00bee42
  misc_feature 1..3: note = core
  misc_feature 4..198: note = LE
  misc_feature 199..1467: note = CDS
  misc_feature 1468..1585: note = RE
  misc_feature 12..231: note = bridgeRNA
tttggtactataaaagtgtaatattaattacagaaatgtgattgaatattacacttctttttattatgattgaagtgattggataacgggcttcttttagagataaagttctcgtcacaaaaagtgttatccaaccttcacataatatattcgtttaagcaagttgagattgaaatagttctcgtgtaaagagccaaaatgaggatatgtagaggagttggaaccaatcataatttaaagaatagaaaggaagagaaaaaaatgaagtatggagttgggattgatatttcaaaaggtaaaagtacagtagcaatattatcgattgaaggagaagtaattgaagaaccatttgaaataaatcatgatattgaagggttaaatttattagaggaaaaaataaaagatattcccaaagaagatttaaaaatagttatggaagaaacaggaacatatcatttaccagtattaggttatttactagataaaggatattttgtgtctgcagaaaatgcactaaagataaaaaaatatcttgatcgaggattaagaaaagcgaaaacagataaaaaggattctttaaagattgctgagtatgcctgtgataattggtataaattaaagaaagtaagagaaaatgataaaatatataataatcttagatttctatcaagacaatatttaggatatattgcagtacaaacgaagcaaaagattaatttttctaatttatgtgatttattatttcctggatactatcaactgttagatgagaacaattttgtattaggactaaaaatatttaaaaaataccatcatcctgaaattgttataaataaaaaacaacctcaatttgtaaatgagattgataagttagcaaaaaaattaggacataaaggagcaggcataactctagccaataagatatatttacttgcccaaaaaacaatttctccatgtcctaacaatgaatatgcacagctatcagcaattagttgtgcagatgctttaattttaacaattaaaacaactactacaattatatcagaaatggataaacttgcaagagaattgcccgaatatgatgttattagtgaaattcctggatgtggaaagaaattaatttctagagtaatagcagaaattggagatgtgagaagatttaaaaacgcaggaagtattatagcatatgctggaatagatgccccaccgtatcagtcgggacaatttgaatcaaaaaataggcatatttctaaacgaggaaataagtatttaagaaaaactggatatgaagtaatgaaatgcataaaaagtagttgtaaatcagataatgaattaaaatcatatattatcaaaaaagaaaatgagggcaaattaaggaaagtagcaaaaatagcaggattaaacaagtttttaaggatgtattatgggatagtaaaaaagaaatataaagaattagaaatatggtaagcattaatgtttgatatgtaaaaaaaggcctagtaataggtctatgttagcgtgctctgatatacgaatttataaaattaaaaaaatttactaaaaactattgatttttattagcaag

SEQ ID NO: 377 - DNA, 1515 bp, unidentified
  source 1..1515: mol_type = unassigned DNA; note = element_00c55a3
  misc_feature 1..3: note = core
  misc_feature 4..242: note = LE
  misc_feature 243..1388: note = CDS
  misc_feature 1389..1515: note = RE
cttatattagaattagtgcagttagctactgccagagcccaagtgttaaacttggaataagccactgtggcttagtttgtcacctccaatcgctagacgattaagtaaaggctctaaccacagctttttgtcacattggtaatgagtttgataacgctagacattttatctcgtgtaaggtcacaaggctcaaggtcgtggacaaccaagtgcgcttgaatacgatattggaaagtaaccctatgctttatctcggcattgatgtcgctaaatccaaacacgatgtcaccgtcttgaatgacaaaggacaaacagtccttaaacccctgacggtgtcaaatagcagagctggctttgacttacttcatcagtcactcaaacagctcaaccaagactgtctcatcgctctggaagataccggacatgatgcctttaatctggccaacttcttgcatgaacacgattatcaggtttacacctacaatcctctgctcatcaaagaattcgccaaatcactctcacttcgaaagactaagacagataagaaagacgctcgcgttattgccttaaaactcttatctgaccctaatcgtgaacaggtcaaacacgataagcgacaagaagagttgaaaatcctaaccagatacctcaatcgcctcaagaagaaacagaccgactggaaagtccagtacaccaagtgtcttgacatcatcttccctgagttggataaactcatcggcaagcatgctgactatgcctacgagctcctgtctcgctaccctagccctcagaaaatggtgcaggcgggatttgacaagctccttaacgttaagaggctatctgctcataaaatcaaggacattctcgacatcgctccttcttccatcggaacaagctcaccagcccgtaagtttgaactcagagagattatcgagaacatccaacactataacaggctcatcaagaccgccgagaagcagattgatgagctaatggctaagctcaaatctagcatcactactgttactggaattgggaatcgactgggggcagtgattctagccgagatgaggaacatcaacacctttgacaaccctgctcaactccaggcattcgctggttcagaacccgccatttaccaatctgggcagatggaaatgacagggaaaatggtcaagagaggatccccacatctgaggtgggcactcttgcaggccgccaaagcctgtacgcgctattcgcctcggtttaggcagtatcttaagcttaagctagctcagggaaaacactataatgtggcgattacacatgtcgctaaaaagctcatcagagtaatcttttacgtgctgaaaaataactgtccttttgacgaaaataagctacgctaagggtaaacttcaatagcacatcctttgaaaactgtctgttttcaaaggctttttgccgtactctaaaagcaactagggtgattaaaaattatttcagacgaaactattgacttttctgatagtttgt

SEQ ID NO: 378 - DNA, 1342 bp, unidentified
  source 1..1342: mol_type = unassigned DNA; note = element_00d89ca
  misc_feature 1..3: note = core
  misc_feature 4..276: note = LE
  misc_feature 277..1098: note = CDS
  misc_feature 1099..1342: note = RE
  misc_feature 1079..1331: note = bridgeRNA
tgatgatgtggacgccgctgccagcgaagcgccaaatatggtgcttagaacgaagcaaaagcaagaaaggagcgttccgatgaacattgcgacaattggattggacttggcgaagagtgtctttcaggcccatggcgtggatgaggccggtacgacctttctggtgaagaaactgcatcgcaaacacatgcgccgttcttctcgaagctgccgccctgcctgatcggtgtggaagcttgtgccacggcgcatcattgggcaaggacgttgatcgccatgggccatgacgtgcggatcatgccgccgtcctacgtcaagggatacgtaaaacgcggaaagagcgacgctctggatgccgaggcaatctgcgaggccgttgggcgtccgacgatgcggttcgttcctgtgaagacggtggaacagcagagcatcctgatggcgcaccggacccgatcgcttcttgttcgccaacgaaccatggccgcgaatgcgcttcgcgcgcacctggccgagtatggccaggtcgcaaacccgggcatcgccaatctggtgaagctggcggacaaggcgttcgccgatgaagccctgccagcctatgcccaccgggcgcttgagatcctgatccgccggatcgctgaactaaccgaagagatcggcgcactggatcaggacctgaaggcctggcatgccgggaacgaggcaagccgcaggctcgcggccattcctggtattggggtgatcaccgcgaccgccctcgctgcgaccgttacagacccggatcaattccgttccggtagacagttcgctgcctggcttgggctcacgccgcagcagcactcgacaggtggaaaaacccggcttggcggcatctcgaaacagggcgaccgctatctcaggcgattgctggtcgtcggggccacggcagtcatgaggcacgccaagcgaaacccgacgccgatgacggactgggtaaacggattgctggaaaaaaagcccttccggctcgtctctgtcgcgctcgcgaacaaactcgcccgaatagcatgggcgctgcttacccgtggcgagacctaccggccctacgggcggcccgcctgacggcaccaggccaaaaacgaattggcaatggcagtcgatgatgcgtaacgattgagccaatggtgaagcaaacccgtctgattcaacgcgcctccaaagcgcgccaggttgatcagggacctcaccggtggatttccatcagggccagcggcagatgacagtcgcacaaaccggccggacatatgaaagcaaccgatcaccgcaaccgacaaaatcaacccttgccataggcggcgtccacata

SEQ ID NO: 379 - DNA, 1582 bp, unidentified
  source 1..1582: mol_type = unassigned DNA; note = element_00db659
  misc_feature 1..2: note = core
  misc_feature 3..241: note = LE
  misc_feature 242..1573: note = CDS
  misc_feature 1574..1582: note = RE
ctcattggggaagtatcgagggtgcggctaggacggatgcctggtcgtggcttctcggtcgtgtcgggggatggcctcgttgccgagccgatgcgacggccagttttagtgctgccaccctcgacgcgccgaggcccgggaccggcgttagggacatgcccgaccgagggccgaacaatgaggaaccggcgagggcctcgacaccgtggagtcaaccacttcgctccgcgggaggctagtgatgaagtatgtcgggttcgactgggccagtcaggcacacgatgtgacggtgctcgacgaggccggccaggtgctggatcggtgggcgtttccgcactccgaggccggctggttgatgacggtggagcggctgcggcggcaggggctgcccgatgacctcccggtgattgtggaacggaccagcggcctggtcgtggatcggctgctctcggcgggccatccggtggtgccggtgcatcccaccgcgttcttcgccgcccggccacggtggggcgcctccggggcgaaatccgatccgggggatagctacaagctcgccgactacctgcggaccgacgggcatcggctgcgacgattgtctccgctggataccggcttgcaggagctgcgggcgttagtgcggctccgcgatgatcatgtgcgcgctcggaccgcagcctctaaccagctcgctgccctgctcgatgcccactggcccgggccgcggcagctgtttgcctcgctcatgtcgccgatcgccctgtcgttcttgaccgactacccgactccgattgcggccgcgcatctgggcgaagcaaggatggccagcttcttgcgaaggcaccactaccgcggtgggaagaaggctgcggacctggtggcccggctgcgcgctgcgccggtggcacccgccggtctaccgaccgccaccttggcggcgatgatcactgcacaggtccagctgctgcggacgctgcaacagctgatcagtgacaccgagcgactgattgctgcacgagtcgtggctcatccgcgcaccggactgctcgccgggctgcctggtgtcggcgtgatcaacctggcccagctgctggccgaggtgggcccgatcctggatcgagtcgacagcgccgaacaggccgccaccgagtgcggcgccgcgcctgttacccgcgcctccggaaagaccaccggcacctacttccgttgggccgtgaacacccgcgcccgaaaggcgatcaccagcttcgctcacaacgcccgactgcgagacccctgggccgccaagctctacgccgatgcccgcgcccgcgggaaacggcatccgcacgccacccgaattctcgctcgagcctggcttcgggtgatctgggcctgctgggcctcccaacagccctacgacccggctcgacacaggcacgccaggtcctcacacccgccggttcctccaccgcccgccaaccctgccggagcgcaggcgcggtcaagatggagcaccccacggctgaacgaccttgaccgcgccgagcaccggcacaccatcgaaggcggaggaaccctgccccaaacttgacttagagaa

SEQ ID NO: 380 - DNA, 1102 bp, unidentified
  source 1..1102: mol_type = unassigned DNA; note = element_00e1564
  misc_feature 1..2: note = core
  misc_feature 3..163: note = LE
  misc_feature 164..1090: note = CDS
  misc_feature 1091..1102: note = RE
  misc_feature 1..159: note = bridgeRNA
cctgtctgttggagtgatggtatgaggtgattgcggaagggagcccgtcccccccgagggttcggagcccgatagggagcaagggtcccttccgcgtcggtcacaaccctgaacagttgcttgggactgccgatcccgcacgacatggacaggagccttacccatgccacaagccgttatcggctgcgacctctcacgcgccttcatcgacctgtaccgcctgccgtccgggacacctggccggatcgcgaacaccccggatgcgatcgcgtcctggctcgacgcgctcgaccgcgacgtgcgcgtcgtgttcgaggcaaccagcggctgcgatggcgacctcgtcgccatcctggcgacgcgcgaacagcccttctcgcgcgtcaacccacgccaggcgcgcgagttcgccagggccaccggcgtgctcgccaagaccgaccgcgtcgacgctcgcgtgctcgcgcagatgggcgcagccctcgacctgcccgccaccgtgcccctcagccccgaacgctcgcgcctcgccgacttccttcgcagacgcagacagctggtcgacatgcgcaaggccgagaagctgcaccggcacagcgccggccagcccgagatcgccgccgccatcgaggccatgatcgaactgctcgaccgccagatcacccacctcgaccgccacatcgcgagcctcatcgccgacgacgcccggctcgccgaccaggccaggctgctcaccgccgtgcccggcatcggccccaccgtgctcgctaccctgctcggtgagttgcccgagctcggcacgctctgccggcgtcgcatcgcctcgctcgccggcctcgcgccgcacgcccgcgagagcggcacatggcgcggcgccaggcgcatctggggcggccgccgcaaggtccgtgaggccctctacatcgcggccctgaacgcctcccggcgagtacccgtgctcaccgccatgcgcgacagaatgcgcgccaagggcaaggcgcccaaaaccatcctcatagctgtcgccaggcagctcctcgtcatcctcaacgctatgatccgctccggacaacctatccggctcgcctaaccaacacagttg

SEQ ID NO: 381 - DNA, 1204 bp, unidentified
  source 1..1204: mol_type = unassigned DNA; note = element_00f1c69
  misc_feature 1..2: note = core
  misc_feature 3..223: note = LE
  misc_feature 224..1201: note = CDS
  misc_feature 1202..1204: note = RE
  misc_feature 37..195: note = bridgeRNA
cttgtatgttttcatagcacttaccgatcttgcttcgggggtgctggggatcgggacgcacccatccatcagccgtcactagcggactgacgtcggtagatatcccaccccgcccaaatacgtcgattaagaatctagcggccatgaccgccgattgatcgcaaggtaacgaatcgggcgcggcttccccagcagacacaacgctatcgcagggagtctagagatgcaaacgtctcaatctttctttggtgtggatgtggggaaatccgaggttgttgtggcgatgcacggggcggccaagccgttgacccgggccgtcaaaaactcaacgactggcttggaaaaatggttgcaaacgctgccgcgcggaagcgttcttgccatggagtccaccggtggctacgagcgcctgttggccgacctggcatatgagcgtgggctgcgcgtctacgtgctgaaccccaaggccctgcaccattacgccaagtcgcaggctcaacggggcaagaccgaccgactcgacgctgtcatgattgcgcgttacgtggcgctcgagcacgagcggttgcataggtacgaaccttgcccggagcacatcgagcgcctgagtcagatccaacgcttacgcaaggtggcggtcacgacgcgcacgaggctgcgcctgtccagcgatcggcacaaacacgtgggctcgcaagctcaggtccagcgagcgttggatgccttgacgcagttggcagacgctcttgagcgcgaaatgctcgatcagatcgctgccgaacccgccttggccgacgacttcaacttaatcaccagcattaccggcgtgggaaagctgactggggccgcactggtgaccgccttcgcccgcatcccgttcgcctcctcggacgccgtggtggcctacgcggggctagaccccaggcccaaggagtctggcgcctacaaaggcctgcgtaaactcagcaagcaaggcgatgcggccctgagaagccttgcctacaacgcggcatcctcagcaagccgaacagctgccttcaaacccctctacacagcgctacgagtcaagggctgggcctcaacgcaggcattaaacatcatcgccagaaaactcctacgcatcgccttcggcgtatggaaatcgcgcaaacccttcgatgtaaacctctttatggccagccaggcttgcgccaaaccatagaat

SEQ ID NO: 382 - DNA, 1266 bp, unidentified
  source 1..1266: mol_type = unassigned DNA; note = element_00f8b27
  misc_feature 1: note = core
  misc_feature 2..302: note = LE
  misc_feature 303..1262: note = CDS
  misc_feature 1263..1266: note = RE
  misc_feature 70..221: note = bridgeRNA
accttagatttgcagcggcaaaccgaaagtgaaatagaattgataaatttgcagtgaaaaataaatattgaaagaaaggaaagcaaagggtgaaccattttgcgccaagggtaagacccgtgttcatattaggactctctgccttttccgtcctgagacctgtataagaatataacaccagttgttaaggtggttaggttagggacgagttcctttctctcgttgtttgtccattacaaagttatgcaaaattttatttcatcggcattgatgtctcaaaaagcaaactcgacatctgtgtaatgcaaaagtcaaaggccctcaaagaggaagtagtaagtaaccacctgcaggccattgcttcggcgattgactgcataaaagaagaactgggcatggataacgacagcttcatcatctgcgcagagcacaccggccagtacacatacccgcttatgtgtgccagtaagtctgtgggctgcaagctgtggcttgagaatccgtctcaaatcaaatactgctccggcgtgaccagaggcaagaacgacagagtggacgcacgtcgcatcgctgaatacgccatgcggttcattgacaaggctcgtccatatgagcgtccgtcagaagaacttacacggctgaaacaacttgaagccgaaaggtctctttacctgacagatctcgccaaatacaaggcgcagctcaccgatcagagagactatatggagccggaaatcttcaagcgcaaatcaaagcgtctgaaggatatgattaaggctttggagaaaaccctcaaagctatcaacgatgaaatgtcgaaagtgttagcttcttcaacaactctcactagacagatgcaactgcttcagtccatcgaaggtgtcggcccagtggtcgctatgaatatgattattgcaacggaagcttttacacgcttcgacaatccacggcagttctgctgctatgtaggggtagcaccatttgcttacacctccggcagtagtcaacattccaaaaatagagtgtcccaaagggctgtcaaatacataaaatgcctgcttcacatgtcggcagtggcgattacccacaagaagacaggcgaattaaaaacttattttgaacgaaaagtcgccgaaggaaagaataaaatgaccgttttgaacgcaatgcgagccaagctcgtggcgagaatgttcgctgtaataagaaaaaatcaaatttatcaacctatttttttcggcttaggcttgcaaaaatcataagaat

SEQ ID NO: 383 - DNA, 1347 bp, unidentified
  source 1..1347: mol_type = unassigned DNA; note = element_00ff113
  misc_feature 1: note = core
  misc_feature 2..60: note = LE
  misc_feature 61..1095: note = CDS
  misc_feature 1096..1347: note = RE
  misc_feature 1130..1338: note = bridgeRNA
tatggatggcccgcccctcaacctcggacgcaggctgcgccagaaatggagggggagtaaatggccaaaatgccaattgccgtgctggggatcgacctgggcaagaacagctgcagcgtggccgggctggatatgaacagggcggtggtgctgcggcgcaagatgacgcgcgagaccctggtggcgtttgccagcaagctgccagcctgcatcgttgcgatggaagcgtgttgtggcgcgcatttcctgggtcggacgttcgccgcgcaaggccacacggttaggctgatttcgcccgagtatgtgcagccctatgtgaagtctcagaagacggacgaccgcgacgcggaggcgatcgccgaggccgcgacacggccgacaatgcggctcgtgacgctcaagagcgaggcgcaactcgacctgcaggtgctgcaccgggcacgtgatcgactggttacggcgcggaccaggctgaccaatcagttgcggccggtgctgctcgagcggggcgtgatcctgccaaaacgtcgagccccactgcgacatcgactgcacgaactcatggccggggaactgccaatcggtcctcgggtggtacggctgctgcaggatctccccgaagagtgggcgaaccttgatgagcggatcaatgcttatgacgatgaactcgccgcgctgacccgcgaagaccagcaggctcggcaactggcgaccatcccaggcatcggcgtgatcaacgcaaccacacttctggcagcggtgggcgacggctcagcctttgccaagggacgcgatctggcggcatggcttgggttgacgccgcggcagcactcgactggcggaaagaccaagctcctagggatcagcaagcggggcaacaaatacctgaggacccagctgatccacggcgcccgcgccgctctggtgcatttcgccaagacacctacgcggatcggcgcctggatacgccaactgctcatccgagctcatcccaatgtggtggtcgtcgcgctcgccgccaagctggcacggatcgtctgggcggtgttgcgtcacggccgcgcctttgaacaccaaggttatgccgttagctgatgacgaggtagcgcccccggcgccacgctggagacgctcacgaggtctgtggaggtggaaaccagatggcgtaacggtcgaacccgcgtctcagcagcctggtcaaaaatgtggtgcccgacaccgtgatctttatcaggcctgaggcgcgcgcattccatattggccagggttcaggccctgtgaccggatacgttgatgcagaccaacacgccgtgtgaattcatccttgcagacggggcgggccatacg

SEQ ID NO: 384 - DNA, 1582 bp, unidentified
  source 1..1582: mol_type = unassigned DNA; note = element_0107d72
  misc_feature 1..3: note = core
  misc_feature 4..279: note = LE
  misc_feature 280..1461: note = CDS
  misc_feature 1462..1582: note = RE
cttatattattatttgtaggtagctcctacatgctctgggtataaattttatacttagattatgattatgcgtcgtgaattagttttttatgtccaacggcattactagatatatcatctggtagtgactggttcggaaaggctctaatcacggctttttgtcgtattggtaataagtttgataacgctttgacgttttatttcgtgtaaggttacattgtcaatttgtccgtgtttatcatgccgcataatctcatcatatttaggaggatttattttatgcttttcgttgggattgatgtagccaagtcgcaccatgatgtcgctattcttgatcatgatggtacaatcattttgcgccatctccgtattcaaaatactcgtttaggatttgaactattgatcactaagttaaacgaactcacgaaccagctaaatcagccagttcgtattgcaatggagtctactggccattacagcaccaatattatgatgtttatgcaatcccatggctatgcaacgtttctgtataatccatttttaattaaggagtttgttaaatcatcttctctacgtaaaactaaaaccgataaagctgattcattaacaattgctaaaaagttggctagtgatgtgacacctgaacaatttgctatctctcatgaaatccaagaattaaagactttatctcgttatcgtagtcgactaacaacaagacgtgctgacctgaaaacgcaatacattcgattactagatatttcgtttccagagttggcatcttttttgggcaatcataatttacacacgcagtatatttatgatttactcattcgttattcttctccacatcaaattgcccatacacgaattgatgttcttaccaaaatgcttcacggtcaaggtaatcatttagaatcagcaaaacagttgaaaaatttggcacgtcaatctattggccttaaatctacagctaatgagttagagctaaaacaaacactcaccatgattaaaatgttttcgacacaaattgacactgttgatcaacaaattaatcaactgatggattctcttgaagacgcacgtatcatgacctccatatccggtatttccaatcgcattggcagtgtcatcttagccgagataaacaacatcaggaatttcaactcaccagaacaacttttggcatttgctgggttagagccatctatctatcaatcaggtcaactagaaacgactggtaaaatggttaaaagaggctcaacagcactacgctgggcgctatatcaagcagcagaatatgcttctcgatggtcaccaactattcgagcttaccgacagaagaaactcaaagaaggcaaacacttttacgtagtcatgtcccatgttgccaaaaaattggtacgaatcatttattatttgctcaaacatcacgaatactttgatgaaataaaattaagctaattaatcttgcactcacaaccgcgtccgtttcaaaaacaccaatttgaaacggttatttgtcatgctctcttaataaagtgtattaattagatccggtttcttgacttttataatagtttgt

SEQ ID NO: 385 - DNA, 1472 bp, unidentified
  source 1..1472: mol_type = unassigned DNA; note = element_010e660
  misc_feature 1..2: note = core
  misc_feature 3..233: note = LE
  misc_feature 234..1451: note = CDS
  misc_feature 1452..1472: note = RE
  misc_feature 7..230: note = bridgeRNA
ctaatggggatcgaccgtccgggtcgagtgatcggtcaggatggttccgagccgctggtcggtcagcactcttcgacgccgagcgttgagctctagagctagatcgtgcgccggtcagtcggtgaggttggccgtgatggctggtgggatgacgtgctgcgagcactgaaccattagcgagctgctggtcgcctcgggctcgaacgacaactgttcaacgaggaggtagcggaatgaggcaggtgttcgtcggtctggattgggccgaggatcatcacgacgtgttcgtcgaggacgacaccggcaagcggcttggcggcggccggctgcctgaaggcgtcgaggggttaggccggttccacgagctcgtggccggccgcgtcgacgacccagctgaggtggtggtggcgaccgagaccgatcgtggcctgttcatcggagcgctcgtcgcggccgggtacacggtgttggcggtcaacccgatgtcgacgtcgcggtatcgcgagcggcactcgacatctggggcgaagtccgacccgggtgacgccaaggtgctcgccgatctggcccgcaccgacgcccacaaccaccgtccggttgccggtgacagtgaactggccgaggcggtcaaggtgctcgctcgagcacatcagacgatgatctggtcccgccagcgccaaaccaaccagttgcgctcgacgctacgcgagttctacccggctgccctcgacgcgttcgatgagctggccggccgtgacgcactggcggtgctggcgatcgcctcgacaccgactgccggtcggctcttgtcgcggtcaaagatcgccgccgcgttgcgccgcggcggccgacaacgccggatcgacgaacgcgccatcgagatccagaccgcgttgcgcagcgagcagctccaagccccggccttggttgctgacgcgatgggcgccaccgtcgccgcgctcgtcgcggtgatcggcgagatgcagacccagatcgagcggctcgagagcgaactggccgaccgttttgagcaacacccggacgccaagatcatccgttccctgccaggactggggatgacgctcggcgcccgggtgctcgccgagttcggggacgacccgaaccgctatgcagatgccaagtctcgcaagaactactccggcatgtcacccatcacccgcgcctcgggcaaacaccacgtcgtgttggcccgctacgcccgcaaccgccgcctcgccgacgcctgctacctgtgggccttcaccgcgatcaccgccagccccggcgcccgccacttctacgaccaacgccgcgccgccggacacacccaccaccgcgctctacgcgccctcgccaaccgcctcgtcggcatcctccacggctgcctccgacaccacaccccatacgacgaacacaccgcctggagtcatcgcctcacgatcgccgcttgacaacaaccacccgtgggatgt

SEQ ID NO: 386 - DNA, 1600 bp, unidentified
  source 1..1600: mol_type = unassigned DNA; note = element_01103c4
  misc_feature 1..3: note = core
  misc_feature 4..237: note = LE
  misc_feature 238..1446: note = CDS
  misc_feature 1447..1600: note = RE
  misc_feature 46..223: note = bridgeRNA
cttatctgttaaactcaacttagtggcaggaatacctgcctaagttggcaaagatagttcaaaggtttccgggaaaaggattccacctcctggcagttcgactgctttcggaagagttacctttcccggactaaatttgcagactgcggttcatagaagggttgtgcttcgagcaccgccgttagataaggcccactgccagtctgcagcaaaattctttctgtggaggttctaaacatgtactttgtaggaattgactgggctgacttgcatcatgacgtagccgtgcttgatgaaaaaggccaagagctaaaatacttcaccgttccccataatagggaaggcttagagcagttgaaacaaacactattgggcatcaaccccgatccagagagcttcgcctgtctggtggaaaccaaaaacggccttttagtgcagtttcttttggaagccggtttcccggtttaccccttgaacccgaaggttgtggattaccggcgtaagccctcaggggcgaagagcgaccccatcgatgcccgtcttctggctagcatcggccggtccgatctggcgcagctaaagaggctaaagccggatactgaactggtctgcgagctaaagatattgaccagggatcaggacagcctgatccaggaatccacccgcctgaacaacaagctcattgcctgcttgaaggaatattacccggcggccctcgaattcttctcaaaaccaaccctaccggtagctctggagttttacaagcgctatccaaccccggagctggtaagggaagctaccgttccggagatagccgcttttctgaaaaagcataagcatcccagacccaaccaaacggccatctccatctggcagaaggcacaggaaccacagcttaatgccagcgctcccaccgtgcgggcaaagtgccgcttgatgctcgccctggtgggccagctggaggtggttaaggagcagatagccgcttatgataaggagatcgaccgcctttttcagcagcactccgacagcaaaatcttcgctagccttcctggagcggccagaagactggcgccaagactgctggcggagtggggcgacgaacgtgaccgttacgagaacgcagctgtggttcaggctttagcgggcacctcgcctgtgctctttcagagcggcaagtaccgatttgccagacagcgcaagtcctgcgtcaaacctttccggcgggtaatgcatctcttttccttccagagcatcaggtgggttccctgggcaagggagtattactatgcgaagagatgccaggggaaaactcaccacgaagctttgcgggctctggcgaacatctgggtcaggactatctttgccatgtggaaaaaccgcacttgctacgacgaagctgcattcattgccgcccgctccaggcattttaaccgggtagcgtgaggtctggtatttagttgtcaatgttctaaagccgccagcgggacagggtttgaaccaacccacgctaggcgcaaggggatgctttgtcctttaaaggctgtaaatgtttatactaacagtgaaaaaatttaattttctcattgacatagaaggt

SEQ ID NO: 387 - DNA, 1373 bp, unidentified
  source 1..1373: mol_type = unassigned DNA; note = element_0117f5e
  misc_feature 1..3: note = core
  misc_feature 4..88: note = LE
  misc_feature 89..1111: note = CDS
  misc_feature 1112..1373: note = RE
  misc_feature 1110..1360: note = bridgeRNA
tgatggggtggacggcccctgtatccggcgtcgatgcgccatagggtggtcgttatcgaagcaaccacttaaacgggagccgtccaccatgaatgttatcacaatcgggatcgatctcgccaagtccgttttccaggttcacggcgttgatgcggagggcacagtcaccgtcaggaagaagcttcgccgcgccgaagtgctgaagttcttcgaaggtctgccgccttgtctggtcggcatggaagcgtgcgcgacggcgcattactgggcgcgggagatcggcacgcttggtcacgacgcgcgcctgatgccgccgagctatgtaaaggcctatgtccgccggcagaaaaatgacgccgctgacgccgaggcgatctgcgaggcggtgacacgcccgaccatgcggttcgtgccggtcaagagcgccgagcgccagggcgttctggtgctgcaccggacgcgagatttgctggtccgccagcgcaccatgctgatcaacgccatccgtggtcattgcgccgagttcgggatgatcgcgccgcagggcgcgtactgggcgggcgacctcgttgaacaggtccgagaggcggaagggtccgttctccccgaccttgctcgatcaacgcttctgatgctggccgaacagctcgatgcgttggcggcacaaatccacgtcctcgagcgtcagctgatggtctggcatcgccaggacgaagccagccagcgtcttgccaccatccccggcgtcggggtcattactgcaacggcgctcgctgcttcagttaccgatccaggcctgttccggtccggccgggagtttgcagccttccttgggctggtcccgcgtcagaactcctcaggcggcaaggatcgtctggggcggatatcgaagatgggcgacggctatctccggaaactgctggtggtgggcgcaacttcggtcatccgtcgcgccggcgacaacacctcggcgacgggagcctgggtgcggaccctgatggagcgcaagcccgcccgggttgtgaccgtcgccatggccaacaagactgcccgcatcgcctgggcggtgctggcgcgcggcgagacatatcgagctccagcgatgagctgatcaagatcgcagcggccaacgctgctgcttcgaactgtgagggtgcagatgagttgatgaggatccagacgcggccgcagaacaggacaacccgaggtgctgtcggagccttgagctcgataacctgagtgggacctggtcagcggactccatcagggccagcggccaacaacgccgcacaaacaggccggacagatgaccgcacccgacagatccaaaatcagcccagcttcccccttgcatcgccggggccgtccacaga

SEQ ID NO: 388 - DNA, 1539 bp, unidentified
  source 1..1539: mol_type = unassigned DNA; note = element_0118d1a
  misc_feature 1..3: note = core
  misc_feature 4..247: note = LE
  misc_feature 248..1417: note = CDS
  misc_feature 1418..1539: note = RE
  misc_feature 3..225: note = bridgeRNA
cttgtattatagagtagtagttattagagtccctctccaaggactgtatgctatactgttagagatactgtggattagtatttctttcctaccgcaagacggttactgaaaggctctaaccacagtctctttgtacagttgttaatcagttagataccgcacgacggtttatgtggaacaaggttacaatcgcaaagagcattgtggctctaagcagtatcgaaactactatgaaagaggtatcagtatgatcgttgtcggaattgatgttgcaaaggataagcatgattgttttatcatgaactcagaaggggaggttctgttcaacccctttgtcattcaaaacaaccgcgagggcttcgacagcctttatgagaagatttgctcggcgtctgatgattttacaaaagtaaaagtaggactcgaagccaccggacactacagctacaatattctgggctatctccttgataagggtttgccgacctacgttatcaatccgttacataccaatctttacagaaaaagtctaagccttagaaagacgaaaacggataaggtagacgctcataccattgcagctatgttgttgtctgacgtgaacttaaagtcctactcaaacacattataccacaacgaagagctaaagtcactaacaagatacagatttgataaagttaaggaacgcgcaaagcttaagacctctgtcgcaagattggttaacatactattccctgaacttgaaaagctggtttctacgcttcatatggcttctgtttatgagttgttgagccaatatccgtccgctaagcaaattgcttctgttcatctcaccaagctgaccaatctcctgtcaaccgcttctaaagggcgttacggcaaggaaagagcggaagaaattcgcattgctgcaaaaaactctatcggctcggatatgcctgccaagtcgttggagctcaaacacactatcaagctcatcagagagcttgatgcagagatcgaggagattgagtttcacattgagattatcatggacgaaatcaattctcccatccttaccatcccgggcatcagctaccgcatgggcgctatgattattgccgaaatcggcgactttgacaatttcaactcaccgaacaagattctcgcttatgccggactttcgccgtctacctatcaatcggggcagctaacatcttcgtgctcgcatatggagaaacacggctcccgatatttgcgttacgctcttttcaacgccacgaagtttgtttgtaattgggataatacctttgccgaatacctcgccaagaaacgcagcgaaggcaaacactacaacgtagcaatttctcatgcctgcaagaaacttgtcagggtgatctaccatctggaaaccacaggagaatcttacaggcgataaccttatttcacttgattattttttcgagcaactacgcggttgctctttttgtcgtgcctgttttctgattgttgatttttgtggaaaacttttcgtttccctattgacttttaatagttagt

SEQ ID NO: 389 - DNA, 1385 bp, unidentified
  source 1..1385: mol_type = unassigned DNA; note = element_0122ddb
  misc_feature 1: note = core
  misc_feature 2..89: note = LE
  misc_feature 90..1121: note = CDS
  misc_feature 1122..1385: note = RE
  misc_feature 1157..1380: note = bridgeRNA
caatgggatggacccctccccacacctacggcatcgaatgccagactggagctgttaagtaaccagtcacggaatgaggaggggtcgtcatgaagcttactcgcgtgggtgtggacttggccaagcaggtctttcaggtacacggtgtcgatcggacggagcgtccggcctggtgcaagcgtctgaagcgctctcgttggatcgcggaacttgagcgcgcggccgaacccggcgccgagatcggcatggaggcctgcggtagcgcgcaccactgggctcgggttctgcagggcaagggctaccgggtaaagctgatcgcgccgcagttcgtgaagccgtatgtgaagtcgaacaagaccgatgcgaacgacgccgaggcgatctgtgaggcgatgagccggccgagcatgcgcttcgtcggtgtgaagacggtcgagcagcaagatttacaggcggtacatcgcgtgcgctcgagtctgatccgcgagcggaccgcgaaggccaaccagttgcgtgggctggtctacgagtacggtctggtggcgccgcaagaacttatctcgctgcgccgagcggtgccgcaatggctggaggacgccgagaacggcttgacggcacgcttccgagcactcctggtcggcctgtatcgcgatctgcaacggttcgacgagcgagtgcgcgaactcgatcaagagatcgcggcgatcgctcgcgagcacgaggcggttggtcgcctcgaacagctgcgtggcatcggcccgctgacggcctcggcgctatacgcgctggtgggcgacgcgaggcagtatcgcaacggtcgagagatggccgtgtcactcgggctgacgccgcgccagcacagctccggcggcaaggagcgacggctcgggatcagcaagcgaggctacaagtacgtgcgcacgctgctgatccacggggcgcgctcggcgctacgagccgccccaggcaagaccgatcggctcagccgatgggtgttggcgctggccgagagatcgcacccgaacgtggcggcgaccgctctcgccaacaagatggcgcgggtcgcctgggcaatgctgcgccatggaacgaactatgaaccggagggcgtggtggcctgaggccgtgcgtcccgactgatcgaggagaacatcaccgcggttgcgagcaatccgaaggatggcgaacaggtcgaaccggcgtcggaatagcctgcaaaggtccacgggcgcgaagcccgagaaagcaatgaggagccgacgcgcgaatagcccatcgtggcccgacctcggctgatcgaggtcagacagaggccggatatacgtgagcagtcgtaccttgtcgccggagaacggagtgctagcaaagtggggagggtccatata

SEQ ID NO: 390 - DNA, 1370 bp, unidentified
  source 1..1370: mol_type = unassigned DNA; note = element_01556e5
  misc_feature 1..2: note = core
  misc_feature 3..186: note = LE
  misc_feature 187..1125: note = CDS
  misc_feature 1126..1370: note = RE
  misc_feature 1133..1357: note = bridgeRNA
cgatgggatggaaggctcccgctccgccggtgctaggatagcatcgtttaggatggacaaaccgggagcgttcgaatggaagagatttctacggtaggcatcgatatagcgaaatcggtgttctaggttcatgcgattgatgtcgatggcaatgtagttgtgcggcgacagttacgtcgccaacagatgctgaaattcttcgcgcaggttccgccttgcctcatcggtatcgaggcttgtgggaccgcccattactgggcgcgacaactttcggccctggggcatgacgtgcggctgatgccgccggcctatgtgaagccctatgtgaaaaggcagaagaatgacgccgcggacgccgaagcgatctgcgaagccgtgatgcggccgacgatgcgatttgtgccagtcaaatccgttgagcaacagtctgcagcgatgctgcaccgttcaagggccctgctcattaagcagcgcacgatgctcctgcactcgatccgagcccagcttgccgaacttggcatttcgatcggtgtgggcatcagccagatggcgcgtgtcgtgcgggaacttgcgcaaggtgagcgctcggatctgccggagcttgctcggttcgtgctggaagcgctagccaatttggtttgcgatctggcgcagcgacttcaagcgatcgaaaagaaactgatctcctggcattaccgaaacgatctgtcgaatcggctggaaaccatcccaggggtgggctttgtcacggcgtcggcactttcttcgatcgtccccgatccgcaggtttttaagtcggggaggcattttgccgcctggctcggcttggtgccgcgacagaactcatccggcggcaagacccgtctcggccgcatcagcaaacaaggaaatcgatatatccggcaattattgatactcggcgccacctcggtcttgcgttacattcgccgggatggaggcagcggtactgggtggattggcggcttgctgcgccgccggccgccaaaggtcgcagccgttgctcttgccaacaagatggcacgcattgcatggtcgatcatgaagcgaggcggcgaatacgaggaaatcaacgatctgagagcggttcagcccgtaaattgctgaggccgttcgaagtttgaggcgaaaaaggtaagtgaaggcagcaactcgatcccgatggatcagccgaacccgtttagcgtagcggacgtcaaaagtccgtctaatcgattgggggcacgatcctggcggaacccttcaaggccagcagtcggtagatgactgcatcaaaggccggacacacgactgcactcgagatgcgctgcataacgaagccaatttccctcaacgcgggagccttccacaca

SEQ ID NO: 391 - DNA, 1481 bp, unidentified
  source 1..1481: mol_type = unassigned DNA; note = element_015a4e1
  misc_feature 1..2: note = core
  misc_feature 3..51: note = LE
  misc_feature 52..1209: note = CDS
  misc_feature 1210..1481: note = RE
gaggtggcatgaaagctgctgctcccagcattgagagaacggatttctgagatgcagataatcgtgggacagtcacgttttgcgccatttggcttatctttcccgggttttgacgaactcaaggaaggagtgcaaaacgtgactgcccgttatgattatcacatcggcgtggattaccacaaaagctacagccacctggtcgtgcaggattctgccgggaagacgttacgatccgggcgggtgaaaaacgaccggcaagcgctgggttcgtttctggagcgatatcggaacaatagccatgctgtgatggaagctacccgcaactggatggtgatgtacgactggctcgacgacatttgtgaagatgtcgttctcgcccacccgttgaaggtcaaggcgatcgccgacgccaggatcaagaccgacaagatcgacgcgacggtgttggcacatctgcccagagccgatctggtgccgcaagcctgggctcctggagacagggtgcgggagttgcgcctcgcccttcgggagcggatgttctatgtgcggctgcgcacgatgaccaggaaccgggtcgtaaccgtgtttgaccgctacccggagcagacggcacagttgaagaagctgggcgatctgttcggcaagacagggcgccaacaactggttgggctgaatgtgtcggagatcgatcgcatccagatcgatcgtggacttgagttcatcggcgacatcaatgagcggatcaaacagtctgaagcgacgatccgggcgatgacgaagaccaatggcaatgtgaagcttttgaagaccatccccggtatcggggagttcttcgccaggctgatcgacgccgagatcgacgacatcagccgcttccgcaatccgaagaagctggccgcctatgccggacttgtgccctcgacctattcgtcgggcggcaagacttaccacggcaagatcatcaggcagggcaacaagtggttgcgctgggcttttgtcgaggccgttcagccggccatcgcgacagacccacagctgcgcgcccagtacgaacatctgaagttcagaggagtgaacaaggcgcgcgtcgcgatcgcgcgcaagcttttggcgatcaccttccagatcctgcgtgaccagcgcccgtacgagaggcgcagcgacaacagtgtggaaggttcatcgtcgacgaaatcccggctgtcctgatggtgttctagcgagcccggcaggtctgggctgcgctctttcaggagaatgggaagccgggaaccgaacgccactctgtgaccgaagccgacaagcaggccggcgttagggtcacgaattggagaatggttcagcaccgcaggacggcataggccccgtcctgcgaacgaagaagatttagccgatcggcagaaatgccggtctcaacaccaccgaacccaaggaaatgccacgcaaaccttgcgttttgccccttgagttctttcattgga

SEQ ID NO: 392 - DNA, 1345 bp, unidentified
  source 1..1345: mol_type = unassigned DNA; note = element_016d258
  misc_feature 1: note = core
  misc_feature 2..88: note = LE
  misc_feature 89..1081: note = CDS
  misc_feature 1082..1345: note = RE
  misc_feature 1111..1339: note = bridgeRNA
gaatgatatggactccccctgctccctcggcatcgatgtgccacattgaaggtgtcgaagtcttcaagcgaaagcaggaggagtcatcgtgaatgttacaaccatcggcatcgatctggcgaaaactgtgttcagtattcatggcaccgatcaacacggcaaggtcgtggttcgcaaacggctgaatcgccccaaattgttggcattctttgcccaactgccaccttgtctgattggcatggaagcttgctccggcgcgcactactgggcgcgtgaaatgaccaagctcggccacgatgcccgaatcatcgctccccggttcgtggcaccttatcgcaagagcagcaagaacgacgacaacgatgccgaagctatctgtgaagcggtcagccgacccaatatgcgcttcgttccaattaagaccgaggatcagcaagcgacactcagcctgcatcggattcgtcgagggctcaccaaagagcgcaccgcccaaatcaatcagattcgaggcttgctggccgagttcggattgatcattccccagggacgttacgccgcacgccgccgggttccggagatccttgaggacgccgaaaacggcctgcccatgctggcccgtcgcctactcaacaacattaaccagcgcatccttcagctggatgaggaaatcctcgcttatgaacaggcaaagcgtctgatggccatacccggcattgggcctcaaactgccaccgccttgttagccagtgcacctgatcccaggcaattcaaaagcggtcggcactttgctgcctggctcggattggtgcccagacaatactcgaccggagggaagccccgactgggcagaatcaccaagcgtggcgacaaatacctgcgaacgttgttaatccacggcacccgggcggtgattgcaacgatcgatacgaaagaagatcgactcagcgcctgggcgaaagagctcaaagagcgccggggatacaaacgggccgccgtggcaatggcagccaagaacgcccgaatcgtatgggcactactcatgaaccagacagaatttaaaacgcagcccgtggaaggctgataaccgagtaccaacgacaggcagaacacgcctgccagccgagtcttgcaacggcaagcgatgacggaacggtcagaccgagagtgagagagtctgtttatgctgacggcccttaaaggccgactaacgaatgagaccctcactcacacgcatcatcatcctggcccgggcagtaacgcccacacagaggccgaatgtagagctgcagtctcaaaccgcttcggatttaaatggcgttgcttgaccgcagggggaatccatgta

SEQ ID NO: 393 - DNA, 1238 bp, unidentified
  source 1..1238: mol_type = unassigned DNA; note = element_0172b2d
  misc_feature 1..2: note = core
  misc_feature 3..383: note = LE
  misc_feature 384..1226: note = CDS
  misc_feature 1227..1238: note = RE
  misc_feature 12..254: note = bridgeRNA
cttgtctcatgactgccccggctttttctgcgaagaaggagcctcagcacgccacgccatttatggggtgctgaggcggtggtcggatcgtaacaggcttggtcacgaaggaccgttttagagtgtgatcggccatcgtcttcgcctgaggcctgaaccactgaccggcagtcgtttgctttgcaaacgatgagaggtggatacagagcggcgttaagccctctacgacaagcataggacacgcgaggacaatgcaagataccatcggaatcgacatctcaaatgccactctcgacgcgcatcgtctgatcgataacgaagtgcggcaatttgcgaataccccagctggcttgcgggcacttcgccgctggatcggcacctaaatgcctgacctggtcatttatgaaacaaccggggcctatcacgccgccattgaacgcagctttggcggcgtcctacctctcgtgaaggtgaacccagaacaggcgcgacgctttgcgcaggcccgtgggacaagggcaaaaaccgacgccgtggatgcgcgcgttctggtcatgatgggatccgcgctcgatcttgtgccggatgcgccagcggacaaaaatcagcctgccctcaaggagatacagattgcgcgcatggctctgatcaaagagcgcacacgactcctgaaccggtccaaaacgcagaccttggccattttgaagcgccagtccaaagctcgacttggacagatcaaacgccagctcgccgaactggaaggcgcgctgctgaagctcgtgcgccagtgcccgaaacgcgcacgctccttcgacattctctgctcgatcccggggctgggtcggatcactgcagtcgcgatccttgtcgaatgtccggaaatcggaaccctgacgcgcaaacagatcgcgagccttgccggtctcgctccgatgacccgacaatcgggccaatggcgtgggacggcattcatacagggcgggcgcaagttgctgcgcgatgcgctctatatgcccgcgctcgtcgccgcccgcttcaacccggatctgagacagaaataccgagcgatgatatcggatggaaaacccgccaaagtcgctctgacagcattcgtcgggaaaacagcgccccacgctgttttccaaccctcctcattgcgaaagctcatcgaactggccaacgcactcgtccgaaaggaccgcgaatggacgccaaaaacatcttgatcaagacggata

SEQ ID NO: 394 - DNA, 1665 bp, unidentified
  source 1..1665: mol_type = unassigned DNA; note = element_0174494
  misc_feature 1..2: note = core
  misc_feature 3..493: note = LE
  misc_feature 494..1321: note = CDS
  misc_feature 1322..1665: note = RE
  misc_feature 3..226: note = bridgeRNA
ctcgtatcataaaagagtagtatttatagaccgctctccagcggaatgctacaatagttccagggtgctgtggattggtgaaaaatccctaccgtaaagacggtttattggaggctccaaccacagcttctttgttgaaatgttaatcagttagataccgccagacggtttatttagaacgaggttacaagagcaaagaagtctgtggtcctgaacagcatcgaaataaatacgccggaggtatcaaaatggtttgtgttggaattgatgttgccaaggataagcatgactgctgtattcttgattcagacggaatggttcgtgctgactgctttaccatccccaacaacatggatggatttaagcagctgcttcaaacgattcgaaactgtaccaaaaagtcagacaaaataaaagtaggacttgaggccaccggacattacagctacaacattcttggatttcttcttgacaatgacctggccgtctatgtatgaatcctttgcacaccaacctgtaccgaaaaagtctcagtcttcgcaaaaccaaaaccgatcgtgtggatgcaagaacgattgcaactatgctattgtccgatgtagacctcaagtcctacacggatacagcataccacaacgaagagctaaagtcactaacaagataccgattcgataaggttcgtgaaagagccaagctgaagcagtcagtgtccagactggtcacgattctgtttccagaactggagaagctcgttccctctctccatattgcttcggtttactcgctcctcagcgaatatcccggtgcgaagcaggtttcagaagttcatcttaccaagctgacaaaccttcttacaacagcatctaaggggcgttacggaaaagacaaagctatccagattcgagatgcagccaaaacttccattggttcagttatgcctgctaaatctctggaactgaagcataccattaaactcattaaggaactcacctccgagatcgacgaaattgaagattcgattcagcaaatcatggatgaattgcatccaccgattctttctattcccggtgtcggtatccagtcagcagccatgatccttgctgaaatcggtgatttctccaactttgaatctcctgacaaaatccttgcttacgctggctgctctccatctacataccagtcaggaaaacttacaaaactgttacgctcatatggaaaagcgtggttcacgttatttgcgatatgccctttacaacgcaaccaagtacgtttgtcattggaatcctgtctttgccaaataccttgccaaaaaacgtgctgaaggtaagcactataatgttgccctgtctcatgccacaaagaaactcgtgcggctgatctacgctttgcagaagtctggaaaagcatatcttacagctgcctgattttctccagagcctgagccaaatccaagaacaacttagctggcgcagcgaacccttgacaaaccgaagcattcaaatgctattctgtttctgcgagggttggccgggcttgctttgctattctctccgtcgccctcgctgctctgatttcagcatttgaaggctgtttgtcaggggcagcgaatggttgacggattttaggggattttttcattttggggcttgacttttaatagttagt

SEQ ID NO: 395 - DNA, 1355 bp, unidentified
  source 1..1355: mol_type = unassigned DNA; note = element_017daa5
  misc_feature 1: note = core
  misc_feature 2..74: note = LE
  misc_feature 75..1100: note = CDS
  misc_feature 1101..1355: note = RE
  misc_feature 1124..1352: note = bridgeRNA
taatgagatggtcacccccgacaccctgtgaagcttcaccttcacagggtgtttttattccggaggccatcgccatgaagccagcagcattgatcggtatcgatcttggtaaacacagtttccacctgcatgcccaggacagcagcgggcgcgaggtgtttcgcaagaagaccactcgccagcaactgatgcgtctgctcgttaatcagcccgcgtgcacggtggtgatggaggcttgtgccggctcgcactgcttggctcgggagattacggcgctggggcatgaagccaagttgatttctccgcaattcgtgcggccctttgtgcagggtaacaagaatgacttcatcgatgcgcaggcaatctgcgaagcggcttccaggccgtcgatgcgcttcgtgaccccgaagaacgaggcacagcaaaccctctcggtgctgcatcgcctacgcgagtcgctgattcgtgatcgcaccaaagccatcaatcagctgcatggttttctgctggagttcggcatcagcctaccggtgggcaaggcggtcattcggcgcttgcccagcgtgctgactgagcacgagttgcccgtacgcctgtcggcgttgctgcagcgcctgcatgaacatttcacctatctggatgagcagatcaaggcgttggataaggaagtagccagtcagctgggtgaggatgatttgggcagccgattactgacgatccccagtgtagggccgatcacggccagtgtgctggtcgcggaaatgggcgatggcaaacagtatgccagcagccgagattttgccgcttccgtcggtttggtgccgaggcagtacagcacgggtgggcgagccaacctgctgggtatcagcaagcgcggcgacaagaacctgcgccgactgctggtgcaatgcgcgcgggtctacatgttgcgtttagagcatcagcgcggcgcgttggccgattgggtgcgcagcctgctctgtcggcgccattcgaatgtggtggcctgtgcactggcaaacaagttggcgcgtatcgcctgggccatcgccacacagcacagtcgttatgaaacaggggcaggcgactacgccgcctgaccctgctgatgttgcagtactacaaaacaccctttcaggttttgcgatagctgaacaacagatgacgtgaacggcctaccggcctggtgaagaacctgacataaaaatcggcttatgaagccgccgggcttttcaggatcaccaggtgcgactctcatcgtggcgcggggcatgccccatacagacgccggatagatttaagcaagccaaacacccatcgctgatcagtattgcaaaaatgggggtgaccataga

SEQ ID NO: 396 - DNA, 1411 bp, unidentified
  source 1..1411: mol_type = unassigned DNA; note = element_017f72e
  misc_feature 1..2: note = core
  misc_feature 3..115: note = LE
  misc_feature 116..1312: note = CDS
  misc_feature 1313..1411: note = RE
cttgtataatgattttaaccataactccattatggccatgatcagggaatatcgggacactcttgtggtataatccactgtatttagcctgtatttacccttttcatactcgagtgtgctgatagagtatattgtgcttcatgcactgataataggcaagactgctgcgggtatgggcaggataactgatccggaggagtatatggaatatattggaatagatatagccaagagaaagtttgatttctgcattatagacattgtgctcaataaggtaagggccggaataatcataaccaatgatactggcttcaaagagtttttggggacaatagagggctatgacaatataaggataggaatggaatcgactaatatttaccatgccaatctatataacttcttgatagaaagcggttacaatcctgtgcttctgagcccagtagagacaaaactcatgaagaggtgcagaataagaaggaacaagacagataagatagattcatggggcatagcaagataccttgtaatatcaaaaaataatacaatcaatatggtggaataccctgagctaaaacaatatgtaagtacatacttcaggctgataaagaagccggcagcagtcaagaaccagctgatcggggatttggacctgctgtatccaagaatgtcatccatggttaacatcaatgcaatgcacttcaatgatataatcaacaatattgacagcattgcagataacaattatagagtcaaatatttgaacagtgaaaaatatgaaatcctgaaatctcttataatcatgggaaatagaaacagcagcgcagtgaaccatgacataagaatgaatatccagttaatggaattgctgaataaccagctgaaggaaaccatggaattaatagggaaacagtacagcaacgcagattccgggattaaaacaatcccaggaataggaacattgacaggatctattatattatcccacataggagatatcaacagatttgattctgcagtaaagtttagggcatacgtgggcatggatcctgtaaccaaacagtcaggaggttacagcatatcatcccacatatcaaaaagcggcaatccattgatgaggtatacactggagctatcaacagtatctgcaataaggtataatccggttgtgaaaagatactacagccataaaaaggagcagggaatgaatggaaacaagctaatgataacatgtgcaaacaaattactgaatatcttatactcttttatgaagaacaatatggatttcaaggatccagaattagtagattgaggaagagtagaatataatattcgtatattgtaatgatattagcgtaagctatggtaatggtgcacgataaacagaaaatagtaaaattaatatggtata

SEQ ID NO: 397 - DNA, 1362 bp, unidentified
  source 1..1362: mol_type = unassigned DNA; note = element_0182188
  misc_feature 1..2: note = core
  misc_feature 3..75: note = LE
  misc_feature 76..1104: note = CDS
  misc_feature 1105..1362: note = RE
  misc_feature 1109..1351: note = bridgeRNA
ttatggaatggcccgcccctcctgcccggcgcatcatgcggcccgggccaacttgagaggtgaggagttcccattatgcagatcgcagtgctcggtatcgatcttggcaagaacagctgcagcgtcgtcggcttggacagcacaggccacgtcgtcctgcggcggcggctgcagcgtggcggcgtgaccaagctcacggcaggactgccagcgtgcgtcatcgccatggaggcttgctgtggtgcgcatcatctcggccgcctgcttgagcaacagggtcaccgcgtccgcctcatgtcgccagagtacgtccgcccttacgtcaaggcgcacaagaatgacgatcgagatgccgaagcgattgccgaggctgcaacgcgcccaacaatgcgtttcgtggaattgaaaagcgaaacgcaactcgacattcagagcctccatcgggcccgggatcgactggtggggcagcgcaccgcgcttatcaatcagatccgcggcgtgctgatggagcgcggcattgttgttccgcagggacgccgcaagctcgagacgcaccttgaggccttgatgaccgagcgaacggtggcgctcaccgtgcggatctgcttgctcatggtggacctgtgcgccgagtggcgggacatcgaccgccggattgccgccttcgatgacgaatttgcattgttggcgcgtaccgatgagagcgcgcgtcgcctgacgacgatccccgggatcggtgtactcaacgctactgcgctgacggcggccgtcggaaatgcgcagacctttcgacgcggacgggatctggcggcctggctggggctcgtgcccagacaaatgacgaccggcggcaagccgcgtctcgcaggcatcagcaagaggggcaacaagtatctgcggaaattgctcatacacggggcccgcgccgctctcccctcgctcgccaaaagcgatacggcgcttggcgtctggctgcgcggactcctcgtgcgagctcacgtgaatacggtcgttgtcgccctggcggccaagcttgcccggattgtctgggcggtgctccgacacggaggaaggttcgacttgaagccgatgccgacgtcataacctggagatcgacctgtcgcgctaccgcggcgcgatcggtccgggatgtctgcgggcggtggaagtgagatggcctaacagtcgatcggcgttccgaaatcctgatcaaaaagatggcgccagacgccgacacgcttatgaggatcggaacgcgcggatctccatcttggcgggggctcagcctccagaccggatacgttggtgcagactgctacgccacaatgctgaaatcgcttgccgacggggcgggccatacgt

SEQ ID NO: 398 - DNA, 1350 bp, unidentified
  source 1..1350: mol_type = unassigned DNA; note = element_01874bf
  misc_feature 1..4: note = core
  misc_feature 5..339: note = LE
  misc_feature 340..1335: note = CDS
  misc_feature 1336..1350: note = RE
  misc_feature 196..352: note = bridgeRNA
cttgtatgttctttgtacgttccttcacggcggaactcatgttgaaccatagtagtggggcgcagtggagcttgtgggtgaaggctggcgcggtgggcaacggcgcagccgttgtccacggcaagcctgccggtgcggcgtcagccgcatcgtccacaaatccacggcgcagcacccgttggttggcatgtcggtcaggagtttcgcgagtgtgtgcacagcccgttcttcccttgagccccgagctcgtccccaagcagttgggcgtgcacgcactggcgttcgttgccaagcccgaacagttacctgaacgcacttcgcatcttgcaaggatgggatatgacgaacgctgctcgtgaagccactgccgatgcgcggcccctggactacatcggcgtcgacatggccaaggcccgcttcgagtggggcgtgcatgggacgcgccccagtcatagcgcgaccaacgatgcggccggcttcgagagcttgctggcagacctgcgcgggcgccacgtgggcctgatcgtcatcgaggccaccggcggcctggagcacgcgctggccagcctgctgctgcaactcggcttgcccgtggcggtggtcaacccgcgcgctgctcgcgagttcgcgcgcagcatgggccatctggccaagaccgatgccatcgacgcgctggcgctggcccactacgcgcacaccctggctcacaaggccaatcaagccggcgtgcgcctggcgccggtgcccgcgcagctggaggcgctgcaactcatggtgctgcgtcgcaagcagctcaccgatatgcgcacggccgagatcaaccggcgtggtggggcgatgcgcgtgctgcgccagagcatcgacgcggtgatcaagactctgaacgagcagctcgacgccctggacaaggacatcggagcgcatctggatgaacacttcaaggaactcgatcagcgcttcgagagcatcaagggcgttggcccgaatacctgtgcggccgtgatcgccttcatgcccgaactcggccagatcagcaacgcgcgagcggccaagctggccggcctggcgccgctgaacaacgactcgggcaactggcacggcaagcgcagcatctggggcgggcgcaagctcgtgcgttgcgccctgtacatggccacgctcagcgccgtgcgtttcaacccggtcatcaaggtcttctatcaacggctgctggccgcaggcaaacccaagaaggccgccttgatcgcttgctcgcacaagctgctccgcatcctcaatgccatggcccgcagcggccaggcttggaatcaagagcttcatggcctcagcgcttgactttgaacacagttg

SEQ ID NO: 399 - DNA, 1220 bp, unidentified
  source 1..1220: mol_type = unassigned DNA; note = element_018b4fd
  misc_feature 1..2: note = core
  misc_feature 3..221: note = LE
  misc_feature 222..1205: note = CDS
  misc_feature 1206..1220: note = RE
  misc_feature 12..199: note = bridgeRNA
cttgtatcttgtttcctgtggtggttaagcttccaccatacgaggcggagtgagcttgtggcgctcctgaagggtaaaccttggtttgtagataaggccctccgcctcaccttccgccggacaccacactggacggtagccaagggcctgaaactcagtgaccctgcatggacaaggcgagtgggcgtgaatggcatcgtgagttgcaaggaggatttgccatgatgtatctgggtatcgatatttccaaggccaagctggattgcaccctgctcgatccagcaaccgacaagcgcaagaccaaggcggtcagcaacgacctgaagggattcgaagccctgtcggcgtggctcgacaagcaaggcactgctccaggcgacgtgcatggcgtgatggaagccaccggggtgtatcacgagcaggcggcgctgtggctgaccgacgccggggtgcggttgtcggtggtcaatcccgcccaggtcagggactttgctcgcggcctggcgatgcgcaccaagaccgatggaacggacagcgtggccctggcccgttatggcgcattgatccagccggaaccctgggaagccccgccgctggaaatccgcgaactgaaggccctgatcacccggctggaagcgctggaaaccgatgcgcgccgcgaactgaaccggcgcgagaaggcgctcgtcgcccaggcacccgccctggttcgggagtcgctggacaatcacctggccgcgttgaagcaggaaatcgcccggctgcagcaggcgatcaacgaccacatcaaccgccatccaggattgaaagctgaccgcgagcgcctgctgtcgattccggcagtgggcgacaagacggccaaccggatgctggcagtgctgcacagccggaagttcaggagtgccgatcaggtggcggcgtttctggggctggttccggtcgagcatcaatccgggagcagcgtccagaaacggccgcggctggcgaagaacggtgatgccaggacgcgcgccgtgctttacatggcggccatcgtggcggcccagtacaacccgcacgtcaaggcgctctacacatggctgtgcgcgaagggaaaaaccaagatggccgcgctgggcgcggcaatgcgcaagctcgtgcatctgtgcttcggggtggttaagcatcagactttttatcaagccgattggcagccaggaggttgactggagagacggtat

SEQ ID NO: 400 - DNA, 1566 bp, unidentified
  source 1..1566: mol_type = unassigned DNA; note = element_019213e
  misc_feature 1..2: note = core
  misc_feature 3..270: note = LE
  misc_feature 271..1449: note = CDS
  misc_feature 1450..1566: note = RE
  misc_feature 3..247: note = bridgeRNA
cttgtataatgaactcatagggaaattcactacatattttcctttctcgattattttctatataatcagttgtagacgctgtggattagtaaaatcacctacggcagcttccctataagctgactgtttcctttggaggctctaaccacagctctatgtttatttgttaattagttagataacgcatgacgttttatatatagcaaggatacattcagcatagagtttgcggaaacacagcgtaaatttattacaaaggagtgattctttatgttatttgttggcattgatgtagccaaatctaaacatgactgctgtatcattgattctgatggtgttatcattacggattcccttcgtatttcaaatacaaaagaaggtttcgatacactttatacctcaatcatatctgcgcttgattcaagtgatttttcaaacgtaaaaataggacttgaatcgacaggtcattacagcacaaacattacaaactatctgtattccaaaggctttagtattaccgtactgaaccctttagtgacaaatgcttttcgtaaggctggaacccttagaaaaaccaaaacagataagtgtgacgcaaaagtcattgcaactatgctcttttctgatgaatcaaaatcctattcaccttcatcatatcaaatccaagagctaaagtcactaacaagacatcgttatcgtatgattggttatcgttccaagctcaagctatctgtcacacgactaatcgatatcattttccctgaactacctgattttgtatggtctatacaccaagcttcctgttatcagttattacttggattgccatctccagaagtaatcagcacgtgtcatttaacacatttaataaatgttctttcaaaagcttcacgtggaaaatatggtcgtgaaaaagcacttcaacttcgagagcttgctgctaattcaatcggatcatccaacagatctttaacatttgaattacaacaaacaattcgattgattcaagcggttcaatctgaaattgacacgttggataaacaaatcaaacttgtcgtagatgagttaaatactccgcttataaccattcctggtattggatataccattgctgccatcattcttgctgaaatcggtgatataaacaacttctcatcacctgcaaaacttttagcatttgcaggaatggaaccttctacttaccaatctggaaaatacaatgcatccaaaacacctatggttaagagaggctctacatatttgcgttgggcaataatgcaagctgcccgtttggtttctatgcgagattccacttttgccacttacatggccaagaagcgatctgaaggtaaacactttaatgtcgcacaaagtcacgtaggcaagaaattaatccgcgtaatctattcactattgaaaaataacacagcatttgtcccacaaatgtaaccaataaatatcctttttttgaaggcaactcacgttgccttatttgtcatacacttttttatctataagaaaaactataaaatgttatcaatttttacttgacttcatatagttagt

SEQ ID NO: 401 - DNA, 1168 bp, unidentified
  source 1..1168: mol_type = unassigned DNA; note = element_0197a09
  misc_feature 1..2: note = core
  misc_feature 3..160: note = LE
  misc_feature 161..1162: note = CDS
  misc_feature 1163..1168: note = RE
  misc_feature 3..194: note = bridgeRNA
cttgtattgatgcgaatcactagtgtggcggtgtttcatgaggatcggcccggcccgggtggccacccgggccggctcgccggtcgtcggatcgccgcctccagagccctgaggggctgttcctgagcaagatcgcggccggctcttcatcgaggcccggatggttgaaggaaccaagggttcgcatcacaaggaagggtcgacgaagatgagcagacataccatgatctgtgccggtattgataccggcaaatgcaaactcgatgtggctctcgatcaaagccccgatcggctgcaggtcgacaacgatggtgaaggacatgccgagctggtgacgtggttgcgcaagcgccgcgtcgaacggatcggcatcgaggcgagtggtggctacgaacaggccgtcgtgtccgcgcttcgccgcaacggcttcgtggtcatcgtgtttcagcccgcccaagtacgcgcctatgccaaatatcggctgcagcgcgccaagaacgacaagatcgatgccgcgttgattgccacctgcacggcggaggctaagaagatctatcctcctccggacccgcgcctggcgccctttgccgagcttctcaccatcatcgagcagcttaccgatgacgttgcccgctacaagacgcggcgcgagatgtcccgtgatgaggaagcccggcgtttctggactgaggagatcgcccgcctcaaacggctggtgagccagcggctcaagcagctggttacagccatccgccaacaccgcgatctcgcacaccgcctcgacttgatcgccagcgtcgaaggtgtcggcctgcgaacggccgtcgccatcctggtgcgaatgcccgagatcggccggatcacccgcgggcaggcggctgccctcgtcggggtggctccctacgacgcggacagcggcgggcacgtgggatcgcgtcatgtcgaaggcggccgcgagaggttgcgcgaaagcctctacacggctgccctgccggcggccttccactggaaccccgaactcatcgcgatctaccgccgcctcagggccgctggaaagccgcacaagcttgccctcatcgcctgcacgcgcaagctcattatcttcgtcaacactgtcgtcgcccgagacgccacctgggtccctcgagtagccatcacttaatggttg

SEQ ID NO: 402 - DNA, 1424 bp, unidentified
  source 1..1424: mol_type = unassigned DNA; note = element_019aaee
  misc_feature 1..4: note = core
  misc_feature 5..207: note = LE
  misc_feature 208..1410: note = CDS
  misc_feature 1411..1424: note = RE
  misc_feature 1..200: note = bridgeRNA
ctccgtaagttgttaggtggcccgggagggccggatgtggcttatggggtcttgtcttcagtggcttcccaggagtggccgtccggctctccggggcgccctggctgctgattgagatgtgcgcgcttcgtacggtcgctgattgcggagatgacagcggggtgttcctcgggccgacggctgttggtgcggaacgaggaggggcgaatgagggagcggaaggcccgggtctggaccggtatcgatgccggtaaaggccaccactgggcggctgtggtcgatgagaccggggcaacgctgtggtctaggaaggtcgataacgacgaggcggcgatcttgaccgcactcggtgaaatcctcgacctggcggacgaggtccgttgggcggtggacatctccggcacatcgtccgcgctgctgcttgccctgctcgcggcgcacggccagcgggccgtctacgtgcccggccgcacggtcaaccgcatgtcgggtgcctaccggggcgaggcgaagaacgatgcccgcgacgcctacgtcatcgccgagaccgcccgccaccgcaacgacttcgccgccatcgacgtgcccgcccaactcgccgccgacctggccctcctgactggccaccgctcggacctggtggccgaccgcacgaggatgatcaaccgactgcgcgacgtactgaccgggatcttccccgccctggagcgtgccttcgactacagctcgcagaagggcgcactggtcttgttgacgggctgccagaccccgggcgcaatccgccgccgcggccgggcacgcctcacggcctggctggccaaccgcagcgtgcgaagtgcggacagcgtcgccgcgaccgcattgagggcggcccgggcccagcaggctgcgctgcccggtgaggagatcgccgcacagatcgtggccgacctggctggacagatcctggccctggacgaccggctgaagcggatcgacaagcagatccgcgagacgttctgcagccatccgcaagccgagatcatcgagtccatgcccggcatgggcccgacactcggcgccgagttcgtcgtcgccgccggcgacctgtccgcgtacgtcgatgcaggccatctggcctcggcggcagggctcgtgcccgtgccgcgtgactccggccgccggaccggcaacctccaccggcccaagcgttacagccgccgtctgcgacgggtgttctacctgtccgcgcagaccagcatcatccgcgacgggccgaaccgggacttctacctcaagaagcgcggcgagggctgcaaacacgtccaggccgtcatcgctctcgcccgtcgacgggccagcgttctgtgggcgctgctgcgtgacggacgagtcttcacctccgctccgccggtcacgcaggcggcttgacttcgtcattgaga

SEQ ID NO: 403 - DNA, 1367 bp, unidentified
  source 1..1367: mol_type = unassigned DNA; note = element_01a9c4f
  misc_feature 1: note = core
  misc_feature 2..76: note = LE
  misc_feature 77..1108: note = CDS
  misc_feature 1109..1367: note = RE
  misc_feature 1138..1358: note = bridgeRNA
tactgagatggtccgccgcttgaactccactagggcgtggaggatcttgtaggcaggttcaaggaggatcatcgacatgcagattcgttcagtagggattgatctcggcaagacgacctttcacttggtagcccttgatgataacggcaaggtgctcctgaagaagaagtttacgcagaagcagctgatcgtattcacagcgaacatgcagagctcgttgatcgggatggaggcgtgcgcaggagcacacttcctgggccgtgctttgcgagcccaagggcacgacgtcaagcttatccccgctcagtttgtgaagcccttcgtgaagtcgaacaagaacgatttcattgacgcagaagcgatcgccgaagccgtgggtcgtcagaacatgcggtttgtttctatcaagaccgatgatcagctggatctgcaggcgttgcatcgcgtccgggaacgagtgatgcagcggagaaccgctgtgatcaaccagattcgcgcattccttctggagcgaggcatggtgtttgctaagagcccgattcgcctcagagaagcgataccaagcgtgctcgagaacgtggaggagaacctgactccaaggatgcgcaacctgatagcgatgatgtggagcgagtggaaggagctggaacttcagcttgaagagatgaacgcggaagtcgagcggattgcctccagcgatgccgcatgccagagactgcgacagattccgggcatcggacctctggtggcaaccgcgatcgtagcttcgatcggcaacggttcggccttccggaagggacgagagttcgccgcctggatgggactggtacccagacagcattcaacaggaggcaaggcacggctctatggcatcagtaagcggggcaaccgttatctacggatgattctggttcacggagcccgtgccgttgtcctgcgatccaagcgagatcgtatcgcaatgggtgcatggctaacttcactcgagggcagagccccgcgcaacgtgttgatcgtcgccatggccaacaagctggctcgcatcgcatgggctgtgctctcgactggccaggactatcgggtcgtgcccgccgaaactgctgcctaggccagcgaaacataaccggttccaagccctctcaccaaggtctgcacggacgagtgaagatgaaagaacagtcataacggcgtctctgaaacctgtttgctcaaaaggccctcgcggccgaggggtttcaaaggacagacacgcggcgtatctcatcatgtgccaggagatcttattctccacaaacaggccggatacattaacgcagactctcttcatccaaccacttttctcttgcagtcagacggcggaccataca

SEQ ID NO: 404 - DNA, 1482 bp, unidentified
  source 1..1482: mol_type = unassigned DNA; note = element_01ad162
  misc_feature 1: note = core
  misc_feature 2..85: note = LE
  misc_feature 86..1126: note = CDS
  misc_feature 1127..1482: note = RE
  misc_feature 1244..1477: note = bridgeRNA
taatgaaatggacgccccctcccaaacggcatcgtgatgtgccaaagtagagtttcgacaaactacttaacagaagggaagcgtcatggaaaagattaccgtaattgggctggatttggcaaagagtatttttcaagttcatggtgccaatgcccgaggcaagaagctgctgtcgaagaaactcaagcgtagcgaagtcatgggattctttgcatcacagccaccgtgcctggtagggatggaagcctgcggaggagctcacgaatgggcgcggcagatccagtcacttgggcatgatgtcaaactgatggcaccccagtacgtcaaaggctttgtacaaggaaacaagaccgatgccagagatgccgcaggtatcgcagaagcagcagtaagagaaagtatccagagagtgacgatacgcagccgtgaagaacaacagatacaagccctgcacagagtaagagaagcctgggtcaaacaccgtactgcgaccgccaaccagatacggggcctgctcgctgagtttggtcagatactcactcccggcctgcgccacctgcgccgtgaagtcgccctctggcaagagcaaagccgcggcatgctcggcatactcaacggcctggtcgatgagttactgcagtatctcagtgagttagaagaaagaattggtcaagtagagaaacagatcaaacaagtactgcaaagcaatcccgcctgcaaactgatagaaaccatccccggcgtaggcgtcctcaccgccaccgccatcatcggcagctttggacgggcagagaactttacagaaggacgcaagtttgccaatgccctggggctgataccgagggaacacagcagtggtggcaaacaagttctgctggggctcagcaagcgaggcaatggttatgtacgcaaactcctcgtccatggggccaggtccgtcttgcaggccaggatcaacaaaccggcctatgccgaagactgggtcgtaaaactggccaaaaggcggggacacaacatcgccgtgtgcgctctggcagccaagaatgccaggaggatctgggcgatgctgcagagcggagaagtattccgtgctgatcatgcgcagaccaacgacgtctgcacatgatcagcacggtttgaaagaacagtagcaaccacaaagcaggggcgaggcaggaagccaggtgaagtaaaaacgtcatgcagtagcaggaaaaatagcagcaaagacaaagaaacggagcacaccaccgattgtttgggcaaactcaaatgaagacaggacaggtcagaccgggatggtcaatagctcgttcggcgcactgtgcgatcagcacgatagggtgattgagcgaccatcagcgtatttcatcatgcgtcagcagtcatcaagcggctgcaataaagaccgaatgtatggctgcaatcgactatgtcaggtttaatttgaaaatgctcttgcaaatggggggcgtccatgta

SEQ ID NO: 405 - DNA, 1382 bp, unidentified
  source 1..1382: mol_type = unassigned DNA; note = element_01c3370
  misc_feature 1..2: note = core
  misc_feature 3..110: note = LE
  misc_feature 111..1136: note = CDS
  misc_feature 1137..1382: note = RE
  misc_feature 1148..1377: note = bridgeRNA
agatggtgtaacggcccggtcgccacagtcctgtgaagggcggtggcctgccggtatgatggtttacggcgtcagcatttgggcagcgccaagcatcgtaggaggccaccatgttgtactatacgggtatcgacgtttccttggaagcctcgcatctttgcgtggttgatgaagcaggggttgtggtgaaggaagccaagattgccagcgagccagatgcgctggtggcgtggttttcgacgcttggccttgcggtgaagcggattggacttgaagccggtcccttatcacagtggctttatgcggggttgcgaacggcggggttggatgtgttgcttcttgagactcggcatgtccgtgatgcctttcgttcgatgccggtgaagacggatcgcaaggatgcccgcgggattgcgcagttgatgcgcctgggctggtaccggcaggtgcactgcaaatcggaggatgcgcaggatacccgcacgcttcttgcggctcgtaaggtgcttcagagcaagtggcatgctcttgagatgagcctgcgtggccttttgcgcggctacggtctgaaggtgggggagacgacccgcaagactttcgaaccaagggtacgtggactggcggcgggtgtaccgggcctggcggaagtggcggacgcgcttctcaaagcccgcgccgttgtgttcgaccagttccgcgtccttgaggcgcgcgttattttgcgcgctcgcaaggacgaacgtgcgggtttgttgatgacggttcccggtgtggggcccgtgatcgcgctcacctttgtttcggggattgacgatccgggacgcttccgatcatcgcgaaccgtcggcgcgcattttgggctgacccagcgcaaataccaatcgggcgagaccgacatcaccggccggatctctaaatgcggggatcaggaggttcgtaccgccctatacgaagcggcaaacgttattctgaccaggccagtgaaaggctctcggctcaagagctgggcggcacgggtcgcacaacgatcgggaatgaagaaagccaaggtcgccctggcacgcaaactgtcggccgtcatgcatcggatgcttgtcgatggtacatgctttgaccatgctcttgctgcggcataaggcggtctagggctttcgggcaggtaaccaccacgcccgatggcaaggtcccgtcgccgggacgcacggatcaagtcaggccggagccgtcggtgcagccctctggtgactgcgcttactgagattggtcggcttggttcgttaggacatccatcatgtagcgccctggcggcgactacgtacagaagcatgaagccggcgatgagactaagttttatcgggagttgacagatggtccgttacaga

SEQ ID NO: 406 - DNA, 1470 bp, unidentified
  source 1..1470: mol_type = unassigned DNA; note = element_01cfb4a
  misc_feature 1: note = core
  misc_feature 2..358: note = LE
  misc_feature 359..1168: note = CDS
  misc_feature 1169..1470: note = RE
  misc_feature 1212..1412: note = bridgeRNA
gaatacgaagggacttcccgcaatcctgaacggcgtcgaggcgccaagattgagtgtcgaagtcgatctgcaacgggaaaggggaagtccatgagcgaggttacacgaggcctcatcgcgcgggtaggggttgacctggccaagcgcgttatccaggttcatgcggtcgatgctgctgggcgagtcgttgtcacgaaggcgttgccgcgtgacggcttcatgccttggtgtgcgcagttgccaccgggaacgctgatcgcaatggaagcctgcagcggcgcccaccattggacgcgcaagttgagggcgctgggtctcgacgcgcggatgatggcggcccatttcgtgacgccgtaccgtgcagggcaagggcggcaagaacgacgccaacgacgcggccgcggtctgcgaagcggcctcgcggccgtcgatgcgctttgttccgctcaagacgccggcgcaacaggccatgctcgccattcaccggctgcgcgaggggtacaaggaggagcgcaccgcctgcatcaaccgtattcgagggctgctcactgaatttggcctggtcttcgcccagcgccccgaggtgctgcgccgagatctgtcggacgtgcttgaagatgcaaccaacgaaataccggcgttgttgcgcatggcgctgcgacaggcccacctgcactggctcgagctcgaatgccatatggcgtggtgcgacgagcgcatcgaggcgcacgttcgcgccgacgaacaggccaaggcggccgcgcagctgtgcggcgtcggcccggtgacggcctcggcgctggtagcaatggtcggtgacttcaagcagttcagatcgggcaacccgttcggcgcctggttggggttcgtgcccaggcagaactccagcggcggcaaggccagtctcggtcagatcaggaacggaggcgacggctacctgcgcacacggctgatccagggcgccaaggcggccatggtgcacgccaagaagcgcagcgaccgcatctcgctatggatggtgagcctgatcgatcgaatcggctggcagaaggccgtggttgccatggccaacaagaacgcccggatcttgtgggcggttttgacaaagggcacggcctacgatcccaaccacgtgccgatcaacccaggattgcccgcgatcgcctgaagacctgcgagcagccgtcgagatcatcaaagaatcgttccgcgcagacgtgcgttcgaagatgcaccccacaggtcagaccggcagcaggtgaactcgggccggtttcagccgcgccacgatggcgacgacgatacccgaatggaatcctgctgagcggtttgtatctgggcccgcaccgttgagtgcaacaaggccgcctgtagatgtgcagtctgttctgtgtggcgttgcctctccggcacgcaggtcatgcgaggaagaaggaatacctgctattgaacaaacgggaagtccctgta

SEQ ID NO: 407 - DNA, 1200 bp, unidentified
  source 1..1200: mol_type = unassigned DNA; note = element_01d09e5
  misc_feature 1: note = core
  misc_feature 2..209: note = LE
  misc_feature 210..1175: note = CDS
  misc_feature 1176..1200: note = RE
  misc_feature 34..201: note = bridgeRNA
tcttaagtttgatttcctaactttaagatattaataggaaagaacaaaagagaggagtaaggttataaaacccgtgggaacttgagattccgtaaatattgataatcccctcttttttctacttcaatttcgtttagttctatgagacctggatctcgtttttaagtcgatgaaaaccaaagtagttgtcctttctcaatcatttttctatgaataaaaataatgaaatttatggagtggacatcagtaaaggagtatttgatgtggccaactcaaaagggaagcattttcagtttaaaaattgtggttcgggctttaaaggctttttaaagattttaagtaaagaagacctggtagttatggaagctacaggatattaccactatagattagcacagtttctttacgaacaagaaataaaggtctcggtagtaaatcctttatcggtgaagcgttttatacaaatgaagctctctaaggttaaaaccgataagtctgatgccaaatcgatatgtgaatatgcaagcgtcaatgaagttccattatacacggcaagagacaagagccaggctgaagccctccagttacttcgtttaatagatatttataccaaacagagtactgcgctgaagaataaaattcatggtgagaaggtactcggaaaaccctccaaagtcgtttatcattcgctaaaccgatcgcttaaaatgctacaaaaggagcttaaaactcttgaggatcgcttatgtgagatagttaaagaggagcaacaaaagatgcttacacttctaaaaagtattccaggaatcggcaacaaaacaggtattatgttattagtattaaccaatggttttaccaattttgaaaatgggaatcagttatgtagctatgctggaattactccaattattcgtcaatcaggatccactgtccggggcaaaagtagaatcagtaaaatgggtaatccaaaacttagaaacttactgttcatgtgtagttttaccgcctgtaaacataataaggcctgcagggatatctatgaacgaataatcgccaagggtaaaagtaagaagctcgcgctaattgccgtatgcaataaactgctaaaacaggcttttgcagtagctacatcaggtttaccatacgatgaaaattatgtgccaaaattgggataaaatgcttggaaattagcttagttct

SEQ ID NO: 408 - DNA, 1367 bp, unidentified
  source 1..1367: mol_type = unassigned DNA; note = element_01d39a7
  misc_feature 1: note = core
  misc_feature 2..67: note = LE
  misc_feature 68..889: note = CDS
  misc_feature 890..1367: note = RE
  misc_feature 1120..1362: note = bridgeRNA
caatggtatggaccccgccacccgcgggcggcaactgttgcaagactgcaaagcaaggagacatatcatggaaattgcacgtatcggtttggatttagcaaaaaacatctttgaggttcacggagtggacgctcaggacaaagcggttctgaagaagacactgagacgcgaggcggtcacccctttctttgccaatttatcgccctgcattgttggaatggaggcgtccagtggatcgcattactgggcaaaggtcttcacagatcttggccacgaagttcgcctcatctcaccacaatttgcaacgccctatgtcaaatccaataagaacgatcggaatgatgccgaggcgatatgcgaagccatcagtagaccgtcaatgcgctttgttccgcccaagtcttcagaacaactcgagatccaggccgtccaccgcatccgtcagaggctggttgctaaccgaaccagactggtgaaccagatccggggtctgttggctgagcatggtttggtcgttgcccgcgatatctcaaggatcaggcgtgcattagtgcagatagcagacggcgtggatcacaatctgggggaaatgtttgtcgaactggttcgcgacgtgcgtgaagaacttcgagagttggatgagcgtgtcgtggcctacacaaagcgcatccgagatttgttccgatctaatgagatgtgcagacgcatcggcaagatcgaagggattgggccaataacggctacagcgcttgttgctgcagtcggtgaccgaacatgcttcaagaatggaaggcaatttgcagcctggctcggacttgtccctaaacaaagatccagcggtgggaactctcgcctctttgggattagcaaacgaggagatcggtattgacgaaccctgttgattcatggttctcgtgcagttctgcgtaaggcgggcggcaaaacggatggcaggagcctgtggatagaacggatgcgtgatcggcggcacccgaatatcgtcgcggtcgcgctggcaaataaaaatgccaggatcgtttgggccgtcttgtcgggtcggtctgagtaccaaccacatctttccgtttagaacgcaccggggatatcaagacttaggattataagaatattgcagcaacttggcatgggatggtgataacaacacgaaccgttgcttcttgaacctggtgtgtggatcggcacggtaaagctgatgccttggagccaatgagggagaagcgagcggaaatccatcggggctcgcggtgacaatatattgggccgctcgcagaagccggatatacgtcagcaatcgtgttcctgaaccaacccaatcaagtccgttgcaattaggtggggtccatata

SEQ ID NO: 409 - DNA, 1377 bp, unidentified
  source 1..1377: mol_type = unassigned DNA; note = element_01d8bc3
  misc_feature 1..2: note = core
  misc_feature 3..85: note = LE
  misc_feature 86..1117: note = CDS
  misc_feature 1118..1377: note = RE
  misc_feature 1148..1365: note = bridgeRNA
tgatgctgtggacggctccgccaccggcacatgagtgccacggaagtgggtgctgtttagggccccacgattcggaggagccaacatgcaagcgattacgaccgtcggcctcgacatcgccaagtcggtgtttcaggtccacgccatcgacgcgcaaggcaatatgatcgtacgtcgtcagttgaggcgacgtggcgtcctggcgttctttgagaagttgccgccatgcctgattggcatcgaggcttgcgcatcgtcgcatcattggtcgcgcgagctccaggggcttggccacacggtgcgcctaatgccgccggcctatgtgaagccctacgtcaagcggcagaagaacgatctcgctgacgccgaggcaatttgcgaggcggtcacccggccgacaatgaggttcgtggcgaccaagacgcccgagcagcagagctgtctcatgctgcatcgcacgcgccatctcttcatccgccagcagaccgctgtgatcaacgcgatccgcgcgcaccttgccgagtttggcatcgttgcgccggttgggcgcaagggcgtcgagcaactgctcgatgtcgtcggcgattcaaatgacaaacggctgcccgagattgctcgcctgtgtgtcgccgctcttggtgctcagctgcgggtcctgaaggcacagatcctcgagttcgaccggcagatcatggcctggcaccggtccaacgcgaccagcaagcggctcgacgcgatccccggcgtcggtccagcgctcgccacggctctggtcgccagcgtcgccgatccgaaggctttccgatcaggccgcaacttctcggcctgggtcgggctggtgccgaagcaaaactcgagcgggggcaaagagaggctcgggagtatcaacaaacaaggcgatcgctatctgcgcggcctgttcacggccggcgcgctcgccgtcatccgttacgccaagatttatggcaccaggcatcgaccctggcttacagccttgctaacgcggcggccaaccaaggttgccgccatcgcactcgccaacaagatcgcaagaatggcgtgggccatgctggcgcgcggcgaacgctacaaggaacctatcgcgcttaccgcctgaacgagatcacgccggccatccggcgtgatgtgaaggttgggaggtcgaacagcacgtaatgcagtgccggtcgatccggcgatcaggacaacccacatgtgccagtgcattgtcgaatgcgggcttttgaccgggacctgatccgcggagggcattatggccagcggtcatggaaccgcgcaaacaggccgaacacatggctgcaccgaccaagcctgcgacgtgaagattctacttgccaacctggagccgtccacaca

SEQ ID NO: 410 - DNA, 1547 bp, unidentified
  source 1..1547: mol_type = unassigned DNA; note = element_01de067
  misc_feature 1..2: note = core
  misc_feature 3..241: note = LE
  misc_feature 242..1423: note = CDS
  misc_feature 1424..1547: note = RE
  misc_feature 3..219: note = bridgeRNA
cttgtattatagagtagtagtttttagagcccctctccaagggcttgtgctacactgtaatggatgctgtagattggtttcatcctcctaccgcaagacggttcttgaaaggctccaaccacagccctttacagtattgttaatcagttagataccgccagacggtttatgtggaacaaggttacaagagtaaagtgttctgtggaaccagcatcaaacaaacataccgggaggtatcattatgatttgcgtgggtatcgatgttgcaaaggataagcatgactgcttcatcttcaactcagaaggtgaaattctggcagatgtattcaccattcccaacaacgcagagggttttgacgcccttttgcaaaccattcgccattgtgccaaaccagcagacaaaataaaagtaggacttgaggcaaccggacattatagctacaacattctcggatttttgcttgacaaaggtctccccacctatgtcatcaatccgctgcacaccagcctttaccgaaagagcctgagtcttcgcaaaacgaagacagaccgtgtcgatgcgcgaaccattgcaactatgctcttgtctgatgtggatctcaagccctacacagacacagcataccacaatgaagaactaaagtcactgaccagatacagatttgacaaggtcaaggagcgagccaagctgaagcagtcagtttcccgccttgttaccatcctgtttcctgaactggaaaagatggttccaacgcttcatgcagcttctgtttatgcttttctcagcgagtttcccggtgccaaacaggccgccagagctcatctgacgcgcttgacgaatttgcttcacgtcgcctccaaaggtcgctacgggcgaaatatggcaatggggcttcgggatgctgccagatgttctgtcggctctgttatgcccgctaagtcccttgagttgcagcatacgattcgtctgattcgggaactggatgatgaaatcgaggatatcgaatccgccatccaggccatgatggaagatatacaatctcccattacaaccatcccgggaatcggtgtgcgcatgggtgctatgattctggctgaaatcggcgatttctcgcgtttcgactcaccggataagatcctcgcctatgccggtatgtcaccgtctacctaccagtctgggcagctttcgttgtctggagcgtactcacatatggagaagcgaggttccaaatacctgcgctacgcgctttacaacgcaacgaaatatgtctgcctttgggatccgacctttgaagcatacctggctaaaaagcgggcagaaggcaagcattacaacgtcgcactttcccatgcaaccaagaaattggtgcggctgatttatgctttggaaaattcccggcagccgtataacagcgtcgcatagtcttttcgcttgtataagctcaagcaggcgtccatccggacgtcagcttcgctatacccttttggggccgtctgcattctctcgccaatctacactttttggggtttgacatctaatagttagt

SEQ ID NO: 411 - DNA, 1256 bp, unidentified
  source 1..1256: mol_type = unassigned DNA; note = element_01e30b2
  misc_feature 1..2: note = core
  misc_feature 3..234: note = LE
  misc_feature 235..1233: note = CDS
  misc_feature 1234..1256: note = RE
  misc_feature 58..211: note = bridgeRNA
taccttagatttgcatctgaggattacggataaaatagaaagaataaatttgtgaagcaaagaaagaaatgcaggaagtgaacctgataaaattagggaggtataagctccattttcataagtggacttcctgcttgtttgaacccagacccagatagtaggttaacatccattgttaaggtagttaggttaagttcaaaccctttcattactaaatcattaaaagtcaaaagtatggaatttttttattttatcggtgtggatgtgtcgaaaaagaagctggacttctgcgtgatgtttgaaggaaaggttgttcatgaagagaaaacagctaaccatcaaggtgccatcatgtcattgctgcgtaatttggaagaggactatgggataacaagcggtcaaatgcttgtctgcgcagagcataccgggcagtacactttccctttggcatgtgcctgcaaatccgtagaatgcaagctttggcttgagaatcccgctgaaatcaaatactcatcaggtgttcagcgtggaaagaatgataaagtagatgccaaacgtatcgccatctatgccaaccgttttcaggacaaggtacagtattatgaacgtcccacggaggatattgaaagactgaaacagcttgaatccgaacgtactctatatgtgacggatttggcaaaatataaaggacagatgaaagaccaaaaggactatatgccaaaagccttgtatgaacgtaagatgaagcgtttgcaggcgttgatggatgacttggaggaagccatacaagccatcacggacgaaatggacgaagtgatagcctcttgtcccgtattatccagacagagggaactgctgatgtccatagacggcgttggacgtgtagtggcaaccaacatgataatcgctacggaagcctttacacgtttcgttgatccgagaaagttcaattgttatgccggaattgccccattctattattcttccggaagttcacaacactctaaagcaaaagtgtcgcatcgggcggacaaggtgatgaaaagacttctgcacttggctgccgtagctgtaacacaccgggtcggaggtgaactaaagatgtattacgaaaggaaagtcgcagaaggcaagaacagaatgtccgtaatcaatgcactaagagcgaaaatcgtggcaaggatgtttgcggtcatcaaaaaaaacgagaaatataaacccattttatcataaataatttgcaaaaatcatagtag

SEQ ID NO: 412 - DNA, 1620 bp, unidentified
  source 1..1620: mol_type = unassigned DNA; note = element_01e4de2
  misc_feature 1..2: note = core
  misc_feature 3..220: note = LE
  misc_feature 221..1189: note = CDS
  misc_feature 1190..1620: note = RE
  misc_feature 9..181: note = bridgeRNA
cttgtatcttagaaagagtagtagaccgtcccaacctaggtcataatagaccgttttgtagcatgggtcactacaataatctcgttgacagaactcgaacagtcgccaggggcaaaaatttaagtagtaagacttaaagaatacagcccgtatcgggcaaggatgagtgcaatcaaggggatgaaaacagaagatacttataattgggtgagactgaaaaatggagaattcaagtcaatgggtagggattgatgttagtaaagcgacgttggatgtttatatccgtccaataggcaaagcgctgaaagtaggaaacacagaattagagattataaatctaattgagcaacttagatcatataatataaatctaattgtactcgaagcaacaggaggattagaaacagaactaataattcaattacaggcagcactgttaccagtagcactaatcaacccacggcaaggaagagattttgcgaaggctacgggtagactggctaaaactgatgcgattgatgcacaaactttggcacactttggcgaagcaatgaagccaactgtgttagcaattgaatcagaatcggctcgccaattaggcgaattaatcagccgtagaagacaattagtcgagatgcaaacagctgaaaaaaatcgtcgttcacgcgctcgtggcagagcattagttgatattgaagaacatattgaatacctggataaacgtctcgaacaaattaattccgagattgagcaattgactcaaaacaatcagcagtggatagataaagttaacttactcaaaactacaccaggtattggtcctgttatttcaacaactctggtttctgatttacccgaattgggaaagttaactgctaaacaaatctctcgtttagttggcgttgcacctattaatcacgatagtggtcaacacaaaggtaagcgtatgattaatggtggtcgcgctcatgttcgtgccactctttatatgggtgctgttgttgctatacgccataatcctctaatcaaagctttttatcagcgccttgttgaacgtggtaaatctaaaaaacttgctctcactgcttgcgttcataaaatgttagtcattttaaatgctatggttcgtgataatttgccttggcgcaaaactgacaactcacaactaattgtcaccacaatgtcataagtctatttttatactttcccctgccctgaacaaaaatgttttcctgggcgataccaaaggcgggctacgcctacgcgactcgcgctcgcaaagcgtgtgtatattttcatctcaatcaacgccaaccctttacgaggcgatcgccgccagtccaggtgatcttaagcgcactctttgagagtccaactctcttcaagccttaccccaagaggggtgaggattctgacgcggctgctttaagatggcgtttcaggtttcctactccccctagatgcatcagtccatcttaaagctgtccgacggcggaaagcgtagcgtgcctcacccctcgccgcgctccacctagatctagacgcgacctctaccatacaccctcaaatctatttttccctcattttctgttgacgatctcttgacttttaagacagtcg

SEQ ID NO: 413 - DNA, 1368 bp, unidentified
  source 1..1368: mol_type = unassigned DNA; note = element_01e73c5
  misc_feature 1..2: note = core
  misc_feature 3..73: note = LE
  misc_feature 74..1108: note = CDS
  misc_feature 1109..1368: note = RE
  misc_feature 1081..1356: note = bridgeRNA
tgatggggtggacgccccccgacggcatcaatgtgccagtggaggtgttgaagcaccactgagggaggcgtccgtgtcgcatgctatcataatcgggctggatatcgccaagaccgtttttcatgcgcgcagcgctgacgagctcggcgcgacggtgttcagccgcaagctgagccgggcgaagctgctcgacttctttgcgaagcagcctgcgtgcctggtcgcgatggaggcgtgcagcggcgcgcatcactgggcgcgcgagctggcacggatggggcatgaggtgcggctgattccgcccgcctacgtcaagccgttcgtgaagcggcacaagaacgatgcggtcgatgccgaggcgatctgcgaggcggtgcagcggccgggcatgcgcttcgtggcgatcaagagcgaggaacagcaggcggcgggcatggtgttccgcacccgtgatctcgtcgtccggcagcgcacgcagctcgtcaacgcattgcgtggccaccttgccgagtttggttgggtcgcgccacgcggcctggcgcaggtgacgatgctcgctgacctcctcgacgaagaggagatggcgtcgtcgctgcctgatgccgcccgcgctatgctacgcgtcatgaccgacatgctcgcagggctcgacgatcgcatcgcggatctggacaaggagatcgcccggcgtgtccgcgaggacgaggttgcgcgcaggctaatgaccattcccggcatcgggccgatcgccaccaccgcgatcgtcgcactcgccccgccggcggagaccttcaccaagggccgcgacttcgcggcgtggcttggcctcacgccactccagcattcgaccggcggtaggcagaagctcgggcgcaactcgaagatgggagaacgcaccatccggcggctgctcatcatcggaggcagttcggtcgtcaggcaggcgaccgtccgcggtgcaccggccggatcgtggctggagcggatgctggcgcgcaaaccgcgcatgctcgtctcggtggcgcttgccaacaagatggcgcgcatcgcctgggcggtgatgaccaggaacgaggattacagagctccggcagcggtcgcggcgtaagccggggcagcggtcagaggcgtcggggacgtaggcggtcgaaggagggtatggcacaacggtcggcgagacggggccggaaaaactagggaatggcagagcgctagccaagcgcggaaagctgatgtggttccggtccgcgaactcccatactggcccgcagctatggcgctgttcatcgaggccggacagatgaaagcatccgactacgtgccgatctacaccgatttaccgcttgcatccgaaggggactccacaga

SEQ ID NO: 414 - DNA, 1802 bp, unidentified
  source 1..1802: mol_type = unassigned DNA; note = element_01e9d2e
  misc_feature 1..2: note = core
  misc_feature 3..476: note = LE
  misc_feature 477..1694: note = CDS
  misc_feature 1695..1802: note = RE
  misc_feature 217..499: note = bridgeRNA
ctcctattatggttttgtaaggagattgcagttctccccacagttacaaagcaaccccgtatgagttaattccatccaaaatatcaaagggagatataagggcggggtgcgggggtgcgcgaagcgcagggccgcccttgactatgcgcaacgctgactgtgccagacaagcaggccaatggatcaatttggctgactgtccgggaggcattatcctatggtggtcagatacctctctgccagaaaggactgaccgttccattgcccaagctgtattatggaagggcattggtatgacgtgcgtgtacttggaccagttggtgtccgtgttacagtcagtcagccagccctccattcgcagctgttcggtttaagcaggttggactgcgctatgtatgtccgtatgacacccaggagattgaataagcaatggaaaaccgctggtaccatgcaattcatatccgggaggtatacttatgtacaacgcagtaggtattgatgcttcaaagggaaagagcaccgtgacggtccttcagccgggcggcaaggtgatcaggaaacctttcgatgtgagccattctttaagtgagttaaaaagactcgcagattacatcttttccctggatggtgacactaaggtagtgatggaatccacagcccgctatcacgagcctgtactccgcaccttatctgagcgcgggatctttgtcagtgcggtcaacccacatctgatcaaaaattccggaaataacaccttacggaaagccaaatccgatcctattgactccagaaagtgcgccaggtatacgcttgacaactgggcggacctgcgacagtattccagtatggatactacacgcgaactattaaaaacccttaattctcagatgtcgttcttcaccaaacagaaggtggctgcgaaaaacaacctgatctcactgttggacatgacatatcctggcgtgaacaatctgtttgacagccagacacgcagtgatggcagtgagaaatgggtcgattatgccgcttctttctggcatgtggactgtgtccgcaagatcggcctcaattcattcacagagcgttaccgcgccttttgcaaacggcatggttattgtttccaggaaggaaagccagaaaaactcttcaatgcgtctctggatcttgttgctgttttcccgaaggaaaaggcatataaggatatgatacgtatgtccattaagcagctgaatgtcatttcggccaacgtggaacacatccgccaggagatggatcgtcttgcttccagcctgcctgaatacaataccgtcatgggtctgaagggcgttggccctaccttcgggcctcagctgatcgctgagataggtgatatcaccaggttcagccaccgggaagctctgacagcatatgcaggcgtggattcaggagtaaatgaatccggaagttttaagagtaagagcaatagtgcatctaaatgtggttcttcccgtctcagaaaaactctgtatcttattatggtttctcttcttcagacaaagccattggatgatccagtatatcgttttttagataaaaagcgaatggaggggaagccgtatcatgtttatatgacagccggagccaacaaatttctcaggatctattatggcactgtaaaagcttatttaagatccctggaaaaccctgagagctgagcagtttaaatccataaaggagttatcagcccaacaatgggtttatttgttgtacccaaatcaatgtggattatatcttaaatatccacttgactttttattagcagg

SEQ ID NO: 415 - DNA, 1223 bp, unidentified
  source 1..1223: mol_type = unassigned DNA; note = element_01ebc3d
  misc_feature 1..2: note = core
  misc_feature 3..248: note = LE
  misc_feature 249..1205: note = CDS
  misc_feature 1206..1223: note = RE
  misc_feature 6..210: note = bridgeRNA
cttatatctcgattttgatctttaccgagttcaaaatccccggttgatcgccgggagggctggggaggccgtgcgcatccttaggcttcgagcctgcgccatagatggcaccccccgcccgaccttcgcccacagtctgaacggtattcgtaggcctccgccacggcgggcgagcctggatggataaggctagaccggcgcagggttgccgatcaatcccgcccacccaaccatgaaggcattcacttatgcacacagtcgccgtcggcgcggacatcgccagcgcccatttcgacgcggcccgcctcgacgcggggggccgctacgagcacaagcgtttcagcaacgacctggccggctccgtggcgttcctcgcctggccggccggcttcggcggcgagaggcccctggcccgcatggaggctgccggggcttacagcccgcccctggccgggttcctgttcgcgcggggcgggccggtcgccgtcgccaacccggcccgcatcgccgccttcgccaagaccgagctgagccgggccaagaccgacaaggccgatgccaagctcgtcgcccgcttcgcccgcgagaagcagcccccgctgtggaagcccctgccgcccgccctgcgcgccctgcaatcccttttgcgccgggccgaggacctgcgggggatgctccagacggagcgcaaccgactggacgccgccgaggccgcccggcccatcgaggccgtcacgaaggcgctgggggccgagatggagtccgtcaaggcgcgcctccgcaagcgcaccgacgaagacccggacttgcgcgggcggcgcgacttgctggagtccatccccggcaccggcggggccgccgccgcacgcctgcttgccgccctccacccgcaccgcggcctcgccagcgccaagcgggccgccgcccacgcggggctggacgtgcgcatccgcgacccgggcaagcgcatcggcacgcgccacctggccaagcgcggcgacccgccgctgcgcaaggccccctacatgcccgccttggcggcctggcggcacaaccccgccgtcaaggccctctgcgagcgcctcaaggccaagggcaaaaacggcaaaccggttgcctgcgccgccatgcgcaagctccttcacctcgccttcgccatcctcaaatccggcaagccgttcgatcccaattatgggcttgcgtagggggcgttaagacggtat

SEQ ID NO: 416 - DNA, 1621 bp, unidentified
  source 1..1621: mol_type = unassigned DNA; note = element_01ed685
  misc_feature 1..2: note = core
  misc_feature 3..238: note = LE
  misc_feature 239..1486: note = CDS
  misc_feature 1487..1621: note = RE
  misc_feature 14..303: note = bridgeRNA
ttgctacaatgccaacaggccgggagaggcacgccagccaggcgtgcttttctcgtactcacgcctaagctacaatggaagggaaattggcctgacgagacttttaatggactatccatgtccggctgctaaacagtcagccatccttccactgtagcgttcggttgaggcaggttgaaccactggacacccaggatgttcgtgtgaccaagcaatttgaatcggcagtgagaaaacgatggccgccaatttgaaactgattggacagagagggataaaagaaatgaacgcagtagggatcgacgtttccaagggaaaaagcacagtagccattatgcggccctttggcgaagtggtcgcagaaccatttgaggtgtcccatacggatgtggagctaaggaaattggcctgctttctggagaagctgcccggagaaacacggatcgtcatggaatacaccggaagctactggcagcctatcgccaaggtgttgcacgattcgggcctttttgtttctgtcgtgaacgcactgctgatctacaaatatggcaacaattccatccgaaagggtaagacagacaaactggacgctgtgaaaattgcaaattactgtcttgaccgttggacagatctggaacgttacgctcctgctgatcagattcggcaaacacttaaaacatgccgccgccagtacgaccagtacataagattgaaggtcaatctcaaaaacaatctgattgcgctgctggatgggacgtttcctggcctcaacactctgttcaaaagtgcccccagggatacggacggacacgagaaatggatcgatttcgctgcaaaattctggcatctagagtgtatctatgggagttctgaaaaagcatttacaaaccagtatcaaaaatggtgcgccagagccggatacagattcagcgaggaaaaggctgcgtccatctatgcttacgctggctcacaggtgaatacacttcccatgaccgatgcggtcaaatgcctcgttacccttgcagtatctcaaatcaacacaatcatagaaacgatttccgtgatccaacatgagatgctctctctggccgctcaacttccagagtaccctgtcgtgatgcggatgtttggtgttggccctgtcctcgggcctcagcttatggcagagattggcgacgtgcgccgttttgaccgtaagcagtccttagtggcctttgccggtgtggacgcgccaccttgccagtccggtacgtttgaatcgaagaacaggcacatttccaagcgtggctctcccagactgcgtaaaacgctttttcaagtcatgtctaccatcatccagcacgcacccgctgatgatcctgtatttcagttcctcgatcgtaaaaggcaggagggcaagcactactacgtctacatgactgctgcggcgaacaagttcctgagaatctactatggcactgtcatggcttatttagagaagctgtaactccatcgtaaacgatgattttcattccaattctacagccgccggaactcgacggctttctttgctatgcccattttcgtggaatcaacttcttcagctttttatacttttaggtcttgacaactcttggcaggt

SEQ ID NO: 417 - DNA, 1415 bp, unidentified
  source 1..1415: mol_type = unassigned DNA; note = element_01f19ee
  misc_feature 1..3: note = core
  misc_feature 4..197: note = LE
  misc_feature 198..1151: note = CDS
  misc_feature 1152..1415: note = RE
  misc_feature 1152..1402: note = bridgeRNA
tgatggtgtggacgacgcccgcgcggcatctggctcaatgaagggccgtgccaaaatggttgtcgttagagcaaccgtttgaaggagcgccgtccacgggaaagtctatcaccgatttgtcctctgtcacgaccattgggctcgatctggccaagcacgtctttcaagtgcacggcgttgacgcgtcggggcgcgttgtggtcgccaaggcggtcaggcgcaacaagctgctggagttcctcgcttcgttgccgcgttgcctggtcgggctcgaggcctgcgggtccgcgcatcattgggcgcgcgaactcatcaagctcggccatgatgtgcgcataatgcctccggcctatgtgaagccctatattcgtcggcagaagaacgacgcggcggacgcggcagcgatctgcgaagcggtgacgcggccttcgatgcggtttgtcggcgtgcgctcgctagagaaccaggcggcgttgatgcgccacaaggcgcgggagatgttggtctcgcaacgcacgcaactgctcaatgggctgcgcggccacttgaccgaggtcggcgtgatcgcggcgcaggggcccagacacgcccgcgaactggccgagctgatcgaggcctgcgacgagacaattccgttcgaagtttgcgaggcgctggcgccgctcgtggtgcaattgcggaccctcgacgaagcgattgcgcggcttgaccgcgccatcacgaaacttgcgcagcgggatgaaacggcgcgacggctgatgagcattcccgggttcggaccgatcaccgcctcggcgatggcggcgaccatccaggatacgtccagcttcgccggcccgcgcgagttcgccgcctttctcgggctgactcccaagcagaactcatcaggcggcaaacagaagctggggcgcatttcgaagatgggcaatcggaacttgcgcaagctgctcgttgtgggggcgcatgcggtgctgtttcaccgcaagccccacaccgacccgctgcggatgtgggcaaagaagctgatcgagaagaaacccttcaagctcgtcgcagtagcgctcgccaacaagatggcgcgcattgccttcgcgatcatgcggggcgagacggtctatcgggaaatttccggcgtaaggagcgccgactgagttcgcggcccggctcgtcgagaagccaaggcggcacaggaatcgagggtgaccaagaggtgatgcgcaggaaagcggattgatccagaagcccgtggctttgtctgcgcactcaagcgcgctactctgatcggggcaacggatcagcggacaacatcagggccagcggactctattctccgcgcacaaggccgaagacatgaccgcacccacgacctgagcaacgctgaaaatagcccttgatcagcgggcgacgtccagaca

SEQ ID NO: 418 - DNA, 1365 bp, unidentified
  source 1..1365: mol_type = unassigned DNA; note = element_01f3239
  misc_feature 1: note = core
  misc_feature 2..81: note = LE
  misc_feature 82..1122: note = CDS
  misc_feature 1123..1365: note = RE
  misc_feature 1133..1364: note = bridgeRNA
ataatgagatggacgctccatctttacggcatcagatgtgccaaagtttgagtgtcaaatctcaaaagaaggagcgtccaaatgcaagtatcaacgatgggtattgatctcgcaaaaaacctcttcgtgcttcacggcgtagatcacaacggtaaaactgttctgcgcaaaaagctttcccgccgccagtttgtcccgttcattattcagcttccggcctgcttaatcggtatggaagcatgttcatccagtcaccactttgcccgcctgttcagcaatgccggacatcgggtaaaactcattccaccacagtatgttaagccttacgttaaaaccaacaagacggatgcggctgatgcagaagctatctgcgaagcggtaacccgtccaaacatgcgctttgtacagattaaaacagcggagcagcagggcgtgcttgcccttcatactgaacgcagttttctggtacgcgagcggaatggctgcgccaacagcctgcgggcgatgctcgccgagtttggttgtgtgatggcgacagggttcagtgcactttataaagcagtgcctgagattctggaggatgaagaaaacgaactgcctcactttgtacgtgtcagtgtacagcgtcagcttgaacaccttaaaacgctggaaacgaggatacggcagaccgaacatgagctgagtgactgggcacggacccagccagcctgccagcgggtggaaaaagtgccgggcgtggggttgatgacagcgacctatctggtggcatccatcggcaatggcagacagttcggtactgcgaagcagtttgcttcatggctgggtctgacgccacgggagcattcaagcggaggcaaacagaagttaggcggcataagtaagcgcggcgacagttattttcgctgtctgctggttcacggggcaagagcggtactgaggcatatcagcaaaaacgagaagagaatgccgtggctggccgcactggtcaggcgtaaacaccgcaatgtcgcggccgtggcgcaggcgtgtaaaaccgcgcgtattttatggtcaatgcttttccatgaaacagaatatcgtccgctgacagaggcgctgaggcatcagcgccaacattaacgacgttatgttgtccggtagttgcatgtgaaatcagtaagatggcaaaacaggtaagaccgcaggtgagagactctgagtgaacacaggggcaccaaagcccgaagggatgttgagagctcacctggcggctttcatcatggtcggggagcccgaaggctcccacaagagaccggatatatggttgcaatacctgctcgcttttttactgaaaaacattgcgatttatgggagcgtccatat

SEQ ID NO: 419 - DNA, 1619 bp, unidentified
  source 1..1619: mol_type = unassigned DNA; note = element_01f707c
  misc_feature 1..2: note = core
  misc_feature 3..282: note = LE
  misc_feature 283..1491: note = CDS
  misc_feature 1492..1619: note = RE
  misc_feature 14..305: note = bridgeRNA
ctactacaatatatttatggttaatacacctcacaaccagtgaggcattatccatcttgttgcttaagctgtataatgatagagcaattggtatgtcggcttcctttcttggactacgcgtccgttaagtagacagataaccagctcctcatttgcagcattcgttttatgcaggttgaaccaccttgtgtgcgtccgtgtcatccctcagtagattgaataggcaatgagtaaaactggtatttatccattgcattattttcccaaaggagtgacaattttatgaagaacgcagtaggtattgatgtttccaaaggtaaaagtgtagttgctatcttgcgaccatatggtgaaattgtatattcgccttttgaactaaagcacacagcaagtgatatatcttcgcttatcgaacttatcaaatccattgatggtgaatcacgcattgttatggagcatactggacgttattatgaagtccttgctaatcagttttccaatgctaatctctttgttagtgcagttaatccaaaactcataaaagactttgataacgaatctctccgcaaagttaaatctgataaggcagattctgtaaaaattgcaagatatgctcttgacaaatggaatctgctccaacagtatagtgatatggatgaattacgcaaccaacttaaaactatgaaccgtcaatttaacttctacatgaaacacaagacggctatgaaaaacaatcttataggcattctcgaccagacatatcctggtgttaatacctattttgatagccctgctcgcagtgatgacagccagaaatgggtagatttcgcttccacttactggcatgtggactgtgtccgtaaaatgtctctcaatgcatttgttgaccattatcagaaatggtgcaaacacaagaagtacaactttagtcaactaaaagctgaagaaatctatggaaaagcaaaggaacttgttcctgtacttccgaaagacgatataacaatgtttatcatcaagcaggctattgaccagcttaacagtgcatcaacaactgtagaggaacttcgcaagcttatgaatggaacagctgcaaagcttcctgaatatcatgttgttatgcagatgaaaggagttggtccatctctcggtccacagcttatggctgagattggcgatgttatgcgctttacccacagaaatgctattactgcttttgctggtgttgatcctggcgtaaatgaatcgggcagctatgctcaaaagagtgttccaacatcaaagcgaggctctgctgagctacgcaaaacattatttcagataatggatgttctgattaaaaccatgccacaggatgatcctgtttataaattcattgataaaaaacgctcgcagggaaagccatactatgtctatatgaccgctggggctaataagtttctacgaatctactatggcagagtgaaagaatatcttactactctgcaatcataaaacatccaacaactttgtaattcaaatttttccagcactttatggtggactttttgttatgcttatttttcaacctgtataaaattttcaatgttctttaaatttagccttgactttttatttgcagg

SEQ ID NO: 420 - DNA, 1290 bp, unidentified
  source 1..1290: mol_type = unassigned DNA; note = element_01f733a
  misc_feature 1: note = core
  misc_feature 2..211: note = LE
  misc_feature 212..1183: note = CDS
  misc_feature 1184..1290: note = RE
  misc_feature 35..202: note = bridgeRNA
tcttaagtttgtcttttattaaatttgatatataatcagaaagaataaaagagagaattaaggttaatatatacggtgaagcattgacttcgacaacattgataatcctctctcttttctactaaaaatcacgttcagttctgtgagacctagatctcgtttttaagttgttgtgagtaaaagtaggttattctttcataaaacatttcttatgaataaatatacagaaacttttggagttgacatcagtaaagatgtttttgactgttatggcagtttgcaaggtcatttacaatttgagaatacggaaaaaggattcgttaagtttctcaaaacaagtaaagataatacgctggttgtcatggaagccacaggttattatcattacagattagcacagtttttatacaaggaaggacaaattgtatctgttgtaaacccattgtctgtaaagcgtttcattcagatgaaattagccaaagtaaaaacggataaaagtgatgccaaagcaatttgtgactatggaattattaatgaagtcccattatataatgcgttaacagatgtccaaagtgagtgtttgcagctttttagatggttagataatttaatcaagaaacgaacagctaccaagaacaaaattcatggagaggaagtattaggggttccttcaaaatttgtttttcgttctttagtcaaaacaaaaaaaaatttagataaagagattttggggatcgaacaaaagttactttctttagtaaagcaagatcagcaagtccaacttacattattgcaaagtattccagggataggtgtaaagacagcgctgtttttaatagtagttaccgatggctttaagaaatttgaaaacgcaaaacaattatgcagctatgtaggaataacgcccacaattagagtatctggaagcagcgtaagaggtagaagtagaattagtaaagtaggaaacagaaaattacgaaatttattatttctatgttcttttagtgcgtgcaaacaaaataaaggttgcagggaaatttacgaacggattacaaacaaagggaaaagtaaaaaattagcgctaattgctgtgtctaataagttactaaaacaagcttttgcaattgcaaaattaggaaatccttatgatgcaagttttgtttctgtagtaaaaattaaatagtaaaatcttccataaaatgaataaaaaaagcttgaatcaggttttcaagcttagaataataatgcataaaattaatgaagaaataagttgttttttaactcagttct

SEQ ID NO: 421 - DNA, 1553 bp, unidentified
  source 1..1553: mol_type = unassigned DNA; note = element_01fb361
  misc_feature 1..2: note = core
  misc_feature 3..216: note = LE
  misc_feature 217..1440: note = CDS
  misc_feature 1441..1553: note = RE
  misc_feature 11..235: note = bridgeRNA
ctcgtatattatagttgtagtaataaatactacattttgttttctatcccactttcttatgggataataattgtatagatagaggtcgtagcattcctccttgaagctagtcttcctaaaatagggttacgcctcttctttacgtctatatcagtatgagctggatagcacatttcgttgctgtatgtctaacgaggtttgattgtcgtaaagttcttgagggttctttctctatctaaatttatattaaagctaggtgattttatattttacattggtgttgatattgcaaagaataaccacgaagcctcaataattgattctaatgggaaacttgtttctgagtctttttctttttctaattctattaagggtttagagaagtttcagaaatatatttcctctttttcgattgattctaacaattgtattattggtatggaagctactggtcattattggctgtctgtttattctttcttgattgaattaggttttttttgtgttgttattaatcctattcagtctgatgcttttagaaagatgtatattagacagactaagaatgattctgttgattcttttgttattgctcaaattcttaggtttggtgagttttctgtttctcatttttctgatgaggatacttttgctttaagaaatctttctaggtttaggtttgctcttgttgatgaagcttctgattggaagagaaagcttgttgctattttagatcaggttttccctgagtattcttcgcttttttctaatgtctttggtgtagcttctaaagagcttttgagtaagtatcctttgcctgaggatatgatttctattcctgccgatgagcttgctatgcttttgtctaagtgtagtaagggtcactttggtattgataaggctaaagaaattcaagagaaggcttctaattcttttggtgttaagtttgctttgaagtctttttcttttcaaattaaacagattattgctcaaatttcttttcttgaagatcaaatagctgatattgaagatgaaatttcttctatgattaattctttatgccctgttattacaactattactggtattggtgatgtcttaggtgctgctattttctcagaaatcggtgatatttctcgttttgagagagctaatcaattagttgcttatgctggtttagatgttgctgttaagcaatctggaaattttaatgctaccgatactaagatttctaaacgtggttctccttatcttagacgtgctatttggcttgctgctagtgttgctgcttttaaggatcctgctttgtctgtatattatcaaaagcttagacaaaggggtaaggctcatggtacagctattggtgcagttgctagaaaacttactaacattatttttgctgttttgagggataacaaagcttacatacctaatatttagttgttatttaactattatttaatttttctaagcctaatttttaggcttatttgacgtgccataaatttcaagataaattattttttattttctcttgacatttgatagctggt

SEQ ID NO: 422 - DNA, 1398 bp, unidentified
  source 1..1398: mol_type = unassigned DNA; note = element_01fcdbf
  misc_feature 1: note = core
  misc_feature 2..88: note = LE
  misc_feature 89..1117: note = CDS
  misc_feature 1118..1398: note = RE
  misc_feature 1174..1390: note = bridgeRNA
taatggaatggtcgccccttcctgaaacggcatcgaagtgccaaagtggagacgcagctcaaccacttaaacgaaagggacgaccgacatgaagattacgacaataggaattgatttggcaaagaatgtactccaagttcatggtatcgatgaagcagggaaagcggtagtaaagaaagccctcaaacgggatcaggtattgagctactttgttcggctggctccctgtctgattggtatggaagcctgtggcagtgcgcactactgggcaaggaagctcggggcgatgggtcacagcgtcaaactgatggccccgcaattcgtcaaaccctacgtcaagagcaacaagaacgatgccgccgatgccgaagcgatctgcgaagccgtgagccgacccaacatgcgctttgttccgatcaagaccggcgagcaacaagcggcactctccctgcaccgcgcgcgtcagggcttcgtcaccgcccgcaccgcccaggccaatcagattcggggattgttagcggagtacggcatcatcatcccgcaggggatcagccatatcgcccaacgtctgccagacattctggaagacggcgagaatcaattgccggggacgttccgccagttattacagcggctgggcgatcacctcaaagaattggggcggcaagcgggtgagttggaaatgctcatccagagcgaacaccgcgagaacgaactgagtcgcaagctggccgacattcccggcatcggtccgatcaccgcaagcgccttggtagcctcgattggggatgcgcgacacttcgagaatggacgccagttggcggcgtggatcgggctggtacccaagcaacactccagtggaggcaaggcaaccctgttaggcatcagcaagcgcggcgacacgtatctgcgcaccttgctgatccatggggcacgatccgtcatccgggtaacggagaacaaggtgaatcagacggatcgctggctacagggggtggtgcagcgacgcaacaagaatatcgcggcggtggcgctggccaacaagaatgcccggatcgtgtgggcactcttggtgcatgaccgtcgttaccaggcggattaccgcctggcggcgtaacaatgttctactgagggtgtggcaaagcagtaaaggcgtctgcaatacagaggagacaaccgattgctcaggcattcatgacgtgatggctaaacaggtaagaccggggttggcagatcctgaacgtggcaatgggcttcgagctcgctggattgatcaggcgctaaccagcgtattccatcagggacagggggacaccccgctaaagtccggatgtatggctgcaatctcacctcttcgctttcacttattgattgcttggcatagggggcgaccatgta

SEQ ID NO: 423 - DNA, 1381 bp, unidentified
  source 1..1381: mol_type = unassigned DNA; note = element_0203eeb
  misc_feature 1..3: note = core
  misc_feature 4..87: note = LE
  misc_feature 88..1119: note = CDS
  misc_feature 1120..1381: note = RE
  misc_feature 1150..1370: note = bridgeRNA
atgatgctgtggacggctcctccaccggcacgtgagtgccatgaatgtgtgggctgttaaggcccccacaatttggaggagccaagcatgcaaacgatcacgacaatcggtctcgacatcgccaagtctgttttccaggtccacggcgttgatgcggaaggtaaggtcatcatccgccggcagttgaagcggcgttacgtcctggcgttcttccagaagttgccgccatgcttggtcgggatcgaggcctgtgcctcgtcgcaccattggtcgcgggagctcaaggcgctcggccacaccgtgcggctgatgccgccggcctacgtgaagccctacgtcaaacggcagaagaacgatgccgctgacgcggaggcgatctgcgaagcggtcaccagggccaacatgcggttcgtcgcgaccaagactcccgagcagcagagctgcctgatgctccaccgcacgcgccatctgttcatccgccagcagaccgcagtgatcaatgctatccgcgcccacctcgccgagttcgggatcgtcgcgccggtcggacgcaatggcgtcgaggaactactcgatgtcgtcgccgatccaagtgataagcgagtccctgagatagctcgcgcgtgtctcttggcactcggggctcaactgcgaaagctcaaggagcagattctggagttcgaccgtatgatcagagcctggcaccgatccagtgagatgagcatgcggctcgatgaagctcctggcatcggcccggtgctggccaccgcactggttgctaccgttaccgacccaaaggcctttcgatcagggcgcaacttctcggcctggatcgggctggtgccaaagcagcactcaagcgggggcaaggacaggctcggcagtatcagcaaacaaggtgaccgctatctgcgcagcctgttcgtggccggtgcgctcgccgtcatccgctatgccaagatccacggcaccaagcgtcggccctggctcacggcattgctcgcgcggcggccgacgaaggtcgccgccatcgcgcttgccaacaagatcgcgcgaatggtctgggccatgatggttagaggcgagcgctacaagcaacccgtcgcacttgcggcgtaaacgagatcgcgtcggacatccggcgtgatgtgaaggttggaaagggcgaacagcacgtaatgcagagccggtcgatccggcgatcaggacaacccacttgtgccatcgcattgtcgaatgcgtgcttatgaccgggacctgatccgcggagggcattatggccagcggccacgtgtgccgcactaacaggccgaacacatggctgcaccgaccaatgctgcaaacgtgaagaaagcccttgccaactcggagccgtccacac

SEQ ID NO: 424 - DNA, 1358 bp, unidentified
  source 1..1358: mol_type = unassigned DNA; note = element_0204134
  misc_feature 1..2: note = core
  misc_feature 3..76: note = LE
  misc_feature 77..1099: note = CDS
  misc_feature 1100..1358: note = RE
  misc_feature 1075..1345: note = bridgeRNA
tgatggggtggacgccccctcacggcatcgctgtgccaaagtggtgtcgttgatcatcacttgaacggaggcgtccatgttggaagttaacacaatcggattggacctggcgaagaacgtgttccaagcgcacggcgcagatgcatcgggaactgtgctgtttcggaagaagcttcgccgcgactacgtacttcggtttcttgccgatcagccggcctgtacggttgccatggaagcatgcgccggcggccactattgggcgcgggagattgcgaagctcgggcatgaggtccggctgatagctccaggatacgtcaagccttttgtgaagcgtcagaagaacgatgcggctgacgccgaagcgatctgcgaagcgcagaggccgaccatgcggttcgtcacggcgaagagcgaagagcagcaggctgcggctatggtgttccgcgttcgcgatctcgtggttcgtcagcggacccagacgatcaatgcgatacggggccatcttgccgaattcggtcttgtatccgcacagggcctctttcatgttgccaagcttgtcgcggcgattgagaacaaagatgccgccatccccgaagcagcccgtccgatcctgtctctgctggttgcgcagttgcggtcgctggatgagagggtggccgtgctcgaccgcgagatcgcccggcgcgcccgggaggatgcagaggcccggcgcttgatgaccattcccggcataggtccgattaccgcaacggcacttgctgccctggctccatcggcgtcaaccttcaagagaggccgcgacttcgccgcatggctcggcctgacgccgctgcaaaggtcttcaggcggaaagcaaaagctcggcgagacatcccgcatgggcgaacgaaccctacgtcgcctgctgatcattggagcgagcgcgaccgtgcgctgggccatgcgtagaggatcggcggcggatccctggctttcgcggatgcttgagcgcaagccacccatgctggtgatcgtcgcgctagccaacaagacggcgcgcatcgtgtgggcattgatggccaacggcggaacctatcgaacgccggccatagcaggatagtccgctccctgagcgggctgccatggtgtgagaaggtcaaacggagagtatggcgctacggtcaagagacaggatcgggaaaaccagatcatggatacgcgccttgagcgcgccagattgttttggacccgctccgcgaactcccatacgggcccgcggcatgtgatagccgcaacagaggccggacacatgtcagcacccgaccacactccgagctcttcgaaaagattcttcttgcatcaacgggggcgtccacaca

SEQ ID NO: 425 - DNA, 1376 bp, unidentified
  source 1..1376: mol_type = unassigned DNA; note = element_0225791
  misc_feature 1..3: note = core
  misc_feature 4..87: note = LE
  misc_feature 88..1122: note = CDS
  misc_feature 1123..1376: note = RE
  misc_feature 1147..1363: note = bridgeRNA
tgatgctgtggacggcgcccactctacggcatcgatgtgccaaaggatggttgcgtcaaagcgcaaccactatgaggggagccgtccatgggcgagattagcacggttggtctcgatatcgcgaagtcggtttttcaggttcacggcgttgatgttgatggggcggtggtgatccgcaagcgcgtcagccgagtgaaggtgttggagttcttcgcggctttgccgccctgcttggtcggtattgaggcctgtccaaccgcacaccattggagccgcaagcttcaggcgctcggccacacagtgaggctgatgccgccgagctacgtgaaggcgtatgtcaagcgcagcaagaacgacgccaacgacgcggccgccatctgcgaggcggtcacacgaccgtccatgcgatttgtaccgacgaaatctgagcagcaacaatcggccttgatgttacatcgcagccgccagcttctggtccgtcagcgcacgatgctgtcaaacgcgatccgtgggcacgtggccgagctcggcatcatctcggcgaagggccgcaatggcacggctgaactgctcgagattattgccaacccggatgatgatcgcatcccggcggtcgcgcgattgagcctcgccattcttgctcgtcaatacgccgcagtcacaaccgagatccgagcgatcgagaagcagatctacgcctggcaccggtcgtgtgaagaaagtcggcggctggaggaaattcctggcattggtccgatcgtcgccaccgccttagtcgccgaagtcggggattggacggcattttcgtcgggacgtagcctcgccgcctggattgggttggtaccccggcagcattcgaccggcggcaaggagaggctcggcagaatatcaaagcagggcaatcgacatttgcgatggctgctggtcgcaggtgccatggccgtcatccgatatgcgcgacagcacggcacgaaacggctctggctcgttcgcctgatgggacgccgaccggtcaaagtcgccgctgtcgcgctcgccaacaaaatcgctcgaatggcctgggccatgatggtgcgcggcgagcgtttcaatgagccgaagttgctgccggtagcggcataagtgtcaatggggccaggaggatataacgaattggcgagggcatgacgacgtaatgcagatacggtcgttccgagggtcgggagagcccgctagggtcaacgcatctttgaatgcgtgcgaaggattgggacctgatctgcggagagcattagggccagcggccacccgtgccgcacaaacaggccggacacgtgaccgcacccgaccaatctgcagcaacgtaagaaagttcttgccaaggcgccgtccacacg

SEQ ID NO: 426 - DNA, 1603 bp, unidentified
  source 1..1603: mol_type = unassigned DNA; note = element_022611f
  misc_feature 1..4: note = core
  misc_feature 5..272: note = LE
  misc_feature 273..1472: note = CDS
  misc_feature 1473..1603: note = RE
  misc_feature 12..254: note = bridgeRNA
ccccgttacctttttagtagcccctaaatgagcaagtattggggttgctggcctgtcggccccggcattgattcctgcccccagtcttcaatggtccggggggtgttgtcaccggggtccgataggcacctgggaaatcgctaataggggccggatgcagacggggaaccaccgccaatatcggccgtaacgtggatgccgagccttggagccgaaggacaagccagcaccgtcccacccgttggaaaccatgctccaaggaaggcaagacgatgatccccgaacacgaaacagtcgatgttttcatcggcgtcgacgtcggaaaatccaaccaccacgccgtcgctctggatcggtcaggcaagaaactcctggacaaggccctcccccaggacgaggccaagctcaaggccatcatcacctcactgtcccgccatggccgggcactgttagtcgtggaccagcccgcgaccatcggtgccctgcccgtcgcggtggcccaggccgccgggatcatggtgggttacctgcccggactggcgatgcgccgcatcgcggacttacatcccggggaagccaaaaccgatgcgcgcgacgcgtacatcatcgccgaagccgcccgcaccatgccgcacacgctgcgctcgatccaggtcgcagacgaagaggtcgccgagctggcgatgctctgcggttttgatgacgacctggccaagcaggccaccgcgaccagcaaccgaatccgcggcctgttgacccagatccaccccgccttggaacgggttatcggcgtacatctggaccaccaggcgatgcccgagctgttggcgaaatacccgaatcctgcagccttgcgcaaggccggtaagaccagggtcgaggccctgttgcgcaagcacgccccacgggccgggaagcgctgggccgccgaggtgttcgccgccttggacgagcagaccgtcgtggtctcgggtaccaacgcggccggcatcgtgctgccccagctggcccgttcgctggtccagacccggactgcccgcaccgaggtcctggcccaggtcgagctactcgtggaggcccaccctcttcacatcctcctgacgtccctaccggcggtcggcgtcaggaccgaggccaggatcctcaccgaggtcgttggcaaagacttccagaccgccggacacctcgcctcctacgccgggctggccccggtcacgtggcgctcgggcacctcgatccgcggggaccacccctcgcgcaagggcaacaaggtcctcaaacgggccctgtttctatccgcgttcgcctcgctgcacgacccgatatcgaggacctactacgaccgcaaacgcgccgagggaaagaaacacaaccaggccctcatcgccctggccagacgacgctgcaacgtcctgttcgcaatgctccgcgacggaaccatctaccagaaacacgtggccttggcagcctgaaacccgcaatccaccgccgcgcaccaggagcatccgtcccaatcacccggccggcatcgccatgcccgaaaattctcgcaacgattattcaggtctttccggctcgacccttgacgaagcagataggggca

SEQ ID NO: 427 - DNA, 1632 bp, unidentified
  source 1..1632: mol_type = unassigned DNA; note = element_022f473
  misc_feature 1..2: note = core
  misc_feature 3..261: note = LE
  misc_feature 262..1437: note = CDS
  misc_feature 1438..1632: note = RE
  misc_feature 11..236: note = bridgeRNA
ctcgtataataatgttatagtttaaaaccacatttcttttcattctcactattcttgtgagataattattgtacagatagaggtcgtagtaagctgtccttgaagcattgtcttccttaaatagacttacgcctcttctttacatctatatgcgaatgagctggatagtacctagttactgaatatctaacgaggttgtattgttgtaaagtagagaggctctagactttatctgttaatattttaaaagctggtgattatatgttttatgttggtattgatgttgctaagcaaaaccacgaagcttctattattaattctaatggcaagcttcttgacaaaagcatttccttttcaaattctaaagcaggttgcaataagttaattaccgtacttgaacgatttgaagctaatacttccaatgttattattggtatggaggctactggccattactgggttagtctttattcctatctaattgatctagggtttgatgtttatgttattaaccctattcaatcagatgcttttagaaagatgtatattagacaaaccaagaatgattctaaggattcttttgtcgtagctcaaattatgcgtttcggacaatttacatccacatctttagccgatgaagatattatggctttacgccaattatctcgttatcgacttgctttggttgatgaatgttctgattggaaacgtagatgtattgctcttttagaccaagtttttcctgaatattcgaagctcttttcagatacttttggagtaacttctagaaagcttctttctaaatacccaactcctgaagatatgctatctgtagatacagatactctttcaagacttttgtcagaggcaagcagaggtcgttttagtgtatctaaagcttctgaaatacaggaatgtgctactaatacatttggagttagcttggcaaaagacgcatttcaatttcaaattaaacaaattattactcaaattaattttattgaagaacagctagaggagcttgaaatcaaaatttcaacattacttcaccaaaccaattcagttattactactattacaggtattggtgatgttctcggcgccattattatcggagagattggtgatatctctcgttttaactcagcaccacaattagttgcttacgctggtcttgatccctctgtaaaccagtctggcgattttgctggaactaaaaccaaaatttcaaaacgtgggtccccttatctacgtagagcaatatggttggctgctaatactgctgctttcagagatccatcattatctgtgtattatcagtcacttaaagcacgtgggaagcatcatctaacagctataggtgcagttgctcgaaagatgtgcaatattatttttgcagtccttcgtgataacgaaccttatgtgcctcatgtttaagataatttattagttaagtttaattctaacctaaatttctttgtttctaatttaggtttatttgttttgtctattttacatgagaatttatggcaggttctgtcaaggatggttttctcttgacgggttctgacagaaatctaaaataactaaggcaaaataaataaaattatctcttgacatttaatagctggt

SEQ ID NO: 428 - DNA, 1522 bp, unidentified
  source 1..1522: mol_type = unassigned DNA; note = element_022fe00
  misc_feature 1..3: note = core
  misc_feature 4..491: note = LE
  misc_feature 492..1274: note = CDS
  misc_feature 1275..1522: note = RE
  misc_feature 3..220: note = bridgeRNA
cttatattatatttagcgcagttagctactgccaaagcccaagtggtatacttggaataagtcactgtggattagttcatttcctccaatcgcttgacgatttccgaaagggtctaacaacagctttttgtttcaattggtaatgagtttgataacgcatagacgttttatctcgtctaaggtaacaaggcaaaaagttcgtggataaccaagtagacttgaaatactatatctggaggtactcccatgctttatgtgggcattgatgtcgctaaaaataaacacgatgttacagccttgaatgttcgaggaaaactgttcttaaaccactcactttttcaaataataaagctggttttgaactcttagatctgtcttttcgacagctcaaccaagactgtctcatcgctcttgaagatactggacattatgcctttaatctactgaacttcctgcatgaacaaggatataaagtttacacctacactcctttgctcatcaaggaatttgccaaatcattatcacttcgaaagactaaaacggataagaaagacgctcatggcatcgctcttaaacttctttctgaccccaatcgtgaacaatttcaacacaataatcggcaagtagaactaaaaatactgactagacatattcatcgtctcaagaaaaaacagtctgattggaaagtacaatacactcgttgtcttgatatcatctttcctgagttggataaaatcgttggaaagcattcagaatatacctaccaactcttgacacgctactctaatcctcagaaaaggcttgaggcaggatttgataagctgatagaaattaagcgattgaccgcttctaaaattcaggatatcctctcagtcgcacctcgttctatcggaacaacatctcctgctcgtgaattcgaaatcatcgaaatcatcaaacattacaagaggctcattgacaaggcggaaacatgtgtcaatgacttgatggctgagttcaactcggtcatcacgacggttactgggattgggggtcgtttaggggcggtcattttagccgagattcgaaatattcatgcctttaataatcctgctcaattacaagctttcgctggactggattcttctatttatcagtcaggtcagattgatttagctggaagaatggtcaaacggggttcccctcatctgcagtgggcactcatacaagctgccaaagcatgcgctcgcttttcacctgcttttaaggcctatcttaagactacgttagaataaggaaaacattacaatgtagccatcatccaccttgcaaaaaaacttatccgaaccctgttttatatcctaaaaaagagctgccatttgacgaacaaaaagtgatgtaatttctgaaattaacacaggattacctttgaaaaaatggactttttcaagggctttttgccgtgctctaaaatcatcgccaaattatcaaattgaaataagaaatagtttagataaaactattgacttttcttatagtttgt

SEQ ID NO: 429 - DNA, 1492 bp, unidentified
  source 1..1492: mol_type = unassigned DNA; note = element_022fe03
  misc_feature 1..2: note = core
  misc_feature 3..244: note = LE
  misc_feature 245..1471: note = CDS
  misc_feature 1472..1492: note = RE
ctaatgggaggtgccggggaagccacggggcagactcgggtccggtagcggccggcgggtgagcactcatacggccaggcatccgatgcctacggctagaccgtgcccccgctgggcgtgaggaggacgagaccgctgatggggtgacgtgcccgctcgtgtggcgtgagcactgatccattaggccgctggtgttcctcttccacgctgccagggacaggttgggagagcgcctggaggatatgtgctgttcgtgggggatgactgggctgaagatcatcatgatgtcgagcttcaggacgcgaccgggcgccgtgtggcgcgggctcgcctgccggagggcatcgctggtgttgcccggctacatgagctgatcggtgagcatctggctgaggatggcgagccggagcaggtggcgctcgggatcgagaccgatcgcggtccctgggtggccgcgttgatcgcggccggatacacggtctacgcggtcaacccgcgccaggtggcgcggtatcgggagcggcacggcacctcgggcgcgaagagcgatgccggggacgcgcacacgctggccgacatggcgcgcaccgaccgccaccagctacgcccggtcgccggtgacagtgcgcgggcacaggcggtgaaggtagtggcgcgggcgcatcagacgctgatctgggaccggcaccggcacatgttgcggctgcgtagtgcgctgcgcgagttcttccccgccgcgctggatgccttcgacgatctgaccgcgccggatgcgctggaactgctggccaaggcgccgaacccggaacgtgcggccaggttgtcgcgagcgcagatcgccggcgcgctcacacgtgctcgtcgccgcgatgtcgagggcaaggccgcgacgatgcaggcggcgttgcgcgccgagcagctgacccaaccgtcgaccgtggccgccgcctacgcggtaacggtgcggtcgctggccagcgtgatcgccaccttcaacaccgagatcgcgcagatggaagagcaggtgaagcagtgttttggccggacccgggccgctgaaatctatctgtcccagcccggtctgggacagatcctggcggcccgggccctcggcgagttcggcgacgacccgacccgctacgccaccgcgcgcaaccgcaagaactacgccggcaccagcccgatcacccgggcctccggcaagcgcaagaccgtgctggcccgcttcatccacaacgaccggctcaccgacgccctgcaccagcaggccttctgcgccctgaacgcctcgcctggagcgcgcgcctactacgaccggctccgcggccgtggcgcgaaccaccacgccgcgctgcgccagctatccaaccggctggtcggcatcctgcacggctgcctcaaaaccggcaccacctacgacgaacgcaccgcctgggcacaccacaatcaagatcaacaaaacgctacttgacaaccaaagcccatggggtgt

SEQ ID NO: 430 - DNA, 1574 bp, unidentified
  source 1..1574: mol_type = unassigned DNA; note = element_0234e45
  misc_feature 1..3: note = core
  misc_feature 4..184: note = LE
  misc_feature 185..1336: note = CDS
  misc_feature 1337..1574: note = RE
aaattttgataaatttccgaattataagccagttgggataaaaaacagaaatgaatatctccgagtgctcgctgcttgagttaaaatgtcaagaccgacatacttaaaatcttgcatcaacgtgctctaagtcacaaattatatttatctttgggaagaattttaaccccaaatatgcaagcctatgaaatcagtatgtggtcttgacgtgcacaaagatagcgtttatctttgtattttgagcgaatttggagaacttattgaaaaagttttcggagttttaacttatgagttggaagaaatgcgtgatttgatgcttcatcaccatgttgttgaggtgtcaatggagagcacgagcgtctactggattccaatatggcgtgtgctgtttccacacttcaaactgaatcttgccaatccgtatttcatcaagcagctccctggtcgcaagagtgacgtgaaggatgcacagtggattgccgagtgtacgatgaaggagctcgtacgtagcagcttcgtacctcctgagataatccaacagctgcgccagtacgaccgtcgtatattcgacctcaacgaggagatagtaagaaagctgtccaaacttgatgccgtgctgcaacgctgcaacatacgtctgagcaactacgtttccaatgttgacagcaaaagctataaagccgtggtgagagcaatctcacaagggattaccgaccccgaagagttggtgaagctgatacatgggcgtatcatcaaacaccacggcatggatgtcattacagcatcgctaaaaggcgtggtaagccttgcggagattgacatgatatcacaactgcgtgatgaactcgacatggcggaggcacacaaggaaaaatgccaagccagaatgcttgagatttgtgaaagggaattccctgaagagttgaaacggttacagaccatacccggcataaaggaacgtgcggccacatcattgattgctgaaatcggaacggacatgaacaagttcgaaacggccaaccacctcgcttcatggagcggtctaaaaccgagaaacgacgaatccaacaagaaaatcaagtcgaggagtattactcacggaaatgtatatctccgcaagacaatcatagagtgtgcatgggcagccagtaggacgaaggactgcttctttagccgattctcattccatcagacgcaagtgaggaaaaagaacaagatgaaggtcctggtggctgtggcaagaaagatgctcatcgccgtttggcatgtgttgcatgacaacacaatttatattgacttcactactgatcgtaaaacatcccgaacaaagggatgaacacgatataccgcctatcagcaggttattaactttgtgatggtaatacctcgtttacaaattaaccatactgacgggcggctatggaagccagtttgagtacaaactcgaagaggaaagtataactatatgaatagacccttgcttgcgtttgggtcaaggtttttgtacgccttattttaattatactgatgtttagttaccttttgcggagatattcatttttgttttatagagg

SEQ ID NO: 431 - DNA, 1611 bp, unidentified
  source 1..1611: mol_type = unassigned DNA; note = element_023b80b
  misc_feature 1..2: note = core
  misc_feature 3..274: note = LE
  misc_feature 275..1492: note = CDS
  misc_feature 1493..1611: note = RE
  misc_feature 14..294: note = bridgeRNA
ctactacaatatatttatggttaataccccttacagccagtaaggaattacccatcttgttgcttaagctgttagaatgagtaaggcaataggtctggccgttacctcctaggactttacgtccgtagaacagtcagccaaccggccctcattcgcagcattcgttttacgcaggttgaacccataggcgttcgtgtgatacccagtagattgaacaggcaatgagtaaatccggtattgaccattgctaatacatctcaaaggaatatctgttatgaacgctgttggtattgatgtttccaaaggcaagagtaccgttaccatccgcaggcccggcgatgtggtcgtcatgccgccctgcgacatccgccacacccagtcctccatcaatgcactgatcgagcagatcaaaaaccttgatggggaaacgaaggtctgcatggaacacaccgggagatactacgagccggtcgccacatggctctccgatgccggtatctttgtcagcgctgtcaatcccattcttatccgggagttcggggatgattccctgcgctctcccaagaccgataaggcggattccaaaaagattgcacgctatacccttgaccgatggacaaaactgaagcaatatggaagcatggataaaacacgcaaccaactcaaaacaatgaaccggcagttcggtttctatatggctcagaagactgccatgaagaacaacctcatcgccctgctcgaccagacctatccgggcgccaacgatttctttgacagccccgcacgcagcgacggcagtcagaagtgggtggattttgtccacacctactggcacgtggactgtgtacgcagtaaatccctttctgcctttacggaacactatcaaaactggtgtaagcgcaaaagctataatttcagcgcagaaaaagcggaaaaaatctatcaggcatcctgcgacctcattgccgtgttcccaaaagatgacagcacaaaaatgctcatccggcaggctgtcgcaatgctgaacaccgcttccgaaaccgtggaaacacttcgcctgaaaatgaacgaggccgcttccacacttccggaataccctgttgtcatggcaatgaatggcgtcggccccacccttggcccccaactcatggctgaaatcggggatgtgatgcgcttcacgcaccgtggagcattgacggctttcgctggcgttgaccccggaaagaacgattccggccaacacatccagaaaagtgtacctacaacgaagaaaggttctccgaacctgcgtaagacactcttccagatcatggacggacttatcaagcgttcgcctgttgatgaccccgtatatgcttttatggataagaagcgtgcacagggcaaaccttattacgtctacatgaccgctggtgcaaacaagttcctccgcatttattacgggcgggtaaaagaatatcttgctttcctttccgaagcggaagaaatctaaaacaactccatcactttatcagaccggcgttctgcggtggtctggtttttgtaccttcaattcaacctgtataaaattttcaaagttcacaaatttctgcttgactttttttttgcaga

SEQ ID NO: 432 - DNA, 1406 bp, unidentified
  source 1..1406: mol_type = unassigned DNA; note = element_023eb55
  misc_feature 1: note = core
  misc_feature 2..121: note = LE
  misc_feature 122..1141: note = CDS
  misc_feature 1142..1406: note = RE
  misc_feature 1171..1406: note = bridgeRNA
atgaaatgaacgtccccgcctaccgctacgaagcaggaagtggaccctcacgggccgacggcatcagagtgcccaattgagaagatcattagatcttcataggctaaccggagggtccaaaatgaactatacgacggtcggagtggatgtcgccaaaaatgtgtttcagcttcattgggtcgatgctgacacgggtgaaatcgtcagcaagcaaatcaagcggtcgggatttcttgagcactttgcgaaccgagctccctgcctcatcgggatggaggcttgcggaggcgcccaacattgggcacgacggctgatttcgatgggtcatcttgtgaaactgatgccagctaagttcgtcaaggccttcgtgattggcaacaaaaatgacgccgctgatgcacgcgcgatttgggctgccacgcaaatgcaaggtaaggaggttgcagtaaagaccgaggcgcagcaggctgtgttggccctgcacagaatacggcaacagaaggtcaagttccgcaccgcgcagatgaatagtctgcgtggattgctcaccgagtatggcgaagtgatgaacaagagccgttcagcattggacagggcaatacccggggtgcttgggaaattgtccgagcgcctgccagccatgttgatagattcattgcgtgaactgtggaacgagctcgaaactctggatcaacaaatcgccgcgatagaacaacgtttgcagcgttggatgaaagaagatcgggcatgcaaagctatcgcggaaattccgggcgtcggcttgctcacagcgacggccgcggtagcgacaatgggagacccaaagtccttcaagtcaggccgcgaattcgcggcatggctcggtcttgtaccggcgcaaactggcacaggcgggaaagtgcggttactaggaatcagtaagagaggagacacgtacttgcgaacgttgttaatccacggcgcgcgcagtgtgctctttcgcatgaaagaaccaggagcgtggctcgcgcagatgaagcagcgacggccagcgaacgtgataaccgttgcgttggccaataaaattgctcgaacgatttgggcggtcttggcccacaacacgccttatcagaaaaatcatgtgagcgttgtgccaggatagctgaggtaacaacagccagactttgtagtacgaaatttaatggttgcgttggtaattgagtgtgatgacaagacaggtcggaccggggctcgctaaacctgaatttctttatgggcatcaagctcgtagcgaaaatgaggtgcgagtcagcggatttcatcggggcccgcagcgtatcggctgcaacaaggccgcatataaaactgcaacccattctgtcgaatcaaatgctcgaaaccctggcgcaaacggggacgttcatata

SEQ ID NO: 433 - DNA, 1225 bp, unidentified
  source 1..1225: mol_type = unassigned DNA; note = element_0243c78
  misc_feature 1..2: note = core
  misc_feature 3..252: note = LE
  misc_feature 253..1203: note = CDS
  misc_feature 1204..1225: note = RE
  misc_feature 31..207: note = bridgeRNA
cttatatgttgaaagtgttctccagaagtggagaatttattagggacgcttagtaaaaggacagagagatcttgtgaccaggcctagggtaagaccttccatgccagattaagacctttgtcctcacacactataaactgaacggtatcttaggcaggacacgactcctagcctgtattcataaggttagtaaagccatagtgtgaacttaccaagcgagactaaatcctatcacatattaggcggtttatcatggcgacatacattggaattgacataagcaaagacacctttgatgcggcaacaagtgagcagaagcaaagcatcatttttaagaacactgtagcaggatataaaaaattcaaaacttgggtttctaagtttaatgaacctcatgtttgcatggaagcaacagggaaatattatttggggctagccacctctctttaccaacaaggcgtttcagtctcagtcgtaaatccattaagaattaaacgatatgctcaatcgggattaaatagagttaaaacggatagtgaagatgctaaggttattgcgcaattttgtaagacagaaaaattggtgctctgggcgcctgataagcccgtaatacaagagcttcaagagtggtataaacttaaagagcttctaacacgccagcaaactcaattcaaaaaccaactgaaaagtggattaaattcacgcgtaagaaaagttcaagaaaagcaaattcagcagattgaaaaaagcattcaaacggttatcgctaaaattaaagaatgtattcaatcagataaagagctttgccaaagcgtaaaacttcttgaaagcattaccagtattggtgagaaaacagccatggacttaataacgtttatcaaagatattaagcgttttgacaaagcaaaaaacctggctagttttgcagggctgacacctcaaatcattcaatctgggacgagtgtaaatagctccaggttgtctaaaatgggtaatgccaatttaaggaaatgcctgtacatgccagccattaatgcaatggcttacaacgtgccattaaagagatttgcagacggattaagggctaaaggcgtagcaagcggaaagattaaagtggctgtcatgcgtaaattaattcacattgtgtttgctgttttaaacagtggcaaaccttttgatccagaatataagatgtgtgtttgacttaaagaatcaaacacggtat

SEQ ID NO: 434 - DNA, 1405 bp, unidentified
  source 1..1405: mol_type = unassigned DNA; note = element_0243f85
  misc_feature 1..2: note = core
  misc_feature 3..87: note = LE
  misc_feature 88..933: note = CDS
  misc_feature 934..1405: note = RE
  misc_feature 1171..1391: note = bridgeRNA
gatggggtggatggctcccgctcccggcatcagagtgccaatttgtggaagcgatcaagcaaccacgagcgaagggagccacccgccatggaaattaccaccatcggccttgatctggccaagaacgtttatcaggtccacgccatcaacggctcgggagaagttgctgtgcgcaaggcgctgcgccgggcgcaggtgctgcggttttttgaacgacttgctccatgtctggtgggcatcgaggcgtgcgggacgagccaccattgggctcgggagatcagaaggcttggtcatgaggtacgtctgatgcccccggcctatgtgaagccttacgtcaagcgtgggaagaccgacgcgagcgattccgaggcgatctgcgaggcggtatcgcgcccgacgatgcggtacgtcgcgatcaagtcatgtgagcagcaggcggcgctgacggtacatcggacgcgggacctcttcgtcaagcagcgcacgcagctcgtcaatatgatccgtggtctgctggcggagtttggtattgagatacggcgtgggattacgcacgcgctgagtctcgccgagcgcattgtggcgggcgaaatgctcggcataccggcgctggcggcaaagatgatcgcgagcctggccgggcagatactcgatctgcaggcgcggctacgggagatcgaacgtgagctcctcgcttggcatcgctccagcgacatcgcccggcggcttgcaacgatcccgggggtgggcaccatctgtgccacagcgttcgccgcgtccgtcaccgatccacaccagttccgctccggacgacagtttgccgcctggccgggcctcacgccgctgcagcattcgagcggcggcaaggaacggctggggggatctcgaagatgggcgacaaatatctgcgccggttgctggtcgtcggcatgacctcgctcgttcggcgcgcgaagtacaagcccgatgccctcgatgcgaggctggcccatctgctgtcgcgaaagccggtccgtgtggtcacggtcgcgctcgccaacaagacggcgcgggtaatctgggcgatcatgacgcggggtgggacttaccgcgcgcctcaacccgccggcgcagtagtcgcttaagcagcattcacccaacagggaaaaccaggcgaaccaaaaccagcttcagaggttgcgaggacgatgcgatgtgatggcgaaccggtcagaccggggatgaggataacccgccgaacgtccagggcgtcacagcccgataagcagaatgggaccttatccgcggataccatcagggccagcggtcatgtacgactgcatcaacaggccggacacaagactgcacccgaccaaaacgcaaaaacatcaaatcaacccttgcaatgcgggagccatccacacaa

SEQ ID NO: 435 - DNA, 1378 bp, unidentified
  source 1..1378: mol_type = unassigned DNA; note = element_0244740
  misc_feature 1..2: note = core
  misc_feature 3..85: note = LE
  misc_feature 86..1123: note = CDS
  misc_feature 1124..1378: note = RE
  misc_feature 1149..1364: note = bridgeRNA
gatggggtggatggctcccgctcccgacctccaagggccaatgtggttgctgtcatgacaacctgagcattgggagccacccgagatggagattaccaccctcggcctcgacctggccaagaacgtctttcaggtgcacgggatcagcagcacgggcgaggtcgtcgttcgtcgcgcgctcaggcgggcgcaggtgatccccttcttcagcaagcttgccccctgtctcgtgggcgtggaggcctgcggaaccagtcatcattgggcgcgggagctgaccgccttgggccacgaggtccggctgatgccgccggcttacgtcaaaccgtatgtgaagcgcggcaagaccgacgccagcgacgcggaggcgatctgcgaggccgtgcagcggcccaccatgcggttcgtgcccatcaagtcggttgagcagcaggcggcgcttgcgcttcaccggacccgcgacctgctggtgcgccagcgcacccaactggtgaacatgatccgcggggtgctgggcgagttcggcatcgaacttccgaaggggatcacctacgccctggctttcgtccggcgggtggtcgccggcgaagccccggacatccctcagctcgccgcgaaggcgatcggggcgctggccgagcaggcgctggagacgcaggctcgcatccgccagctcgagcgtgagctgctggcatggcatcgctccagcgagctttcccagcgcatcgcgaccgtccccggcgtgggcctgctcggcgcaacggcgctggcggccacggccaccgatccgacgcagttccgctcaggccgccagttcgccgcctggctcggattgacaccgttgcagaactgcagcggcgggaaggaacggctcgggaggatctccaagatgggcgacaagtacctgcgcaggctgctgatcaacggcatgacctcgatcgtcgcccgcaacgcgcatcgccctggcgtggccgacgcgcgggtcactgctctgctcgcgcgcaagccgctccgcgtcgccaccgtggccatggccaatcacgccgcccgcgcgatctgggcgatcatggcgcgtggcgagatctatcgcgcgccggcgccgccggagcccgtagccgcctgagcccacgcgatcggcccacacgaggaatgagttgcgaggacgatgtgaactgatggcgagccggtcagaccggaggcgaggacaacccacggaaggtccagggcgtcatggcccgcaaagcagatagggacctcgtctgcggaaaccatcatggccagcggccgaagcgccgcgcgaacaggccgaacacaagactgcatccgaccaccgccgaacatcacgtctgcccttgcaatgcgggagccatccacacaa

SEQ ID NO: 436 - DNA, 1209 bp, unidentified
  source 1..1209: mol_type = unassigned DNA; note = element_024ce75
  misc_feature 1..2: note = core
  misc_feature 3..302: note = LE
  misc_feature 303..1181: note = CDS
  misc_feature 1182..1209: note = RE
  misc_feature 8..196: note = bridgeRNA
cttgtatctcttggtgacgaatgattagctctcttcatcacctggagttagtgagaatgtttgaccacataatgtttaacattgcactgtagattattccctaactccattttcttcaatactggatggtatcctagcactcagcgttagtctgatgatgctgtatgcacaagtggagtcggttgatatgttaataaacgttggaattgatgttggtaaagaatcactagacctttgtgttttgcttgataagacaactggcaagatgaaatcaaaaaaattcaagaataaaaaagaaggttttgatagcgccttcgaatggattacaaaaacaacctgtaatgcaccagggaaaaacgttaatcacaatggaggcgactggcgtataccatgagggagtagcttattacctatacgcccaaggctttcaaatatttctttcaaatcctggaaaggccaaaaagtttgcacaatcgttagggtttgttcacaaaacagacaagtcagacgcagcgatgcttgcaaaatacggttcaatacagcttgataatatagctttttggatacctgaagatgatgacgttcgtgttattaaaacgctgattcgtcgacttaacgctttagaaaaagataagctgagagaaagcaaccgtcttgaagcaagtactataagcgatgcagcagagcgggttattcaatccacagtatacttaatatcagttctggacggcgagataacggagattcaacacgaaattgatagactcatatcctgtaacccaggaatgaataaaaatcgtgagttgttgcttagcgtgatcggcataggaaaagtcatggcgagggagttggtatatctcttttcggcaaagaagtttacgtccgcaaagcaagtggcagcctacgtgggattaattcctcgactcaacgaatcaggagtatttaaaggccgtagctctttgagtaagtcaggcccttctaggatacgctctaagatctttttagccgccgtatgtgctggtactcataatcctgatataaaagcacaaaagatcaggctcacccacgctggaaaaacaaagatgcaagcattgggagttgccatgaggaagctaattcagatttgttacggcgtgattaaaaaccaaacaagatatcaacctcaaatcgtattaatttaatattgaacacgatcaggagagatggtat

SEQ ID NO: 437 - DNA, 1368 bp, unidentified
  source 1..1368: mol_type = unassigned DNA; note = element_02593ed
  misc_feature 1..3: note = core
  misc_feature 4..282: note = LE
  misc_feature 283..1356: note = CDS
  misc_feature 1357..1368: note = RE
  misc_feature 48..268: note = bridgeRNA
ctgctattaaagaactaccggcgtttccgcggcctcgcgaagcggggcgtcggtagggtccgcgtccgaaccggtgcggtctgactcatttctttaccggccgcgagcagtgtggcgtgcctgcaatcgtcagatccgtcgaccgtgcctggttcggcgcggaaccgccggacggaatgacctgataggagcgcgaccaagcatcccgtagcagtatcgtccccgcccgacggcttcgccctttcaccccatccaggaaatcccggtcacaggaaggccgcaatgcaatccaccatcgccgcatccacccaaccacaggtcaccgtcggtgtcgacacgcacaagcagttccacgtcgcccacgccgccgatcagctgggccgtccgctgggcagccaccgcatggcagccagcaccgccgggtaccgccaattcgtgtcctgggctcacgggctgggccagcttgtcatcgtcggtatcgaaggccccggccactacggcgcgggcctggcccggtatctgcgcgccgagggcatcccggtcaccgaggtcggccgccccaaacggcagcgccgggcacgctacggcaaatccgacgatgctgatgcggccggagccgccgcgatcgtgttggccggcgaagccctcggcgaccccaagtccgccgacggtgctgccgaaatggtgcgggtgctgcgggtggcccgtaccagtgcggtgcgcgcccgcgccaaggcctacaccgccctgcaggaccttttggtcaccgctcccgcagcgctgcgtgaacagctggccggcctctacaaaaagcgtctcatccaggcctgcaaacagttgtctgagtccgaaacgccaagcagtccaaccgatgccatcacgatggcgatcaaatcactggcggcgcgctgcgagcaactcgacgtcgaagccgcccggctcaaacaccacatcgacaccatcaccgccaccgccgcaccgcagttgcgcgccgtctacggtgttggccccgacaccgccgccacgctgctggcagcgatcggcgacaaccacgatcggatcaacggcgatggcgccttcgctaaactctgcggagtcagcccgctgcaggcctccagcggcaaaaccgtccgacaccgactcaaccgcggcggcaaccgtgatgccaaccgggcgctgcatgtcatcctggtcgtgcggctgcgccgccaccaacccacccgtgactacatggcgcgccgcctcgccgaaggcaaaaccaaaaacgaggtcatgcgctgtctcaagcgctacctcgcccgcgaaatcttccacgccattcagccgtcaagaaaggcaacaaaaatcgttgcctgaatataggagcat

SEQ ID NO: 438 - DNA, 1389 bp, unidentified
  source 1..1389: mol_type = unassigned DNA; note = element_025a32e
  misc_feature 1..2: note = core
  misc_feature 3..88: note = LE
  misc_feature 89..1117: note = CDS
  misc_feature 1118..1389: note = RE
  misc_feature 1088..1376: note = bridgeRNA
agatggagtggttgccgccctccctagacggcatcgcaatgtgccaaggtcgtgatgttcaacgccacgcgcagaggaggacggcgagatgaagaatatgatgatcggggtcgatctggcaaaggcagttttccaagttcatggcgcccttccaacaggggaggtccagttccgcaagaagctgtcgcggaagcaattccccgcgttcatggcgcagcaagagtccagcatggtgattttcgaggcgagcggcagcgcacatttttgggcccgtgagatggaagctcttgggcaagaagtaaagctgatcgcaccacaatacgtgcgcccctttgtgaagcggcagaaaaatgatgcagccgatgctgaggcgattgtcatcgcggcacgccagcctgagatgcgtttcgtggaacccaaaacagtagatcagcagtcttgcgcggcggtcttccgcggccgggaacgcctggtgcatcagcggaccgccgatgtgaacgcactacggactctgctgtatgagcacggctatgtgtttcctgtcggcatgtcccacctcaatcgtatgacggcgcttgtgcaggatgagactgtcgacttgcacacgctgatccgggaagagtgcttggatctactcgcgcagattgcagagaaaactgcgtgtatcattgaacgcaccacgaagctcaagacgctggccgccgagtcagacagagcccgtcggctacagacgatgccgggtgttggaccgctgacggccgttgcagtcgaagcgttcggtcccgacatggcggaattcaagactgggcgcaactttgcggcctggttgggtcttgtgcctcggcaacattcttctggaggcaaggagcgtcttggtcgcatgaccaaggctggtcaggccgatattcgacgcctgttgatcatcggtgcaatgtcgcgactgaactggctcggacagagaaccattgtggagggtagctggctgtcacatatgttgatgcgcaaacccaagatgctcgtcgcgaccgcactggccaataagatggcccgccagatctgggcgatgctgacaaagaacagagatgacagagatccggcgatagcggtcggggcatgatgcttatgtcgaaccgctagtgccggtgccgaggggagagtgagaatacgacgacctgaatgggcaaaatgatcgaacagatctggattgggaagaccagttagtcgctacgagcattgagctcgaaagtcagatttggacccaatctgctgatcaccatcccggcccgcggcttctggaaacgccgcattatgaaggcctcacagaagttcgcgctcgattacacgccaatacggtcgaaaacttcttgcactacgggcggcaaccacaga

SEQ ID NO: 439 - DNA, 1462 bp, unidentified
  source 1..1462: mol_type = unassigned DNA; note = element_025e5da
  misc_feature 1..2: note = core
  misc_feature 3..257: note = LE
  misc_feature 258..1430: note = CDS
  misc_feature 1431..1462: note = RE
  misc_feature 6..230: note = bridgeRNA
ctactataaagattaagatttggtatcagcagccagtaggctgatgatataataccgtcgtatgggtgaggcttcctttccctccttgcggcagagtccgctgaatacaagagtggaacctctcccttcacgggatttcattgatgagccggatgaagcagcccgatgtgagctgtcttctcatttcgcagtagggtatgacccgtggagaacgagaggcgcagccatacgaaacctgaaccaaaggagtgttccgcatgtacatcgtaggcatcgacatcggcaaacgtaatcatgaagccagtatcatgaatgcagcgggaaaacagtatggaaagcccatttgttttgccaactctcataccggcttcaacaaactgatggattgggtaaagaacatctcaggagcggatgatgttgtctttggaatggaagctaccgggcactactggctggcgctttacacccatttgtgtcatgagggatacaccgtccatgtaatcaacgctgttcagtcagatgctctgcggggaatgtatatccgccaggccaagaatgacagcagagactcatttatcattgccgaggtcatccgcttcgggcgcttttgtgaaactgctgtttcagcaccgaaactccatgcattgcgggaactatgccgccatcgattctggatcgttgattctatttcggatctaaagcggaaagtaatcgcgctgctggatcaggtgttccctgagtatgaaaacctttttaccaatacctttgggaagacttctttacaacttctctccgaatacacgacaccggaagaactgcttgctgttgatacggacaaattggcagagacgatttacaccgccagccgtggccaccatggcattgagaaagcccaggagattcaaaacaccgcacgcaattccttcgggatcctgctggcttccgagtccattgcccttctcatccgccaatacattgaacagattcgcttcgtggaaaagcaggttgatagaatcgacacagaaatcgctcgtttgctttctgcttttgacaaccaacttaccaccattacaggtattggcccaaccctagcggctacaatcctcagtgaaattggcgatatccgcaaatttgcgtcaccgggcaaactagccgcctttgccggtattgatccgactatgaaacagtctggtaactttgttggcagccatgtccatatgtccaaacgtggatcgccttatctgcgccgggctatttggcttgctgcaactattgctgccttcaaagacccttccatctctgtctactaccagcgcaaacgctctgaagggaaatcccatctcacagcactgggacatgtttctcgcaaaatggtgaatatcatcttcgctgtccttcgtgacaacaccccctattccccagctatttagaaatcttctcttgacaatcctttatagccggt

SEQ ID NO: 440 - DNA, 1370 bp, unidentified
  source 1..1370: mol_type = unassigned DNA; note = element_0260eb0
  misc_feature 1..2: note = core
  misc_feature 3..80: note = LE
  misc_feature 81..1115: note = CDS
  misc_feature 1116..1370: note = RE
  misc_feature 1103..1357: note = bridgeRNA
tgttggggtggacggcccccgacggcatcagctgtgccagactgcggttgtttgcaacgacaaccaagaggagccgtccggtgacgattatcaggatcgggttggatacatccaagcatgtctttcatgtgcacggcgtcgatggagatgagcaacccgcgttgcgccggcgactgcggcgcagccaggtcgagaagttcttcgccaagctgccaccgacgcggatcgggctggaggcatgcggggcgtcacatcactgggcgcgggtgttgcgtagtctcgggcacgaggtggtgctgatcccgccgcaatacatcaaaccttatgtcaagcgcggcaagaacgatgcgatcgacgccgaagcgatctgcgaagcgatgagccggccggggatgcattttgtgccggtcaagagccgcgacgaacaagcagcgttgatgctcttgaaggtgcgtgacctgctcatgaagcagcgcacaatgctgaccaacgcgatccgcggccatgcggcggagttcggagtgatcgcgaccaaggggccgcaaaacctcgcagaattgctcgaacggcttggcgaagatgcaaatgtgccggcgccggcgcgcgaattgctgaacagtctggccggccagatcgccgcccttgaggtacggctggaggcgctcgaggccaaactgaaggcccatcacaaagccgatccccgcagccggttgctggcgaccatccccggcgtggggccgatcacagcgctcagcctgaccctcaaggtgcctgatgccacggtcttccgctcgggtcgccacttcgccgcctggctcgggatcaccccgcgcgagcattcgaccgcggggcgacagcggctcggcaaaatcagccggcaaggcgatgaaggcttacgccaatcgctggtgctcggcgctaccgccgtcatccagcaggtcaagcggcgcttcaaagcgcaacgagtgagccgcaccgactcgccctggcttttgcaattgctggcgcgcaagccggaaaaggtcgcggcggtggcgctggccaacaagatggcccgcatcatctgggccatgctggtgagcggcgaactctaccgccaaccgcaggcggtctgagccgcacaccgcagcaccgctctggcgcttgcaaggacagcagcaaagatggcgatcggtcggtccgaggattgggacaacccgtgggacgcaatggtgcttcttcgacatcactgccgtgtttgggacctgatccgcgcaccccatctgggccagcggccatccgtgccgcacacaaaggccggacatatgaccgcaatcgaccagaacgtcatttcgcgctgcaggccttgcgagacgggggccgtccacata

SEQ ID NO: 441 - DNA, 1461 bp, unidentified
  source 1..1461: mol_type = unassigned DNA; note = element_0264524
  misc_feature 1: note = core
  misc_feature 2..235: note = LE
  misc_feature 236..1372: note = CDS
  misc_feature 1373..1461: note = RE
  misc_feature 11..233: note = bridgeRNA
cccgttaccttgttggtggtcccgggtcgtccggggctgggccagctgctgtgggcatgatgtcttgcccctgtccttagatgatccggggggtgttgtcacccgcagcagccgggcactggtgaccgctgataaggggaacgacccatcgagtgtgaggtctttcgtaacgtgggtgcggaaccggtcgtccaccggctggccccacacccatgcagcgagaggcggcacgaagatgaataccgaggacatcgaggtcttcatcggcatcgacgtcggtaagagcgagcactgggctacggccctgagccgggaagggcggaaggtcttcgacaaggccctgcccaacgacgaggagcgcctgcgtgctctctacaagaagctggccgatcacggacacctgctggtggtagtagaccagcccgccaccatcggggccctggccgtggcagtggctcaggacatgggcatcaccgtgggctatctgcccggactgtcgatgcggcgcatcgccgacctgacaccgggcagcgccaagaccgacgccaaggacgcggccgtcatcgccggcgcggccaggagcatgccccacaccctgagagccatcaacgcctcggacgaggacgcggccgccttgtcgatgctcacgggattcgacctggacctggcccgccaggtcaaccagagcgctaaccggatccggggcctgtacacccagatccaccccaccctcgagcaggtgctggggccctggctggagcacgacgccgtcctggaggtcatcgccgcctggcccaccccagccgacctgaagcgagcgggcaaggcaaggatcgacgccaggctcaagaagcacgggtgcaggcggcacgccacctgggccggccagatcgtctcggccttggagcaccagagcgtggtggtcgccggcaccgacgccgccgcagtggtgcttcctcacctggccaggcagctcatctccctgcacgctcagcgggccgatgtcgccgcccaggtcgaggccctagtggaggcccaccctctttatgaggtcctgatctccatgcccgggatcggggtcaggaccgccgccgtcttcctggccgagaccctgggcaagaccttcgacaccggcgcccagctggcctcctacgccgggctcgctcccgtcacacgccgctccggctcatcgatccgtggcgagcacgtctcccacggcggcaacaagaggctcaagcgcgccatgttcctgtccgccttcgcctccctgcgctccgaccccgtctcccgggcctactaccagcgcaaacgagaccaaggcaaaccgccttgggccaggccgtcctcgccctggcccaccgccgcatcctgaccctgcacgccatgatccgagatggagccctctacgacccacaaccagccacgaaactacccgccgccgcttgacacaccacatagggg

SEQ ID NO: 442 - DNA, 1364 bp, unidentified
  source 1..1364: mol_type = unassigned DNA; note = element_0266862
  misc_feature 1: note = core
  misc_feature 2..85: note = LE
  misc_feature 86..1153: note = CDS
  misc_feature 1154..1364: note = RE
  misc_feature 1136..1356: note = bridgeRNA
caatgggatggattcctccccaccctctaccggcgccggtgcgccatactgagagggtgaggtcaccggctgaggagcgcatcccatgagcatttcacgcgttggtgtcgatattgccaagtccgtctttcatgtccacggcgtcgatcgccatgatcaggttcaatggcgcggcaagtaccagcgtgacaagtggctggatgccatcgtcaagcgcgtccccgcgggcgccgagatcggcatggaagcgtgtgcctccgcccatcattgggcacgcgtgctgcaggcgcgcggttaccacgtcaagctgatcgccgcccagttcgtgaagccctacgtcaagagtaacaagaacgatcgcgtggatgccgaagcgatctgcgaggccatgaaccggcctcacatgcgcttcgtcgccgtcaagacggtcgcccagcaggatgttcaggcggcacgcagtgaactggttcagcagcgtaccgccaaggccaaccagattcgtggcctgatcggcgagtacgggctggtggcgcccaccggcattggccagctgcgcgcggccttgccacgctggctggaggatgccgagaacggcttgaccgacgactttcgtgtcttgttgccgagtctcgccgaggatcttcgccaccttgatgaccgcatcgtcacggtgacagaacgcattgagcgccacgcccagactgaccccgtcgccaggcgcctgatgaccctacgcggcgtcggcatattgaccgccagtgcattgaccggcgccctgggcgatgctcaagccttcaaacgcggccgcgattttgccgcctcgctggggctgacaccgcgacaacacagtaccggcgggcgcgaccgccagctgggcatcagcaagcgcggcgactgttatctgcgcaccttgctggttcatggggctcgcacggcactgcgatggagcgaaggccgggaggacaacctcagccactgggtcaggcactggcccaacgcaagcacgccaatgtcgtggtcatcacgctggccaacaagacggctcgcctcgcctgggcgatcacacgccacgacaaggcctatgaccccgacctggcatcgcaggcggcgtagcaccggaaacctgaggcaccccaccatcaacgattgctgagcatgctgctagatggcgaacaggtcgaaccgacgtcagaaaacccctgtggatcgctgagccatagagctcgtgtaagcgaatgggagctgacgtgcgaatagcccattaggatccgatgccgttggcatctttcataagaccggatatacgtgtgcagtcgtacctaccgcctatcgtgcctcatgctggcaaacggggagtccatata

SEQ ID NO: 443 - DNA, 1899 bp, unidentified
  source 1..1899: mol_type = unassigned DNA; note = element_0267f89
  misc_feature 1: note = core
  misc_feature 2..416: note = LE
  misc_feature 417..1445: note = CDS
  misc_feature 1446..1899: note = RE
  misc_feature 9..233: note = bridgeRNA
cgttaccgtcttcgtggctccgcaatggggcctccggccttcgggtccggcatgacttcccccccttgttgttcatgatccggggggtggtgtcaccgggtccggaggcatcgacggaccgctgatgaggggcttgagcaccggcttcacccacgccggaagagctctccgtaacgtggatgtggcaggtcggtgccctggcaggccggacgaaagcgtgatggaggggcctgcacgtgatcgacaccggcgacatcgacgtcttcctcggcctggacgtcggcaagggcgaacaccacgccaccgccgtcaccccggccgggaagaaggcattcgacaaacgcctgcccaacaccgaacccaagctccgcgagtagttcgcgaaacttcaggcaaagcacggaacggtgctggtcgtggtcgaccagccggcctcgatcggggctctgccgctggcggtggcgagggacatgggctgcccggtcgcctatctgcccgggctgacgatgaggcggatcgccgacctctaccccggcgaagccaagaccgacgcgagggacgcgttcatcatcgccgacgccgctcgcgccatgcctcacacgctgcgggcgatcgacggcgaggacgagaccatcgccgagctggagatgatcgtgggcttcgacgacgacctggccggcgaggcaaccagggtcgccaaccggctgcacggcctgctgacccagatccacccgtcgctggaacgggtgctggggccgcggttgcagcacccggccgtcctcacgctgctggaacggttcggatctccggcccagatccgcaaggccggccgtcgacggctcgtcaccctgctgcggccaaaggcgccgaggatggccgagcggcttgtcgacgagatcttcgccgcgttggacgagcagaccgtgaccgttccggggaccgaggctgccgcgctgatcgtcccgagcctggccgcctcactgacggccgtgcttgaccagcgcaagctgctggccgggcggatcgaggaactgctggaggctcaccctctttcgaaggtcctgacgtcgatgccaggggtcggcgtcaggaccggagcccgcatcctgatcgaggtcggcgacggcagcaccttcccgaccgccggccatctcgccgcctatgcgggtcttgccccggcaacccgcagctcgggctcctcgatccgcggcgaacagccctccaggcgaggaaacaagcaactcaaacgggccttcttcctctccgcgttcgccgctctgggcgacccgatctcccgggcctactacgacaagaagatcgcccagggcaagcaccacacccaggccctgctctgcctcgcccgacgccgggccgacgtcctcttcgccatgctccgcgacggcaccttctacgaaccccagccagccacggcagacggcgtctaggaggaagtgtcgtccccagccggaaggtgaacagccacgtcatagttggcgatccgccccgccagcaccctcgggctcacgccatgaacgttgtcccggtcagggtcagcacctgcttccagaagaagccgaatcgtcccaccttcgccccgcgaacagaacaccgccctccacaacggcgtattgccatgacggtccacgacatcgaccgccgcacccgcggccagcaggacttcgacggcagcgggcacctgcgcctgagcagcaaaatgcagcggagtccaaccctcggcatcgacagcccccgggtcggcaccctcagccaacagcaccctcaggccgtccacgtctccgcccccagccgcatagtgcaccgcggcccgccccaaccgatcccgatctgtcatgccgacaatcctcacccggcttgacgaaagagataggggcacccccc

SEQ ID NO: 444 - DNA, 1562 bp, unidentified
  source 1..1562: mol_type = unassigned DNA; note = element_0271b29
  misc_feature 1..3: note = core
  misc_feature 4..237: note = LE
  misc_feature 238..1428: note = CDS
  misc_feature 1429..1562: note = RE
  misc_feature 7..257: note = bridgeRNA
attcataatgtaagagtaaggtctatccgaccttgctcttttcctttataatggaggcaccggtctgacgaaatttccgattgggacatcacgcccgccgacaaatgtgtcagccagcctccatcgtttagtgctcgattcagcaagttgggacctagctcccgtttcacgattgaatatgtgcgtgccttggaaagagctggatagccgcataataataagaaagaaggaatgccaatgcttgcaataggaattgatgtttccaaatcgaaaagtgctgctgcgatcttgaatcaggatgggtccgttcacacagagccgtttgagttccatcatgataagccagaaatggatgctctcattaaatttatcaagaatcagaatcagtctgttactatcttgatggagaacacaggccactatcactatcccgttctgaaagcatttcaagccgcagatcttcctgtttgtctcattaatccatatcaaatgaaaaaatacggcgatatggagctccgcaaagcaaaaacagataagaaggatgctcttcggatagcacattatgccttggagaaaggatattcattagtcccttatacccctatggatcagaaatatgaggatctgcgtttccttgcaaggcaatacgaccagcgtatgggaaccttaaaggcaaacaaaactttccttattaatctgttggacgaaactatgccgggaataaccaaagtgctatctttaacgaccagagatcccgagacaagtctttcagtgcagtttatcaaacggtttaaatcctttgatcgtattcggaagatgggcagaacaaggttcctcgaaagttatgataaactctccagaaaatctcgaaatcgatgtgccggcagctgcggcttaatcatttatgagatggctttgaacagcatcacaacgcggggagaaaatgaatatacactcgccgctcaggaccagtgtgttgatttggtttctgaatcacagaaagcagcagattccatcatccagaagatgaaaacattagcagaaaccttgcccgagtatgaagttctgcgcgctatggcgggtgttggtgaccggctcggacctcttattctggcagaaattggtgacattcgtcgttttcatagtggaaaagctctcaatgcatacgcaggaaacgatgcccctccttaccaatctggaatgtttgagagtcacaatcgccacatatctaaacgtgggaatgcggctctcagaaagtattgttttgaagtcatgcaggctctcaaactggcacgacctcaagacgatcctgtctacctttttctggtcaaaaaggagcaggaagggaaaccgtataacgtcgccaagatggctggtgttaacaagttccttcggatttactacgcaagagcaatggaagttctataacaatagcaaatccgaatctcattatacataacttttttcaaatccacaaccatgtgggttttgtttctatactcttttttttgctttcttaaagcaaaaaaaattatttttctcttgactttttcattagcaag

SEQ ID NO: 445 - DNA, 1790 bp, unidentified
  source 1..1790: mol_type = unassigned DNA; note = element_027a933
  misc_feature 1..2: note = core
  misc_feature 3..107: note = LE
  misc_feature 108..1382: note = CDS
  misc_feature 1383..1790: note = RE
  misc_feature 1460..1709: note = bridgeRNA
agcattcctgtagtgcgctattttcaactttgaaaaaaatagagctcctcagtaagatatgagtatagataccactctaaaactcaaatctaaggaggaactcttatatgaagtttaaaatgcaagacaaacaaaatcaactaatagaaagaatttccgataaacatctcgttgttggtgttgatattgcccaacaaacacatgtcgcccgagctgtgaattatcgtggtattgtggttggtgatcctttaccttttgaaaatgacgaagatggttttgccaggttactagattggataatacagcttaaaaacaccaaaggtcttgatacagaaatcgttggtatggaacctacagggcattattggttaaacttatcagaatggctttacgaacaagatattgatgttgtgacagttaatccccaccttgttaaaaagaataaagaaaatagagataatactcagtccaaaagtgataaaaaagacgctctagttattgctgatatggtgaagaatggatactattcctttattcgtccaactacagaggctttcgaaaaactgagagtactgatgtctaatcgagatacagtagtaaaacgatttgtcagtgctgcgaaccaaatcaatcgttgggttgatattatttttcctgaacttagacaagtttttaaagacgtgaaaggcaaaggagcactcgctactctccgtttattccctacaccgaaagaattacgttcgatggaagccatcgatattgttaatgagtggagaaccgtgatgaagcgtcaacctggtattaaaaaagctcaagccctcattcaactagccaagaattctgttggtaatgataaagcacacgatgcatataaattgcacttaaaacaattacttgaggaatttgatctcgctacaacccaactcgaaatagtagaaaaagaagtatctgaagcgcttgaaagcattactttcaccgataaactgcttggtattaaggggttaacagaaataacgttaggtggcatcttaggtgaaaccggtgatttaagtcagttctcacatggcaattctctgttacgacatgcgggtttacatctagtcgaagcaagctccggtaaatggaaaggacaaattgtcctgtctaagagaggaagatctcgtctaaggcgatttttgtacctagcgacattgagtctggtgatgaataaccctgagtttaaagaacttcatgcccagaatgtcaaagtaaaaaagatgaaaaaaatgaaatctattatgaaactgattggcaagtttgcaagaatgatagtaggaattgcccgacgtaatgaaccctatagtccagaaaaagtacaacccttaacacctttagcagcctaacttaattgccttaaaactgaacaaatcaaacagcaagagttactttattgaatgttggcctattcgtaggatctcaaagaaagcacggagtactggaatacttaaacaaaagggcacagacccattccgttagcaaaaccggcctccaccccttggataggcataacgaaggaatgagagggcattagacccgttgagacatgggagggatagcctccaggggcggcgtggagaatgcgcgcatcatatggaaaaaaatggagtttctattcactcctctattcccacatgccttcatgtagcctttattatcaatactcattccacttacccgtctttgttcttacaagtggtttgaaatcctgcgaataagcgagtatttaagagatatatttatctaactgaggg

SEQ ID NO: 446 - DNA, 1371 bp, unidentified
  source 1..1371: mol_type = unassigned DNA; note = element_02835f5
  misc_feature 1..5: note = core
  misc_feature 6..248: note = LE
  misc_feature 249..1319: note = CDS
  misc_feature 1320..1371: note = RE
  misc_feature 31..227: note = bridgeRNA
cttttatttttacaaagaattattaaaggttgattatattgttgttgaaacaaggtataatcgacttgcatacgagacgattcggggctaggtaagatactgttctatatcgtaaaaaaggacttgtccgtatgcatttattctttggagtttgaacagtacttaaggcggtcaatgtgctagcttgaataagataaaaggaaaaacgaggaagaattagtcgataaccacttaattcattaatcgttatgagcgtacaaaaacaaagtattggaattgatatttccaaggacagcttcacggcttgtttctgtttattacaccaagatgggcacttacagttcagtgatgtaaagaaattcaagaataacaagtcaggatttaaccaactagtaaggtggactagaaaagtcaaacaagctactttaccaataggctttttaatggaagctacaggtgtctattatgagaatttagcgaatcatttatatgatataaagcagcaagttcatgttgttttgcctaacacctcaaagcattatttttcaagtcttaacattaaaactaaaaccgatgaattagacgcaaaagtgttaagtcaatttggggttgagagaatgcataagaaatggatcaaaccaaatgaaacctacttacaccttcgtaatttatgtagatattatgttcaactacaagagcaaaaaacagctctgggaaacatcaaacacagtaaagaaagtgcacatgaggttcagaagttgatccttaaaagtaatactaagttgattaaagaaattgacaaacaaattgtcgatatcaaaaaagaaatagaaaaactaattaaacaagatgagttattaagtaaaaaggtagataagctactgactataaaaggtgttggaatacttactatagcaactattatcgcagagacacttggatttcaatttgtaaaaaatgtcaaacagttgtctagttatgccggttacgatgtagtacagagagagtctggtacgtcaataaagggcaaaacaagaatatctaaaaaagggaatagatatattagaaacgctttgtattttcctgcaatggttgcttgtagatataatgaaaacttgaaaaagagttacattcggataattgagaagaagccatctaaaatgataggtcaagtagcaatacaaaggaaattattgattttaatttatacactatggaaaaaggacgaagagtatgatagcaattttgctaaaaagaatagctccacagaaagctgtgaagctacgcaggatagaatgattgaaaccattcttccttagaaatacaaaaataaaatatttttcctgttttacttggattttaaaacagtac

SEQ ID NO: 447 - DNA, 1721 bp, unidentified
  source 1..1721: mol_type = unassigned DNA; note = element_02851fb
  misc_feature 1..3: note = core
  misc_feature 4..68: note = LE
  misc_feature 69..1229: note = CDS
  misc_feature 1230..1721: note = RE
  misc_feature 1269..1486: note = bridgeRNA
aagatgctatggggcggcggcgaggatattgcatccatcgtcgctgatgtgaaccgatggagcaccccatgcagaagttgaacgacctaagccgatccctcacagccctcgaaccggacggcacgctgatcgctgtgatcgagatgagcctgtcgagctggctcgttgccggcatcgtgcctggcgttgagcgccagccgttgaagaagctcgcggtcgacgagagcgcattgctgaagctgctgcatcgatggcgggaggaagcggagaaagcaggacgcaggatcgagcgcattgtagtcgccttcgaggccggccgtgacggcttctggttggcacgctggctcaaggcgcgcagcatcgaggcccacgtcattcacgccgcgagtgtagcggtgtcgcgcgagcatcggcgggcgaagaccgatcgtctcgacagcgagctactcaaacgcgcctttctcggctggctgcgcggcgagcgtgatcactgcaaaatggtcgcgatccccacgataaaggacgaggatgccaagcggcccaaccgcgagcgcgagagcctggtcggagagcaaagtcggatcgtcaaccgaatgaaggcagcgttggttcggctgggcatccgcggcttcaatcccaagctgaaaaaggccgccgggcgccttgaagatttgcgcacgcccgaggacgaaccaataccgccgaacacgttggctgagctgcgtcgcgacatggagcgccgacggctcgtcagggatcagatccggcagattgaggaggcacgcctggtgcgtctcgatcacgcgcccagtgatggaccgcacgccatggtgcgcctgctcgcccgcgtgatcggggtcggcatcgagacggccgacatgctggtgcacgaggtgctgtcgcgaaacatgcgcgaccgacgggccgtagcccgttatgccggcctcactggctcgcctgacgagagcggcagaaaacgccgagaaaaagggctggcccgttccggcaatggtcgagttcggcgaggtatgattcaattggcgtggcggttccttatgcaccagaagaacagcgccttggcgcagtggtttcgagcccgcaccgagaacgctcgcggtactcgcaagcccatgatcgtggccttggcgcgcaaacttctgatcgccctgtggcggctcgtgcggcagggcgttgtaccggacggcgtcgttttgcgtccggcccaatgaacggaggacgctgaaaaaaccccgacagtttcggcctcgtccgtacgcttgtgacggagcgccgatgacggttcgaggtggcggaatcccgataagtcccttggctttcatgccgaatggaagaatgggtccgccgcttcggagcttcgctgccgatgcgcatgactgcatcatggttcgggtccttggacccaccgaatacaaggttgtggcgcgattagaccgcgcccgaaagcgagctcccctctgatcgtcatcccgaccgaaccaagcggtgccatcgtgctcgaagctgtcaaggtgtggcctggcaagggcggagcatgccgcaaggttggtacgacggccaaccttgacagctcctgcgcgcgccggcgtgagcgaagccacggtcgggacgaagaaacagactttcagatcgaacaaagaaactgacgaagaaaaaaagatgcgccgccctgcttaagcctcttgactaaaaaagccccatac

SEQ ID NO: 448 - DNA, 1462 bp, unidentified
  source 1..1462: mol_type = unassigned DNA; note = element_028a2d6
  misc_feature 1..2: note = core
  misc_feature 3..237: note = LE
  misc_feature 238..1275: note = CDS
  misc_feature 1276..1462: note = RE
  misc_feature 17..182: note = bridgeRNA
cttgtatgttgcgatcacaggcgtgaggatggtttcacgtttcggcggtaaggccgttcgtcccttaggccaactgtagttgagcctgtcccgtagatcggccaccgcccctctgattgcacgccgtggagaatcgaaggccttttgagcctgcatgttcaaggtgggcgcgaccagcaagtccgttgcggcggacaggggcggcagtcgagaccatcctagccctgaaggaggtctatgaacaagctcattgctgctactccatccaagatattttgcggcatcgatgtcagcgctcgttctttggcggtggccttgatcgaaccggaacacgccgtttcacagcgcgagtttgccaactcagccagcggtcacaaggcgcttcttgggtggctgggcaagcacaacgtcttggtgcgcgttacgctggaagccaccggcatttactccctggatctggccttggcgctggatgcggcggcgcagatcgaggtggccgtgctgaaccccaagcttgcaaaccgatttgctcagacgctatgccgttccaagacagacaaagccgacgcgatggttctggccgagtacggccagcgcatgcccttcaccgcatggcagagacctggcgtcaaccagcttcgtcttcgcaccctcggtcggcacatcgcttcgttggtggtcgagcaggccagcctgaagaatcgtttgcacaacgcggaaagcacagccaccatgccacgcgtcgtcctgctggacttgaaacaggcacaggccgcactgctgcggcgcttggcgaagatgcgccgcgaggcgatgaaactggtgcaggccgaggaactgctgcggcaacgctttgctctactggtcagcattcccggcatcgcggaaatcagcgctctgcacatcctgagcgagttggtgttgctggcgcctgggatgacggtgaggcaatgggtagcctatagcgggctggacccggtccatcacgtgtcgggaaccagcgtccataagccatcccatatcagccgtgctggcaaccgctatctgcggcgtgcactctatatgccgaccttgtcggcggtgcgccacgatccgcacatacgcggcttttatcttgcgctgcgacagcggcataagaccggcttgcaggcgctcatggcagtcgagcgcaagctcctgcacgccatatatggaatcttcaagagcggccatccgtatgacggcaaactgttgcttccgaatatccggttggaggtagaatcaatcgccgggtgaaacggaagcaggctctgctgggaagcaaccatgccgagggataacccggcgggctcatcctgacgatgaaccgagggggcgggcagggaaagtggatgctcgccccaaaatcatcggagggatagaccccgatgcctcgaaaatcccaccttacccctgagaaaacacttgactttcaacagagaat

SEQ ID NO: 449 - DNA, 1551 bp, unidentified
  source 1..1551: mol_type = unassigned DNA; note = element_028a4db
  misc_feature 1: note = core
  misc_feature 2..279: note = LE
  misc_feature 280..1443: note = CDS
  misc_feature 1444..1551: note = RE
  misc_feature 15..269: note = bridgeRNA
cattacagtaaaaaacagctagttggcggttggagcaatcgatcgcaaaacggactacgattgacgcaagtcccgagggactgccgatcgggcgcccgcggacggccttccgcccctgccccaagagggcccgggggggtgttgccgacgcgggcgccgctgtttccgacgactgataggaaactgccgggccttccgccaagatgagccacggccatgtaatgtggggtgtcgcgggaagcagcattccgatcgaccgacgattggaaggataccaccatgccatccgcaatatccccacccaaggccgttttgggcatcgacgtcggcaagtcgtcgcactgggcatgcctcgtcacgcgcgagggagaggtcgcgctcaacaggcgcgtccgcaactcggaaggcgatctcgacggcctgttttcccaggtcgcatgcgatacgatcgttgtcgtcgaccaatgtcgcaacattggcttgctggcaatctcgcgcgcgaggctggcggggctgggcgtcgcgtacctgcccgggctcgccgcgcaccaggccgccaggctgttcgcgggcgacgccaagaccgacgagcgcgacgccctcgtcatcgcgaagacggcgctgggcatccccgacgcgctgctgccggtccccgagcccgacgaggccctcgaggcggccaggtcgctcgcagcccagagaagtcacatggtcacctgcgccaccagggacaagaaccgcctccgcagcatattgctggaatcgtgccccgcgttcgaggcgctcgccgacctgggcgaccggcgttggctgaacatgctcgagaagctgggaggcccgtggggctgcatcgacgccgggaagccggcgttcggcgccgtcacgaagggcgcgaaccgggcgaggatggatgcggcctggaacgccgccatggcatcaaccagaccctcaaagcgacgggtcgacgcggagaacccgcaggtcaggatgcttgcaaggaggataagggaggcgctggaggaagcggacgggatcgaccgggagatcaccgcgcttctggcgggggacggaacgtacgaatgcctcgtcaccatccccggcatcgggccgaggaccgcggcggagctggtcataggcataaacatcgaggatttcccggatcacgaccaccttgcctcctattgcggcatcgccccgcgcaaccgacagtcgggcacctcgatatcgtcggtctccgcgtccaggcagggcaacaggaggcttaagaacctgctcatattctcatgcaactccctggtcaggagcgagaaccgcttcggcgagtactaccgcgcctgcaggggccgcggcatgtgccacggagaggcgctcaaagccgtcgcgcgcaaaaggctgaaggtgatctacgcgattatgcgggacaaggtcccgtactcggcctagcgagccgatcgaaaaagggaaggcgcaggccccttacggggcccgcggcagcgttgtcctcatcgagcgaaattcgccaacaaatcagttgacaaaactataggaaca

SEQ ID NO: 450 - DNA, 1502 bp, unidentified
  source 1..1502: mol_type = unassigned DNA; note = element_028b083
  misc_feature 1..2: note = core
  misc_feature 3..246: note = LE
  misc_feature 247..1482: note = CDS
  misc_feature 1483..1502: note = RE
  misc_feature 13..245: note = bridgeRNA
ctaatgagttctgggagtgagccatccggcagactcctgctgggtaggtagccgccggcggacgagcactcgtggctcctggacgtggagtcctgctgaaagatcgtgccgccgccggtcggtgtggagagttgatcgctgatgggatgtcgtgcccgcccggttgtggcgtgagcactgcttcattaggtcgctgatagttctccgcctggcttcctgcggtggccgactcgacaggcgggagaagtgttgctgttcgtgggagatgactgggcggaagaccaccacgacgttgaggtgatggacgtgtccggtcgccggttggccaaggcccggctgccggagggcatggcgggcatggcgaggttgcacgcgatgatcgggcaggcgctcggcactgaggtcgacaccgaagacgtcgcgactcgggtgaaggtcgggatcgagactgatcggggtccgtgggtgcaggcgctggtcgccgccgggtacacggtgtatccggtgaacccgttgcaggcggcccgttaccggcaacgcctggcgctgtcgggggccaagagcgatgctgcggacgcgcacatgctggccgacatggtccgtaccgactcccaccagctgcgcccgatcgctggggacagcgccggggccgaggcggtcaaggtcgtcacccggatgcacaagacgctgatctgggaacgcacccgcgcgacgcagcggctgcggcacgcgttgcgggagtacttcccggccgccctggcagcgttcgaggacctggacgccgccgacaccctcgaactgctcgggaaggcacccgacccggccgccgccgcgaagctgagcgtcagccagatcagcgcggcgctcaaacgggcccgccgccgggacatcgctgtgaaggcggcgacgatccaggccgccctgcgcaccgaacagctcggtcagccggccgtggtcaccgccgcgtatgccgcgacggtgcgggcgctggtcgccctgttgggcactctcaacgagcaggtcaaggccctgcaagggcaggtggaggaccattttggccggcacccggccgctgagatcatcctgtcccagcccggacttggtgtgatcctcggcgcccgggtgctggccgagttcggcgacgaccacggccgctacgcctcggcgaaggcacgcaagaactacgccgcaaccagcccgatcacccgcgcctccggcaagaaacgcaccgtcgccgcccggtttgtgcacaacgaccggctcatcgacgcgctgatgacccaggcattcacggcgctgagtaactcgcccggcgcccgcgcctactacgaccggcaacgcacccgcggagccagctacaacgccgccctgcgccaactcgccaaccgactcgtcggcatcctccacggatgcctcaaaaccggcaccatctacgacgagaccaccgcctggtctcaccacctcaccgaggctgctgcttgacattcaagctcctgggatgt

SEQ ID NO: 451 - DNA, 1383 bp, unidentified
  source 1..1383: mol_type = unassigned DNA; note = element_028b3d9
  misc_feature 1: note = core
  misc_feature 2..86: note = LE
  misc_feature 87..1109: note = CDS
  misc_feature 1110..1383: note = RE
  misc_feature 1152..1378: note = bridgeRNA
caatgggatggacgccccctccgaaacggcatcgatgtgccaaagtggaagtgtcaacaagccacgatatcgagggaggcgtcatcatgaagattacgacaatcggcattgacctggcaaaggatgcgttccaagtccacggcatagatgagcatggcaagatttgtgtgaagcggtcactcaagcgtaaggaaatgatggagttcttcacgcgcaccgagccctgcctgatcggcatggaaagttgtagtggtgcccactattgggcgcggcggcttcgcgacgttggccacacggtaaagctaatggcgccacagttcgtaaagccttacgtcaaggggaacaagcatgatgcggctgacgctgaggccatctgcgaagcggtccgtcggccgacgatgcggtttgttcccatcaagacggtcgaccagcagagcattcttgccgtacatcgagtacggcaggggatgattaaagccaggacagctcaagcaaatcagattcgaggactgctggctgaattcgggttgattgttccggtagggatctcacacttgtttctaaaggtgcccaccatgctcgatgaagctaaagacaccatacctggcgtatttcgggaactcatccaccgcctgttggagcacatgaaggaactaacacgccaggttgatcagctggagattcaaattcatcagtggcatcgtgccagtgaggtatcccggaacttggaacagattccaggggtcggcccaatcacagccagtgccctggtggcatcaattggcgatgcgcgcaacttcaagaatggtcggcagctagctgcatggcttggattggtaccaaaacagcactcgagcggcggcaagaccagactgcaaggcatcagcaagaggggcgacagttatctacgtaccctgctggtacacggagcacgagcggtcgtaaaaagcgccgagcgaaagcctgagcagcatgtttggcttagcaaactgatggaccgcagccacaacaacatcgcgactgtagcgcaggcaaacaagaacgcgcgggtcatctgggccttgatggcacacgaacagaagttccgatcagattacgtcaggacgtaatctgatcggttggaaaatggttcagctgtacagtagtaagcagattccaccagttgcgaggacactcagaggttgatggcaaaacaggttagaccgtggtcgacatagcccgatgacagcgcagtaccttcagtacgttaaggcgatggggcgttgaccagcgaaacccatcagggacagggttaaaacccatacaaagtccgaatgtacgcttgcagacttacctatttgcctttaacgactgatgtgcttgcaaatcgggggcgtccatgta

SEQ ID NO: 452 - DNA, 1464 bp, unidentified
  source 1..1464: mol_type = unassigned DNA; note = element_028e2fd
  misc_feature 1..2: note = core
  misc_feature 3..77: note = LE
  misc_feature 78..1103: note = CDS
  misc_feature 1104..1464: note = RE
  misc_feature 1205..1434: note = bridgeRNA
tgatgatatggactcctctctctctaccggtgtcataatacaccaaagatattatacagcgtgaagtggagtccgaaatgaatagtagcgtaattggtttagatatagcgaaaaacatttttcatctgtatacgatgaatgagaaaaacaagccagtaaagaaaaaactaaaacgagctgatgttttgtctttctttgcaaattatcaagaaagtttgataggaatagaagcctgtggaggtgctcattactgggcaagagagttgactaaattaggacatgaggtcattttgcttaatgctcgctatgtaaagaactttgttatcggtaacaaaaatgattataacgatgcagcaggaatatttgatgccgttactcgacccaacaagcgagtcgtagcagtcaaaactgtagagcaacaagatatgcagctgattcatagaatcagagaagacttaaaaggcaatcgtacggcactggttaatcaaacaagaggtttattgagtgaaagaggcattgttattcatcaagggatcaatagagtgagagagcagcttccattaatcattgaagatgcagagaataacctgacctcattaagtcgagaaatgtttaatgaacaatacgaaaaattgaccgttttagatgatgaaataaaaaatatggaccaaaaaattagtcgtctttgcaatcaaaatgaattgagtaagcgttttctagacgtgccaggtattggcccactgactgcaaccattgtcgcatcggatataggtcacggtaaaggttatgaaagtagccgagattatgccgccagcttaggcattgtccctaagcagcatagtagtggtggaaagttggtttatttagggattagtaagcgagggaatcgatatattcgtaccctgttgatacatggagcaagatcagtattaaagaactgtgcagataaaaaagacaaattgagcttatggctgcaagcattgattgaacggcgagggtttaataaagcagccgttgccctagccaataaaaacgcacgtattttatgggcattagcaacaaaaaatgaagattataaaggtgatgaggagctattagcatgagctatagcgaactaggttatccacgctttgcccacagacgctgtgataaggggcactctgcctgtgaccaaaacgaagatacccctcacacgagtagaaaccgagtaaccaagattgcggaggcaaattaatcaatcgtgatgacaaaaacaggtcagaccgacgcttttatatcccgttcagcacataggttcattgcgaaaccgttaggatgattgaggaaaaagcgtgcgaaagtttcatcaagagtcctgaggtattaaaacttctattagagaccgaatatatggcagcaatcttgatctctgttaatgttattaaaaattgaaaatttgcttgcaataaacgaggagtccatata

SEQ ID NO: 453 - DNA, 1357 bp, unidentified
  source 1..1357: mol_type = unassigned DNA; note = element_028f7c1
  misc_feature 1..2: note = core
  misc_feature 3..74: note = LE
  misc_feature 75..1109: note = CDS
  misc_feature 1110..1357: note = RE
  misc_feature 1111..1347: note = bridgeRNA
ttatggaatggcccgccccttttccccggcatcggatatgatgctggtgctcgaaaagggaaaggagcggaccgatgtctattgtgatccttggcgttgatctgggcaagaacgtttgcagtgtggtaggcgtggacggtaacggcgcggtggtggtgcgtcgatcaatgcgccgtcagggtctgatcgactatgtgcgcaagctcccagcctgtgtaattgcgatggaggcgtgctgcggtgcgcatcatctggggcggctgttcgcagcgcaaggacacgagatccggctaatgtcgcccgaatatgttcgcccctatattaaagcccagaagaacgatgatcgagatgccgaagggatcgccgaagctgcgtcgcgcccgacaatgcggtttgtcgaactcaagagccaggagcagctggatattcagagtctgcaccgagctcgttcgcggttggtggcatcacgtacgatgttgatcaaccaattgcgggctttcctgctcgaacgcggcgtgatctttgcagccggtcgccgcaaactggaaatgggcgtggatgcgttactgggcgatggggaggaaagcctatcgtcgcggatgcgtcaaatggtcgcggatttgcgtgccgaatggcaggagcttaatgcacggatcgacgcgctgaacggggagtttgttgcgttggctcgccaggatgaaagcatgcgccggctcatatcggtgccgggaatcggtgtcctcaatgctaccgcgctggtggcggcagtcggcgatgcgagctcttttgccaaagctcgggacctgggggcctggctgggacttgtcccgcgtcagcacaccaccggagggaaggcgcgattgttcgggatcaccaagcgcggcaacacctatttgcgtaccctgctcattcacggtgcaagagccgcgttgccgtctttatcccagagcaacacgcctctcggtcactggctgaaggcgatgatcgagagaggcgtacatcgcaatgctatcgtggtggcgctggccaacaaactggcacggatcgcgtgggctgtcctgcgcaaggatcagtcctttgaacgcgggcacgcttgcatggctgcctgatcagatcggccgcacgccagcgcgcggtggccaaagaggtttgcgggaaggatcgagaagatggcctgacagtcgaccggcgtttggagagcccgagcacacgaacggtacttgataccgcggaatttatggagccccaatcgcgcggatgtccatcttggccatgggttcacccatgagaccgtatacgttgacgcagactgatcagaacaacgtaaaatcctcttgcaaacggggcgggccatacg

SEQ ID NO: 454 - DNA, 1372 bp, unidentified
  source 1..1372: mol_type = unassigned DNA; note = element_02a0ca8
  misc_feature 1..3: note = core
  misc_feature 4..81: note = LE
  misc_feature 82..1110: note = CDS
  misc_feature 1111..1372: note = RE
  misc_feature 1084..1359: note = bridgeRNA
tgatggcgtggatgccccctcccacctaggtgccaacatgcgaatgttagccccaacaggagccaagagaggagaactgccatgtctgaagttgccatcatcggccttgatcttgccaaaagggtttttcaactgcacggagccatggccgatggatcggtggcgttccgccggaagttgccgagagctcgcgtgttggatttcctcgcgtcccaacagcgctgtgttgtcgcgatggaggcttgcgccagcgcccatagctgggggcgggagatcgccaggcttggtcacaaggttcggctgatcccaccgatttatgtgaagcccttcgtgaagcggcaaaagaacgatgccgccgatgctgaggccattgccgaagcggcatcgcgcccgacgatgcgctttgtcgcagtgaagtccgaagaacagcaggcacgtgccatgttattccgaacccgggacctgctcgtgcgtcagagaacccagctgatcaacgcgctgcgcggccatcttgccgaacatggtgtcgttgcaccgaccggggcagcctatctcaatcgtttggccaccgcgatcagcgacgaaaagacagacctgccggaacccgttcgccaaatgggcacgctctatcttgaacagatcgaggccttgagcgcgcgtgtaaacgaccttgatcggcaaatgcggaaggtcgccaccgaagccgacaacacgcgcaggctacaaaccatgccgggggttgggccgatcaccgcaatggcaatcgagaccttcgcaccgcctatgaccatctttcgccgatctcgggacttcgccgcatggctcggtctcgtgccgcggcaacattccaccggcggcaagcagcggctcggcgcgacatcaaaaatgggccagcgcgacatccgtcggctgcttatcaccggagcaatggccgtcgtgcaacatgcaagccgcaagggagcgccggacggcagctggctaggccgaatgctggccaagaagccgcgcatgcttgtggccatcgccctcgccaacaagatggcgcgtggcctctgggccatgatgaccacaaacaaagatttcaagaatccggcggcggcaccagcctgagcgcaggccgcgtcggacacctgggggtgtgaggagctcgacgaacagtaagggcaatcgatcggcaaggtcgggagcagacaaagcagggtgattcaaagggcgaagaagcccgagagcttgatgtgcctctgctccgcgtatcgccataccggccagcggccatgatcagcgccgcaccttcaggcctgacacatgaaagcatccgatcacatgctcaagccgttcaaaaaagccttgcaccaacgggggcatccacaca

SEQ ID NO: 455 - DNA, 1370 bp, unidentified
  source 1..1370: mol_type = unassigned DNA; note = element_02a2aff
  misc_feature 1: note = core
  misc_feature 2..80: note = LE
  misc_feature 81..1112: note = CDS
  misc_feature 1113..1370: note = RE
  misc_feature 1137..1361: note = bridgeRNA
tactgagatggtccgccgcttgatcttccacttgggtgtggttgatcttgttggcaggttacttcgggaggatcatcgatatgcagattcgttcggttggcattgatcttggcaagacaacatttcacttggtggcccttggcgataacggcaaggtgctgctgaagaagaagttcacccagaagcagctcatcacctttactgcgaacctgcagacctctttgatcgggatggaggcatgctcgggtgcgcatttcctcggccgcgttttacgagaacaaggccacgatgtgaagctgattccagctcagttcgtgaagcctttcgtaaagtccaacaagaacgacttccttgatgccgaagcgattgccgaggcggtcgatcggcacaacatgcggttcgtcccgatcaagaccgatgatcagctcgacttgcaggcgctgcaccgagtgcgtgaccggctgatggctcgaagaacttctgtgatcaaccagattcgtgcctttctgttggagcgcggcatagtctatgcgaagagccctattcggctgagggaagccatacccgaggtgcttgagaacgcgaacgagaacctcaccccaaggatgcggaacctagtcgcgatgctgtcgagcgagtggaaggagttggagcttcaaattgtggagatgaacgacgaagtagaacggatcgcctcgagcgatgctgcctgcctgagactgcgacagatcccgggcatcgggccgttggtcgcaacggcgatcgtagcttcgatcggcaacggggcagccttccgcaagggacgagagtttgcggcgtggatgggtctggtgccgaagcagcactcgaccggcggcaaggcgaagctgtatggaatcagcaagcgcggcaatcgctatctccgtaagatcctgattcatggagctcgtgctgccgtgttgcgatgcaagcgagacagaatcgcgatgggtgcatggatgacgtcgcttgagataagggcgccgcggaacgtgttgatcgttgcaacggcgaacaagctggcgcggatcgcctgggcggtcctatcgacaggccaagactatcgggcacttcaagatccagtctctgcctaggctagcctaccgatcagcatcaagtcccaccaaggtctgcactggataagtgaagatgaaagaacagtcaaaacggcgcacctgaagcctgtttgccgaattggcccttatacggccgaggggtttcaaaggacaggtacgcggcgtatctcatcatggccaggagactcaatctccacaaacaggccggatacattgacgcagactttcttcttcgtctagacacttttcccttgcagtcagacggcggaccataca

SEQ ID NO: 456 - DNA, 1447 bp, unidentified
  source 1..1447: mol_type = unassigned DNA; note = element_02b26ab
  misc_feature 1..4: note = core
  misc_feature 5..221: note = LE
  misc_feature 222..1433: note = CDS
  misc_feature 1434..1447: note = RE
  misc_feature 7..218: note = bridgeRNA
gtccctaagtttgtgggtgtctggggttggtgccctggatgcccggggcggtggggtgtagctgatcggttgttgcctgttgtcgaggctcgaaaggactggctgccccgccgtgctggacgctccgttcgctgattgagagctgttgcgggtcgtcgctgtttagggatctgtcggcggggttgtccacgggcgtgacctgcaatgacaggagtggatgggtggcgattcgccttgaggtctgggtcgggatcgatgtcggcaaatcgatgcatcacgcgtgtgcgatcgacaccgacgggaaggtgctgttcagtcagaaactcgggaatgatcagcgcgcgatcgagcagttgatcgctcgtgccagtgcggccgctcagcgggcgcagtgggcgatcgatttgacgagtccgatggcgttgctgctgatcacggcgctgctggctgccgaccagtcggtgacctatgtgccgggccgggtcgtgaacacgatgacccacggattccgaggcgaaggaaaaaccgacgccaaagacgctcgggtgatcgccgaaaccgcccggctgcgaagggatctgaccgaggtcacgatgcccgatgagctggcggtctcgctgacccagctgaccagctaccgcgccgacctgatgtcggactgggtggccgggatcaaccggctgcgggcgctgctgggctcgatcttccccgctctggaggccgcgttcgactactccaaccgaaccccgctgatcctggtcgccgggatgtgcacccccgccgagatccgcaccgccggaatcggcggtgtcacaacccatctcaccgacaacaaggcatggggtccggcgatcggcaagaccgccgcgaccgcggtcgccgccgccgacgcccaggacctggtgctgcccggcgaagccgatgccgcgatgctcgtcaaacgcatcgcccgcaagctgctcgacctcgaccgcgagatcaaagacaccgacaagctgatcaccgcccgattccggcgacatccgtgggcgaggatcatcgagtccctgcccggcatgggccctggactgggcgccgaatttctcgccagcaccggcggtgacctggcgaccttcgcgaccgccggccgcttggcgtcctatgccggattggtgccggtgccacgcgactccggtcgtgtcagcggaaacctgcgccgtcccaaacgctacaaccgacgcctgcgcagggtcttctacatggccgccctgtccagcctgcgcacgcaaggcccgtccaggcggttctacgacaagaagcgcgccgaacgactcatccatacccaagccctcctagcgctggcccggcgactcgtcgacgtgctctgggcactgctgcgcgacggccgcgaattcaccctcgacacaccgaatccggtcactgttgcggcttgacacggtcattgaga

SEQ ID NO: 457 - DNA, 1353 bp, unidentified
  source 1..1353: mol_type = unassigned DNA; note = element_02c83a1
  misc_feature 1: note = core
  misc_feature 2..71: note = LE
  misc_feature 72..1100: note = CDS
  misc_feature 1101..1353: note = RE
  misc_feature 1134..1344: note = bridgeRNA
tatgggatggcccgccccccaccagcgttggggtagtctcgacgcgtcattgtggggtgaggagatgatcaatgaaagtcgaggtgatcgggattgatctggggaagaactgctgcagcgtcgcgggcatggacgctgccggcggcattgtattccgcaggcggatgaaccgggccggcttggctgagatcgtgggtcggcatccaggttgcatcgttgcgatggaggcctgctgcggcgcgcatcacctgggccgcgtctttgccggcgaaggtcacgacgtgcggctgatgtcgcctgagtacgtccgaccgtacgtgaaggcgcagaagaacgacgatcgggacgcggaggcgatcgccgaggcggcgaccaggccgacgatgcgcttcattccggtgaagagccaggagcagtcggacctgcagtcgctgcatcgcgcccgggaacggctcgtcggcgatcggaccgcgctgatcaaccatctgcgggcgttgctcctcgagcgtcgcctcgtagtagcgaaggggcgggccaagcttcggaaagaggtgacggagctcctggccagtgcggcgaccgagctcagtcctcggatcaggaggctggtggcggacctcgtcgacgattgggagcgcctcgatgcccgcatcaagagcttcgatgccgagttcgtcgcgatcgcgcgcgccgatccagggatgcgccgcctctcgaccgtgcccggcatcggaccgatcaacgcgacagcgctcgttgcagctgtcggcgaagccggggccttcagcaagggccgcgacctgtcagcttggctcgggctcgtgccccgccaggccacgaccggcggcaagccacggctgctcggcatcagcaagcggggaaaccggtatctgcgcaagaacctcgtccatggcgcgcgcgccgtcttgccaaggctcgccgaacgcgacacgcccatcggccactggctccgcgagttgctcgcgcgccagcacaagaacgtcgtcgtggtggcgcttgcgaacaagctggcgcgcatttgctgggccgtgctcaccggcgaccgtggcttcgccgaagaggccgtcgcaatgcgctgaaacggaacagccccggagcgcccgatccggggctgtccacgaggtctgcgggctgtgagagcagatggcccaacagtcgaacggcgacgcgcaaacctgaacgttttaaacggccgagcgaggccgtgccgattattaggagcacgtcgcgcgtatatccatcttggcagggagctcgctccgaggccggatacgttgacgcagactggaaggcacgatgctcgaccctcttgcagagggggcgggccatacg

SEQ ID NO: 458 - DNA, 1599 bp, unidentified
  source 1..1599: mol_type = unassigned DNA; note = element_02cbbf8
  misc_feature 1..2: note = core
  misc_feature 3..273: note = LE
  misc_feature 274..1476: note = CDS
  misc_feature 1477..1599: note = RE
  misc_feature 13..293: note = bridgeRNA
ctactactatgtaagtaaggtaaaattcctaatagccaattaggatttaccgacttattgtttaagctgttacaatgaaggaacatggatatatcgatgcgtatcttggacctagcgtccttttgcaagaaagataatcagttccttcatagcagcattcgttttatgcaggttgaacagttgcaaactcgttcgtgtcacaccacagtagattgaataggcaatgagtaaactgatttttatccatagtatttaaaaggagagtaagagtttatgaatgcagttggaattgatgtttcaaaaggaaaaagtatggttgcaattttacgcccttttggggaaattattttaaaaccagttgaggtcaaacacacaaatagtgaaataagatctttgattaaagctattcagtcaattgatggtgaaagcaaagttgtcatggagcacaccggaagatactatgaacctattatgcatgagttggtcaaagcaggtatttttgcgtgtgccgtaaatccaaaacttatcaaggatttcgataacaactcacttagaaaagttaaatccgataaagctgattcgataaagatagcacgttatacccttgacaagtggtcagatttaaaacagtatagtgttatggatgaaatacgtgatcaattaaaaacaatgaaccgtcaattcggattctacatgaaacataagacagccatgaagaataatctaataggattacttgaccaaacttatccaggagttaatacttatttcgatagtctggcacgcgaagatggcagtcaaaagtgggtagatttttctaatacatattggcatgttgattgtgttcgtaagatgtcattaaaagcttttacagaacactatcataaatggtgtaaacgaaacaagtacctcttcagtcaatccaaagctgaggaaatatatggaaaagcaaaggagattgttccagtactaccaaaggatgaacttacaaaaaagattatacaccaagcaatagaacagttaaatacagcttccaaaacagtggaagatttacgaacacttatgaatgaaaccgcatctaaactcccagagtacgatatagttatggcgatgaaaggtgtcggtccgtcattaggtccacaacttatggcagaaatcggtgatgtaacaagatttacacacaaaagtgccattacagcgtttgctggcgttgacccgggagtaaatgaatcaggaacatacaatcagaaaagtgtccctgttacaaaacgaggttctgcacatctaagaaaagcattatttcaagtaatggacattcttatcaaaacacacccagaagacgatgaagtatacaagttcttagacaagaaacgttccgaaggaaaaccttattttgtgtatatgacagcaggtgcaaataagtttttgaggatttactacggaagagtaaaggaatacatgtcaaatttaccataatactaattatcaacaacctttctttcagaccggcactatatggcggtctatttttcatacctaaaactctaaataagaatatctgatttttttctaaaaaagtattgactttttatttgcagg

SEQ ID NO: 459 - DNA, 1144 bp, unidentified
  source 1..1144: mol_type = unassigned DNA; note = element_02cc050
  misc_feature 1..2: note = core
  misc_feature 3..200: note = LE
  misc_feature 201..1130: note = CDS
  misc_feature 1131..1144: note = RE
  misc_feature 41..210: note = bridgeRNA
cttgtatcttggcatttgaaccgttgtggtacaaaacagagcggctgcgagatcctagccgcctcgggtcggagcttattgcccagaccgtggtgtagtttgatccgcagccgccgtgttctttcgaactcgaacagttacttgagcgatcccctctgtgtgaggagaccagctcgaatctacaagaaggagtctctcatatgaaacaggaagttgtctactgcgggattgatgtggccaaggagcaactggatgtggctctgggccccaagcgctggcaagtgcctaataccaagcagggcgttgggcagttggtaaagcagctcaaggccgagcgcagcaaagtgcatgcgatttgcgaagccagtggcggttatgaaaaagccatcgtgattgctctgcaaaaaagcgcactggcggtcagcttggtgcaagctaaccgcgtgcgacagtttgcacgcgcagctggcgttttggccaagaccgaccagatcgacgccgccgtcctggtgcatttcggcagggccatgcacccgcctcccagcgcagcgcagtcggagcaaatcgctcgtttgcgcgagctggatgcacagcgccggcacttaagccgattgctcagcgcagaacaaaaccgcttggcgcagttatcctgcgcagagctgcgcagcttgagtcgcagtctcatcagcaaagtcaaaaagcagatcgccaccattgacgcgcgcatcgccatcttaatcgcgcaagaccaaaatctctgcgtcaaggcacaaaagctcacttccattgctggtgtgggccctcgcacagctgcactgctgctggctcaaatgcccgaactaggcagcctcaatcgagcgcaagctgccgctctcgctggcctggctccatttaatcgtgacagcggctcaatgcgtggcaaacgaactatcttcggtggccgccgcactgtacgcaccggtctctacatggccgccgtaaccgccgcccgctgcaaccacatcctggctcctttctatcaacgcctctgcgctgccggtaaacctcctaaagtggctctcactgccgtcatgcgaaaactgctcctcgctctaaatagcgctcttgctccaaaactaaatccagcttgaaatcaacacagtta

SEQ ID NO: 460 - DNA, 1421 bp, unidentified
  source 1..1421: mol_type = unassigned DNA; note = element_02d1b0d
  misc_feature 1..4: note = core
  misc_feature 5..207: note = LE
  misc_feature 208..1407: note = CDS
  misc_feature 1408..1421: note = RE
  misc_feature 1..198: note = bridgeRNA
ctccgtaaggtgttaagcggcccgggagggccggatgtggctgatcggttcttgtcttcagtggctcccgaggagtggccgtccggttctccggggcgccctggccgctgattgagatgtgcgcgctgtgtgcggtcgctgtttacggagacgacggcggggtgttcctcgggccgacgggactcgggcggatccgaggagggacacgtgagcgagcgacgaaccctggcctgggccggcgtcgacgccggcaagggccaccactgggcggccgtggtcgacggggccggcaccaccctgtggtcgaagaaggtcgacaacgacgagtcggcgatcctgaccgcgctcggcgagatcctggaactcgccgacgaggtccgctgggcggtggacatctgcggcaccgcctcggcactgctgctggcgatgctcgccgcccacggccagcaggtcgtctacgtgccgggccggaccgtcaaccgcatgtccggcgcctaccggggcgaggcgaagaccgacgcccgcgacgcctacgtcatcgccgagaccgcccgccaccgccgcgacttcaccaccatcgacgttcccgcccagttggcggccgacttggcgctgctgacctcgcaccgctccgacctggtcgccgaccgcgtgcggatgatcaaccggctccgcgacgtgctgaccggcgtcttccccgccctggaacgggccttcgactactccgcccacaagggcgccctggtcctgctgacgggctaccagacccccgccgccctccggggcaggggtccggcccgcctcaccgcctggctcgccaagcgcggcgtccgcaatcccggcacagtggcttccgtcgcggcggaggccgccgccgcccagcacaccgtgctgcccggcgaggacgtcgccgccgcgatcgtcgccgaccttgccacgcagatcctggccctggacgagaggatcaaacgggtcgacaagcagatcgcagaggtcttccgcacccatccgcaggccgggatcatcgagtcgatgcccggcatcggaccgatcctcggggcggagctcgtcgtcgcggccggcgacctggcggcctacgcggacgccggccacctcgcctccgcagccgggctggtgcccgtcccccgcgactccggacgccgcaccggcaacatgcaccgacccaaacgctacagccgccgcctgcgacgggtgttctacatgtccgcccagaccagcatcgtcaacgacggtcccaaccgggacttctacctcaagaaacgcgccgagggctgcagacacgtccaagccgtcatcgccctcgcccgacgccgcgtcagcgtcctgtgggcactcctgcgcgacggcagactcttcacccccgtcccagccacacaggcggcttgacttcgtcattgaga

SEQ ID NO: 461 - DNA, 1308 bp, unidentified
  source 1..1308: mol_type = unassigned DNA; note = element_02d3b90
  misc_feature 1..2: note = core
  misc_feature 3..188: note = LE
  misc_feature 189..1151: note = CDS
  misc_feature 1152..1308: note = RE
  misc_feature 28..201: note = bridgeRNA
cttgtgtcccaaaaatttggcagaatgagcgaacgggcggttgcggaccaaccgcccgttgctggaactgagcccgtacgccccaaaggcgacagagcctgtaccagagcgagggacagctccggcgtcttcctcaacccgaacagttgcaagggcttcgagcccgtaccgagcaaggaagggagtggatggtggcacaagatgatcgcattgtcgtgggcatcgatgtggcaaaggacaaggtcgatgcgtgcattcgctcgctgtcattgcgtcaggtctgtccgaacacgggacaaggccaccgcaagctggtggcctggcttcgcaagtacaaggcaaccagggctgtgatggaggcgagcggcggttacgagcgtgactgggccaagctactgcgccaggccggtgtcgaggtgcggatcgtcgaccccaaacgcgtccgcagcttcgcgctatcggccggccggctggcaaagaacgatgtgatcgacgcggagatgatcgcctggttcgccgagatatttaccgaggcgccgagccagacccacgatgccgcacgcgaggagttgctggcgctggtgaaagcgcgcatcggtctgggtgatctcaagacgcgcttgcaaagccaaaacgagcatgctgcaccaggactggttcagaaaacgcatgcccgcgtcttgaagaatctggtcagtgaaattgccaagctcgaggcggcaattgcggccaagatcaaggcctcgccacaccttgccgagcgtgccgagatcatcgagagcgtgccgggcctcgccgaaacgacctccgccaacctcattgcggggatgccggagcttgggcaggtgagcaacaagatcgccggtgcgttattaggcgccgccccgtacgacgacgatagcggccatcggcgcggtgagcgtcatatcaagggtggccgccgctgggtccgcaacgccatctacatgccctgcctcggcgcagccacgcagaacaacccggtgctcaaggccttctacgaccgcctgattgccaagggaaagaagccgaaagtggtgcttgtcgcctgcatgcgcaagctcatcgtcatcctcaacatcatgatcgcacgacggcagaaatgggatcccagccgttacgcactgaactgagcgagcgcacctcaccgcgctcggtcgatgaccgagcgcatgccaagccaacagaccggagagcggacggggtcaaggccgtaagccgccgaaggcggggcgcgccccgcgccagccttgaggcccggccgatcgccggtttacttcagcacagttg

SEQ ID NO: 462 - DNA, 1443 bp, unidentified
  source 1..1443: mol_type = unassigned DNA; note = element_02d8d27
  misc_feature 1..2: note = core
  misc_feature 3..288: note = LE
  misc_feature 289..1170: note = CDS
  misc_feature 1171..1443: note = RE
  misc_feature 1209..1443: note = bridgeRNA
agaatgagatgaacgcatccccaaccattaaatacagtgcacgatgatggatgaagggaaagaacttgaaggtgtggagcctcgcagatttccggcatcatagtgcccaatacgggatacaaaaagttccctcagactggagactccacaaatgaaatatacaccggttggcgttgatatcgcaaaacatctgattcaggttcacttcatcaatgagcacactggcgaagtggtggataagcagcttcgaagcaaggattttctgacattcttcagtaaccgggagccttgcctgattggcatggaggcttgtgggggctctcagcactggcacgtgagctgaaaaaactggggcacgaagttcggctgttgcaggctcgcttcattaaagcgttcgttatgggcaacaaaaacgatgtgatggatgcgcgtgctatctggatggcggtacagcagcccagtaaagaaatcgccgttaaaacggaagagcagcagtcagttctggtcctgcaccgttcgcgcagacaactggtgaagttcagaaccgcgcagattaatgccctgcatggcacgctcctcgagtttggtgaaaccctacacaaaggtcgggcagcgatggacagagagctaccggcagccctggagcgaatgaagacgaagttgccgccgtatctcatcaccgtgcttgaagaccagtacaccaggttgagtgagctggatatgctgatagatgaccttgaaaagcagcttaacagcgtggcacggcagagcgaaacctgtaagcgcctgatggaaatccccggtgtggggccgttaatcgctacggcggcggtcgccaccatgggaaaggcctcagcatttaaatccggacgtgagtttgccgcctatgtcggtctggtgccgaagcagacgggttccggtgggaaggttcgcatgctgggcataagcaaacgcggggatacctacctccggacattatttattcatggggcaaggtcggcagcattgctgaccaaagagcccgatccatggatcacggagctgaaaaaacggcggccgacaggtgtggctatcgtggcaatggcgaacaagctggcacggacagtgtgggcaatagtcgctcatgatcgtaagtacgacaaaaatcatgtcagtatcaggccatattaatcgctgataccgataaacataaactctttacaaaagggtgaatgctgaaaggttgctatggcggcccgagtgatgacaaagacggtaagaccgtgactcactaaacctggatgctgccttgggcttaaagctcgctaggagaataaggcgtgagtcagcgaatctcatagtggcccgcagttctgactgactgcaataaggccggatacagagctgcaactactcgtcaatgtcagaacaacggaagccttgcaaacggggatgcgttcatac

SEQ ID NO: 463 - DNA, 1844 bp, unidentified
  source 1..1844: mol_type = unassigned DNA; note = element_02f7caa
  misc_feature 1..2: note = core
  misc_feature 3..378: note = LE
  misc_feature 379..1713: note = CDS
  misc_feature 1714..1844: note = RE
  misc_feature 134..313: note = bridgeRNA
ctagtataataatggtgtagtcaagaacgactactaagttaaaagttacaaagtccaatctaatcaatctatatagatataacggaaggaggagttctccctccatcagaagttataaggcaaccttatttaccttgcctgaggtttccttcatgcaccagacaaaagatagaggtataatcacggaaggcaggattatggacgtttcctccttgggaaccggccttttggctggtgaaacctctaaaaaagtctgtcagtccattcggtggtgatttatgttttggctggttgggatgccccaggctatacctgtataacccgctaggttgtgtatccaccttctggaattggatacctgccagaaaggatcaagttatgcactatcaaaaagttctcaagatgctggaaagcatcccctatctctctgtagggcttgatgtcggcgctgatttcacctggatgtccatcatgctcccaaatggcctcctcactggaaaaccctttaagatcatccactccgatccgcagtcccgtgagcttgctgtcacaaaaataaaggaagcacaagagacgtattctctcaaaagccgctgcttccttgagtccaccgggatctatcacatcccgctcctgtgcttccttcgtgataaggggtttgactgctccgtcattaatcctatcatcactaagaatagcacaaatatgaacgtaaggaaactgcataatgacaaatttgattcaaaaaaagcggctagagttggactggatgcttccctaaagacttccatcgttccggacgatgagatcatcgacctacggaacctggtccgtgattactattacttcaaagacctacagtcggcggtcgttctcaaactacatgcagaactgaaagtttccttccccgcttacctacaggtgttcagtaagatcaccacgcagacttccttaaaccttctatatgcataccctcttgccagggacatgcttgccgctccaaaggatgacatcatcaaaaccatccggagcacagcacgctttggggaaatgtatgcccttgccaggtatgacgccttatacactgccgcgaaagattccgaattgttcgggcgcgcccttcccagcaatgccctccggattaggctgtacatagattcttaccgggaataccaggggcatctggactccattctgcaagaactgcacaaggctgtagatagacttcaggggaatcctgcatataaccgcatccgtctcctacagtccctgcgcggcatcggctttttaagcgctgttgtcctaatcgcagaaatgggttcctttgacttatttccttcacccaagaagctctatgcttactttgggttggatcccggtgtaaatgattccggcaagctcaggggagacagggtccacatgtccaagcgggggtccggtcttgcgcgtcgtatcctgcatatgattgccataaacaacttaaaaatggagaaagggataaaaacacctgtaaacccggttatttatgactattacacccgcaaatgtgccagcaagaaaaagagggttgctgtcggagccgttatgcataaaatctgcaacatcattttcgctatgctgcgggataacaaaccttttgagatcattacacccgaagagcattgtaaacgctatgtgacagaacagtctgccaaaacagaaacagcagcttaaagatccaccactatgaaatttttaaattcccatatccgatgggtttattaaagtcgcctttttttacaccaactgctcaaaaaaactttttaaacatttttcactttatttcttgacatttcttagctgga

SEQ ID NO: 464 - DNA, 1560 bp, unidentified
  source 1..1560: mol_type = unassigned DNA; note = element_03060bb
  misc_feature 1..2: note = core
  misc_feature 3..261: note = LE
  misc_feature 262..1428: note = CDS
  misc_feature 1429..1560: note = RE
  misc_feature 3..238: note = bridgeRNA
cttgtatgataattaggaagttatttatcacacgtttcctttcttttaatatcgtggttcaatacattcagatactgtggacttttgattatttccctgtagctctgactactctaaggagtgtattgccgctacctttatctgaattgtttatagctggatgttgccggaattatccgagtacttatttccatcaagtctacgatgataatcgctggtggatatcacggtatcagactttaaaaagggaggtacaacctcatgatttatgtaggcgttgatattgccaaactaaaccatttcgtctcagccatttcttctgatggtgaaattataatcgagccgttcaaatttacaaatgacaatgatggcttccaactgctgatctcaaaactcgaatcattcgataagaacagcctcatcattggtcttgaatcgacggcacactacggcgacaaccttgttcgataccttgttgccggtaattacaaagtgtgtgtgttgaatcccatcaagacttctactatgcgtaaaaacaacgtacgcaaaacgaagactgacaaagtcgacacatacatcatttgcaaaacccttatgatgcaggattctctcagatttgttacctactatgatctcgatctgatggacctcaaggctcttggccgttttcgccagaaatccattaagcagcgaacccgtttaaagattcagctgacttcttatgtggacgaggtatttcctgaattgcagtacttcttcaaatcaggtctgcatcaaaaatctgtctacgctctccttaaggaggctcctacaccggaagctatagcttctatgcatatgactcatccggctcatttactcaaggtgaactcccacggacattttgataaggaaatggctcagcagttaagagttctcgcacagaagtctgtcggtgctagcgacagtgctctatctattcagataactcacaccattgcacagattgagttactggatagccagttagaaagagttgaagctgcgatgactgacatcatgaaattcaatgattctgtcatcatgaccattccgggtatcggatacatcaacggcggaatgatacttggcgagatcggtgatattcaccgtttctccagccccaacaagctgcttgcatatgcaggtctggatccttctgtttaccagtctggaaacttccaggctaagaaaaccagaatgtctaagcgtggttccaaagtcctcagatatgcacttgttaatgcagctcacaatgttgtaaaaaacaacgccactttcaaggcttactacgatgccaagatggcggaaggccggacccactataatgcccttgggcattgtgccggcaagcttgtcagagtcatttggaagatgcttactgacgaagtagaatttaacctcgagtaagaggtctgtataccaatatcgatagattttgaaaagcacccttacgggagccttattaaggttaccctttttttaccaccaatagaaaataagaatttccagctaatttatgcttgacttttcatagctggt

SEQ ID NO: 465 - DNA, 1299 bp, unidentified
  source 1..1299: mol_type = unassigned DNA; note = element_030b853
  misc_feature 1: note = core
  misc_feature 2..73: note = LE
  misc_feature 74..1045: note = CDS
  misc_feature 1046..1299: note = RE
  misc_feature 1068..1296: note = bridgeRNA
taatgagatggtcacccccgacaccctgtgaggctacaccttcacagggtgttttctttcggaggccatcaccatgaataccgtcgccttgattggcattgacctgggcaagcacagttttcacctgcaagcgcaggatcacaacggccgcccgctgttccgcaagcagctcagtcgccctcagttactgcgcctgctggctcagcaacccgtctgtcgtgcggccatggaggcctgcgccggcgctcactgcctggcccgcgagatccaggctcagggccatcagccgctgctgatttcgccccagttcgtacgccccttcgtgcagggcaacaagaacgactttctcgacgctcaggcgatctgcgaagccgcctcgcggcccaacatgcgcttcgtgacgcccaagaccgaggtgcagcagaccctgtcggtgctgcaccgtctgcgcgaatcgctgatccgcgactgcaccaagagtatcaatcagctgcatggttttctgttggagttcggcatcagtctgcccaggggcatggtggtcatgcgtcgtcttgcgacggtgctggccgagcaccgcctgccgcccaggctggtggtcttactgcagcgcctgcacgcgcattttggctatctcgacgagcagatcaaagtgctcgatcgcgagctggttgagcacgtcgaggcggatgatctgggcagtcgtctgctgagcatcccgggtgtcgggccgatcaccagcagcgtactgctgacagagctgggggacgcccggcagtaccgtagcagtcgcgactttgccgcttcagtcgggctggtgccgcggcaacacagtaccggtggtcgacagaacctgctggggaccagcaagcgcggcgacaagaacctgcgtcgcctgctggcggactgggtgcgcgccttgctctgccggcgccatagcaatgtggtggcctgtgctctggctaacaagctggcgcgtatagcctgggcgctggcgcaaggacagggccgatttgaaacggggccagacggctgcgccgcctgacccccctgttgttgcagtaccacgaaccaccctttaggttttgcgatagctgaacaactgatgacgtgaacggcccaccgacctgacgaagaacctgacacaaaaatcggcccaagaggccgccgggcgtttcaggatcgtcaggtgcgactctcatcgtggcgcggggcatgccccaaccagacgccggatagatttaggcaagccaaacacccatcgctgatcagtattgcaaaaatggaggtaaccataga

SEQ ID NO: 466 - DNA, 1361 bp, unidentified
  source 1..1361: mol_type = unassigned DNA; note = element_030c53b
  misc_feature 1..2: note = core
  misc_feature 3..74: note = LE
  misc_feature 75..1103: note = CDS
  misc_feature 1104..1361: note = RE
  misc_feature 1079..1349: note = bridgeRNA
tgatactgtaaccgccccccgacggcatcgatgtgccaaggtgggatctcaacaatccatattgggaggcggtcatgtctgagattatcacggtcgggctcgaccttgcgaagaatgtgttccaggtgcacggcgccgacggtgctggccgagcagtcttgcgcaagaagcttcggcgaggacaggttctggaattcttcagccagttgccgacgtgcgttgtcgcgatggaagcctgtggcggcgcccacttttggggccgcgagatcgggaagctgggccacgaggtgcggttgatcgcgccagcctacgtcaagcctttcgtgaagcggcaaaagaatgacgctgccgatgcggaggccatctgcgaggctgcgctgcgcccgacgatgcgctttgtgccggtgaagagcgaagagacccaaggcacggcgatggtgttccgcgtgcgggaactgctgatccgacagcggacgcaggcgatcaatgccttgcgtgggcatctgggcgagttcgggcaggtcgtgccgcagggcgcagccaatgcgtcgaaactgattgcgatcgtcgaagatctcgacagcgggctgcctgccgatgccatccccacactcaaggtcctgatcgtggcactggcgcagttggaggcagagatcggcaagctcgatgacgagatttcccgccgggccaaggagaacgaggtggcgctgcgtctgatgacggtgccgggtatcgggccgctcatcgccacggccatcgcgaccctcgaaccgccaccagagaatttccgcaaggcccgggattttgccgcctggctcggcctcacgccccggcagcattcgaccggcggcaaacagcggctcggggccacgacgaagatgggcgaacggtccctgcgccgcctgctgatcatcggcgcgaacagcgtcatcatcaaacggcatgttcatttcgcagcgcgacccggcacatggctgagcggcatgctgacgcgcaagccgccaatgttggtgcgtgtagcactggcgaacaagatggcgcggatcgtgtgggccctcatggcccggggtggcgtctaccagtctccggtcgcggcggcataagccgaccgtcgatcgcgaggacgtcggagcggaagagggcaaggagaagtttggcgcaacggtcgtgagacgggatcagaggaaccagggcgcaacaaagtgcccgcgagcacgcggcgttgatttgggacctggtccgcgaacaccagaacgggcccgcggcatagagatggccgcttcagaggccggatacatgtcagcacccgacaccgcgtcagaatgcttcaaaaaccctcttgcgcatggggcggttataca

SEQ ID NO: 467 - DNA, 1614 bp, unidentified
  source 1..1614: mol_type = unassigned DNA; note = element_031016a
  misc_feature 1..3: note = core
  misc_feature 4..319: note = LE
  misc_feature 320..1489: note = CDS
  misc_feature 1490..1614: note = RE
  misc_feature 13..300: note = bridgeRNA
tctattacaataaatttggacatgaaagccgggcagccagtccggctttctttccatctcgtgcctaagctacaataaggggagcaactggctggcctgagcctccttgggcttctatgcccgacagaaagactgtcagccatcctcttgttgcggcgttcgatttgagcaggttgagccaaccgggataccggggagttcgcgtcacccaatagattgaatcggcagcgagaaaaggatgggttccgattgcgggttctttgcactggaggaatgtgaatgaactctggttggcatcgacgtctccaagggcaagagcatgatcgcaatcatgcggccttttggaggggtggtagtctctccccgcgagatacgtcacaccgacagcgaactgggcgagctggcaaagctgctcaaaagtctggacggtgagacccgcgtggtgatggaagctacgggtaattaccatgcgccggtggcctggctgctccacgacgcaggcctttatgtctccgtggtcaacccaatactggtgcacgactacgggaacaacagcttgagacgggccaaaaccgacaggaaagacgctgtgaaactggcaaattacggccttgaccactggcttagcttgccgcgctatgtcccggaggaggacacccggctgatgctgaaaagctgctgccggcagtaccagcagtattccaaggttcagaccatgctcaagaacaacctgatctccttgctggataccgcgttctctgacgccaaccgccttttcagcagcccagccagagccgatgatagcgaaaagtgggtggattttgtagatgctttctggcattgcgagtgcgtttgtggattatctgagaaagcctttacggccaaataccagaagtggtgcaaaaagcatggctacaatttcagcgaggataaggctctggacatctacgcttctgcctgcggacacttcggcgtcatgcccaagacagatacagcaaggcttcttgttgaacaggccgtctctcagcttcgggcgacttccgcagccctggctgctctcaggcaggagatgcagacgctttcttcgtccttgccggagtactccatggtaatgggcatgtacggcgtcggccccacgttcgggccgcagctcatggccgagattggcgatgtgcggcgattccattccaagaaggcgctggtggcttatgctggtattgacgctccgccttaccagtccggccagatggacgtccacagccgcagcatctccaagcgcggttcccccgctttgcgcaaaacgctgtttcttgtgatgggtgtcatctttcagaacgcacttgccgatgacccggtataccagttcatgaacagaaaacgcaccgagggcaagccctacaaggtttacatgatggcttctgccaacaagttcctgcgcatctattacgcctccgtgaaggctcatctggattctttagaaatggactgatacgctgccttccatatttggcttgctaccttctcaaaattccgggatgctgagtggcctggattggtgtacccattttgcaacgcctaattttctcaaatttctacttgacttttattagcagg

SEQ ID NO: 468 - DNA, 1360 bp, unidentified
  source 1..1360: mol_type = unassigned DNA; note = element_03114d1
  misc_feature 1..2: note = core
  misc_feature 3..101: note = LE
  misc_feature 102..1124: note = CDS
  misc_feature 1125..1360: note = RE
  misc_feature 1140..1327: note = bridgeRNA
acatagcgtaatcgctcagggcctagccttccaggcggcggctctccacactgtcccttgtcaaccggggccagtgtgccgaagctatgaggagaaccgccatgaagcattatgccggactggatgtcagccagcaaacgacctcactctgcatcgtcgatgaggaaggcaaaattgttgctgaacggaaagttgcatcgtctccagatgcgattgcagaggcgctgaagccatttgcagtcacgcgtgcaggacttgaaaccggtccaatgtcagtctggctatggaatggattgaaagagcggggcgttcccatcgtctgcatggatgctcgccatgctaatgcagccttgaagatgatgcccgccaagacggaccgtaacgatgccatcggcttggcgcagatcattcgtacgggttggtgcaggagcgttcatgtcaagtcgacggcaagccacgaggcccgggcgcttcttgccacccgcagccagttcgtgcaaatccgttgcgaccttgagaaccagatcagaggcgttcttcgcacctttggcatattgttcggcaaacgcgtcggtgggttcgccaagcgtgctgaggaaatcatcaacggcgagctgcacgcgtctccgacaatccaagctgtcgtggaagccttgatgcgggcgcgtgccaacatccttgagcaggtccgtcttctcgatgcgaaggttcgttcggtagtgcgacggctgatgtcggtccccggtgtgggagttatcactgcgctcggcttcaccgcgaccattgatgatccgacacgattcaaacgatcatccagtgccggagcatatcttggcctgacaccccgcatctatgcgtcgggcgagacgatgaggtctggccgcgtctcgaagcggggtgacgacttcctgcggcgcagcctctatgaggcggccaatgcgttactgacacgcgttccgcaattctcttccttgaagagttggggcttgcgcattgcgcgacggaatggctatcgcaaagccaaagttgccgtggcgcggaagctcaccgtgatccttcatgccatgtggatctctggcgaatcgttccgctggtcctcgcaagattcaaaagagctcgcatgatcgaaaccgacctatgacttgctgaactctgccagatcgtccggtcaggacggtggcgcagtcatgaccgatcccaagagtgcgagtgccggctcatcaggtaaccgcgaacaccacattggtcgactgagcctatccaacgccatgatgaggcggtcgaaacgccgacctcgaagagaaccatgagcctgaccagcgatacggaccgagccaagcttgacaaccgcgattagaga

SEQ ID NO: 469 - DNA, 1447 bp, unidentified
  source 1..1447: mol_type = unassigned DNA; note = element_0329289
  misc_feature 1: note = core
  misc_feature 2..334: note = LE
  misc_feature 335..1441: note = CDS
  misc_feature 1442..1447: note = RE
  misc_feature 91..319: note = bridgeRNA
cacttcctccaccattgttgggcaggggctcgctgactgggttattcacagggttgtcctctggtgatccacagcggccttcgcgcaggctggctgcgtcctgccgctggtcctggtcttggctctgcgccgaactgaccgcagatcgcgtgtcttgccgccgaaccgccgggccgggactggcgggaggacgtgagccgcccggccggggacgtccgtgaccaggtaggagcctgaccttcggtgtcccggaagtgttttgtccgcacgcccccgggccggcggcgtccccttccccgcgaccaggcactggcacgaaggagaaggagaggtcatgtccaggatcgcagaacaagccggccccatcaccgggggcgtggacactcacgccgatgtgcacgtggccgcggtggtggatcaggtgggccgggtgctgggcacccaggctttcccggccaccgcggccgggtaccgggctgcgctggtgtggatgcgtgcacacggcgagctggcgaaggcaggggtggagggcaccggcagctacggtgccgggctggcccgctacctggccggctgcggcattgaggtggccgaggtgatccggccgaaccggcaggcccgccggcagcgcggcaagtccgacgccgctgatgcggtggccgcggcgctggccgccctcagcggcgaggcgtccgggatgcccaagagccgtgacggggccgccgagtcgatccgggcgctgaaagtggcccgcgccggggcggtcaagggccgcacccaggcgggcaaccagctgcgcgacctggtcctcaccgcacccgagccgctgcgtcggcaactggccgggcagccctctgggcggcaggtcgaggtggcagcccggttccgccccggcggcccggcatgcccggccgagggcaccaaggcggcgatggccagcgtggcccgccgccaccagcagctgaccgcggagatcacccggcttgacaccatgctggacgaactcgtgcgtcatgccgccccggaagggttcctggccaagcggggggtggccacccaggttgccgccgcgctgctggtcaccgccggggacaaccccggccgggtccgcaaggaggccagcttcgccgcgctgtgcggcgccagcccggtcgacgcctcctccggcaagcagctccgccaccggctcaaccgcggcggcgaccgccaagccaacaccgcgctgtggacgatcgccatgacccggctggcctgcgacccgcgcaccaaggcctacgcggcccggcgcaccgccgaaggcaagaccaagaaagagatcacccgctgcctcaagcgctacatcgcccgcgagatctacaaggccctatgcagacccaacggccagaaaatgccatcaacgccgcaactcaaacaagatctttcagttcgggtcttgacgtaggagctt

SEQ ID NO: 470 - DNA, 1363 bp, unidentified
  source 1..1363: mol_type = unassigned DNA; note = element_032d267
  misc_feature 1..2: note = core
  misc_feature 3..81: note = LE
  misc_feature 82..1101: note = CDS
  misc_feature 1102..1363: note = RE
  misc_feature 1093..1350: note = bridgeRNA
tgatggggtggatagcccccgacggcatctagtgtgccaggatggtggttatcgtagtcaccatgcaagggagctatccccatgaagattaccacaattggtctcgatgtggcgaagcaggtgttccaggttcacggcgtggacgacggcggcgttgttgttgtacgcaagcggctgcgccgcagccaggtcctcagcttctttgccaggctcgcgccctgtcttgtcggtatggaagcctgttccacctcacaccactgggcgcgagagctgcggaccctcggtcacgaggtgcgcttgatgccacctcagtacgtcagggcctacgtcaagcggaacaagaatgacagtgccgatgcggaagcgatctgcgaggcagtcacccgtccatcgatgcgcttcgtcccggtgaagaccgtcgatcagcaggcggtgctggtgatgcaccgggcacgggatctgctggtccgccagcggaccatgctgatcaacgcgttgcgcgcgcacatggccgagttcggagtgatcaccgcccaaggcaccaacaagatcatcaaccttgaggcggtgcttctcgacgaaacggaagagaggataccggagatggcgcgcggcgtgctgatagtgcttgtcggtcagttgaccgacctcaaccggcgcatcgccgatatcgagcggcgcatccgctgctggcacgcacaagacgagaccagccggcgtctggcgacgatacccggcatcggtccgatcactgcgagcgctctcgcggcaacggttcctgatccgtccgtgttccgcaacggcagagagttcgctgcttggcttgggcttgttccacgtcagaactcgagcggcggcaaggaccgcctcggtggcatcagcaagcgcggcgacggttatcttcgtcgtctcctgatcgttggcgcgcaagccgtactgcgctggtcgaaggtgaagcactccgatccctgggtgataggcttgttggcacgcaagcccaggctcgtcgccgcagtcgctgtggcgaacaagatggcgcgcatcgcctgggtgatcatgagccgcatgacgagctaccaaccttcagcagcaaggcgctgagggatcgataagcgttaatgctgcgacgagcttgcgagggtgaagacacgtgatggcatagtcggtcgacccgacggatcgagagagacctggaacggccacagagagcctcatctcgtcgaagtgaaaaggtctcgatccgcggttcccatcagggccagcggtcatggcgaccgcatcaaaaggccggacacatgactgcaagcgacgaaaatgcccgaaacgttgaaattactcttgcaaggagggggctatccacaca

SEQ ID NO: 471 - DNA, 1167 bp, unidentified
  source 1..1167: mol_type = unassigned DNA; note = element_0331695
  misc_feature 1..2: note = core
  misc_feature 3..177: note = LE
  misc_feature 178..1062: note = CDS
  misc_feature 1063..1167: note = RE
  misc_feature 34..198: note = bridgeRNA
cttgtatcttgaaaattgtttaaaataactgcgattggatttggcgaagtgtatgcagcccgatccctcctggggttcatagcccgccggtaagcgaatggcgcatacactgagccactcatctgaaacccgaacagttgtccgtactccataacgcatttgcaaggatgggtaataatgagtctgccaggtccactctgtgtaggtatcgatgtttccaaagcaacgctggacattgccgccagctacgctattgagcaattttctgttgccagtgatgctgatggctttgactccatcatcgctgagctgaggcagcacgacgttacccttgtgttgatggaagcgaccggaggccttgaagccgccgtagcctgcgcgcttcaggcagaaggttttgagatcgctgtggttaaccccaggcaagcccgtgactttgcccgggcgatgggatatctggcgaaaactgaccgtattgatgcgcgagtacttgcccagatggctgaagttattaatcgccatccggaacgggagcgctttattcgggctttgccggatgctgagcgtcaggttctctccgcaatggtagtgcgccgacggcagttgatcgcgatgctggtagctgaacgtaaccggctgtaccctgctcatcctcaaagcagaaaaagcattaatatcatcatcaaagcgctggaagatgaacttgcgcggatcgacaaagatatgaataaccacatccagaacaacttcaaagaactctctgaacggttgagcagtgttaaaggtgttggtaccatgactgctgcggcgctgctggcagaggttcccgagttggggagtctctccagacgtcaaatcagtgcgcttgttggcgtcgccccggtaaaccgggactcgggtacaatgcgagggcgacgaaccatatttggcggaagggctggcgtgcgaaccacactgtacatggctacgcttgtggcaacccgttttaacccggtgataaaggcgttttatacgcgtctggttgccgcaggtaagcccaaaaaagtggccctggttgcctgaatgcgcaaactgctgaccatcctgaatgcgatgctcagaaagaacgaggaatggaatgagttgtaccatcacgttgctccataattttatcgttcaagacagttg

SEQ ID NO: 472 - DNA, 1456 bp, unidentified
  source 1..1456: mol_type = unassigned DNA; note = element_0333db1
  misc_feature 1: note = core
  misc_feature 2..227: note = LE
  misc_feature 228..1442: note = CDS
  misc_feature 1443..1456: note = RE
  misc_feature 13..242: note = bridgeRNA
ctactagagacttccctgcaggatcggtgtctggccagactcggtccaggtgtccggcgggacgctctcttttgggctgcccacccgctgccgggtgtggctcactttcggtctgcagcccgccgggcactgttgacgaggcgtggctccagaggggactgccctgctcgtagtagcactgcccacctcgccgtccctatcggcacgagcacaggcgggagaacatcatggagcaggtcatcatcggggtcgatccccacaaactatcggccacgatcgaggtcgtcgatcaacacgaaacgctgctggggtcgggtcgattcagcaccgaccaggctggctacgccgcgatgcggaagtacgcgaagacctggccggaccgggtctgggccgtcgagggcgctaacggagttggacgtccgctcgcccagcggctcctcgaagctggggaacatgttgtcgatgtgccggccaagctcgccgcccgggtccggttgttcgacaccggccacaaccggaagaccgacgcgctcgacgctcactcgatcgcgatcgtcgcggtccgcaccgacacgctgcgcgtcttgaaggtcgacggtgagctggaggcgatgcgcttgctcaccgaccgccgtgaggcgctgacccggcgccgggtccagaccgttaaccggctccaagcactgctcgccgaactgctcccaggccaggccaagaaggacatcactcccttgcaggccaaggtgatgctcgccagcgtccgtccccgcgacgtcgcaggaaagaccagacgtcgcatcgccgcggaggagctcgccgagctgatcgccgttgactcgaagatcaagaaggccaccgccgagctcaaggcgatggtgctggcccgtgactcgcgtctgatggagatccatggcgtcgggcccgtggtggcggcccggatcctcgcggacgtcggcgacgtgactaggttcgccgatcggaatcggttcgcctcctggaccggcaccgcgccccttgatgcctcctccggtgagcagaaccgtcaccgcctctcccgtgccggaaaccgacggatgaaccacatgatccacatcgccgcggtcacccaactccgcctggacaccgacggacgcgcctactaccgacgcaagcgcgctgacggcaagaagccgatggaggcgatgcgctgcctcaagcggcggatatctgatgccgtctaccgacagctggtcgccgacgcccagcgtgcggcactgacagcctcgaccggcgcgggcccgggagggcactgcggggcgtctcaagaatccagcgcggtcgacctgcccccgcacatcgacacttcggatcagccacttcccggacccgcgaactcgacgctacaacgcactcagcgctcccggaagacctcgccgaagaagaccccccagatgaccagttgacaacagaggggagc

SEQ ID NO: 473 - DNA, 1823 bp, unidentified
  source 1..1823: mol_type = unassigned DNA; note = element_0334600
  misc_feature 1..2: note = core
  misc_feature 3..110: note = LE
  misc_feature 111..1385: note = CDS
  misc_feature 1386..1823: note = RE
  misc_feature 1493..1742: note = bridgeRNA
agcattcctgtagagcgttaattttcaactttgaaaaaaatagagctcctcagtaagatatgagtatagacaccactctaaaactcaaaatctaaggaggaagctctactatgaagtttaaaatgcaagacaaacaaaatcaactaattgaacgaatttctgataaacatctcgttgttggtgtggatattgcacaacaagttcacgttgctcgagctgtgaacttccgtgggattgtagtaggcgatcctctatcttttgaaaataatgaagaaggctttactagattactgcagtggatcaatgaattaaaagaaacaaaaaatttcaatacatcgattgtaggtatggagcctaccggacattactggcttaatctatcaaaatggctatatgaacaaaacgttgatgtggtaacggttaaccctcatcttgtcaaaaagaataaagaaaatcgagataatactcaatctaagagtgataaaaaagacgctctcgtaatcgctgatatggtgaagaatggttattatgcctttatccgtccaactccagaagcttttgaaaaacttcgagtacttatggctaaccgtgatgtgattgttaaacggcttgtcagttccatcaatcaattaaatcgatgggtagatcttatcttccctgaacttcgacaagtgtttaaggacataaaagggaaaggggcaatcgcaacccttcgcttattccctacccccatcgaattacgttccatggaagcccaggatatcgttgaaggatggaaaacaaaaatgaagcgacacgctggactaaaaaaagcccaatcactagttgaattagctaagcattctgttggtaatcaacaagcacatgatgcttataaattacacctagaacaattgcttgaagaatttgatctcgctacagttcaacttgaaagagttgaaaaagaagtgactggtgtactcgaacaaattacattcgcaaataaactacttgccattaaaggaattagtgaaatttcactagctggcattttaggagaagcaggagatctaagcggcttctctcacggtaattccctattgcgatacgcgggattacatctagcagaagctagctcgggtaaatggaaaggacaaattgtcatttctaaacgcggcagatcccggctacgacgtttcttgtatttagcgaccatgagccttgtcatgaacaatcctgaatttaaagagcttcactccaataatgtgaaagtaaaaaaaatgaaaaaaatgaaatcaattatgaaactgcttgggaaacttgcacgaatattagttggaatatctcgaaaaaatgagtcttattgtcctaataaagttcacgctttagaacctctagcagcataaagcttattctaaacacaaggaattccattaaaattttaaggagtactaaaagtaagtaattacccgttaattttttattgaatgttgccttattcgtaggatttcaaagaaagcacggagtactggatgtcttcaaccaaagggcaatgacccgttccgatagcaaaaccggcctccaccccttggataggcatgacgaaggaatgatagggcttagacccgttgagacatgggagggatagcctccaggggcggcgtggagaatacgtgcattatatggtaataactggagttttatctacctcctttatttcagcatgccttcatgtagccaaaatggaccgacactcattccaatcatctattactgttcttacaagtggtttgaaatcctgcgaataagtgagcatttgagagatatacctatctaactgaggg

SEQ ID NO: 474 - DNA, 1398 bp, unidentified
  source 1..1398: mol_type = unassigned DNA; note = element_033975c
  misc_feature 1..3: note = core
  misc_feature 4..332: note = LE
  misc_feature 333..1139: note = CDS
  misc_feature 1140..1398: note = RE
  misc_feature 1164..1386: note = bridgeRNA
tgatgcggtggacggctcccaccgccggcatccaggtgccatagagtggtttgtgattgcgactgcgctaatagggggagccgcccaagatggacgttaccacgatcggttttgatctcgcgaagagcgtatttcagagcctgccccggacctgatccggggtccacggtgtcgatgggtcgggtgagacggtgatccgcaagcagctacgacgccggcaggtcttgcccttcttcaggaagcaaccgccatgtttggttggcatggaggcctgcgccacggcacatcactgggcgcggcagcttgaagcgcttgggcacgaggtgcgtctgatgccgccgcgctatgtgaagccttacgtgaagcggaacaagaacgacgcggcggatgccgcagcgatctgcgaggcggtgacccggccgacgatgcgcttcgtcgcggtgaagtcggctgagcagcagagcgtgctgatgctgcatcgaacgcgtgcgctcctggtccggcagcggaccatgctggtcaacgcgatccgggcgcacatggcggagttgggcattgtcgcccgggtcggcctgcctcaggtcaaggcgcttctcgccgtgatcgccgatgaggcggacgggcgccttccgccgctggcgcgaagctgcctgcaggggttggcagttcagttgatgtcgcttgagcacgagatcgccgccgccggcgaacgtatccacgcctggcaccgatcgaacgaggtcagccggcaactggagagcattcccggcatcgggccgattacggcgagcgcactggcggcaacgatcaccgacccgtcgctgttcagatcggggcgtgagctggccgcctggatcggtctggtgcccaggcagaactcgagcggcggcaaggagcggctcgggcgcatctccaagcagggcgatccctacctgcgctggctgctcgttgtcggcgccatgacggtgatccgccacgccaagcggcgcggcaccgcgaacccgtggcttgccgaactcatcgcccgcaagccgaccaaggttgccgcggtggcgctggccaacaagctcgcccgcatcgcctgggcgctgctccagcacggcggaacctatcaaacgcccatggctgcggcggcttgagcgcgcagacggtctaaaggagcgaagagcttggcagggtgaacgtgaggtaatgcaagaacggtcgtaccggggatcgggaaaacccgtttgggtcacagcgcttcaagcgcgtgcttttgattgggacccgatcccgcgtatcgcattagggccagcggtctcgacagaccgcatcaacaggccggacacatgactgcacccgaccaacttgcagcaacgtcacacaatctcttgccaaaagggagccgtccacaca

SEQ ID NO: 475 - DNA, 1652 bp, unidentified
  source 1..1652: mol_type = unassigned DNA; note = element_033af7c
  misc_feature 1..2: note = core
  misc_feature 3..252: note = LE
  misc_feature 253..1434: note = CDS
  misc_feature 1435..1652: note = RE
  misc_feature 14..228: note = bridgeRNA
ctcgtattatataaaagtagtagtttttagagttcctctccaagaactttaaaaatttgctatactgtaatggatgctgtggattggtttcacctcctaccgcttgacggtttcagaaaggctccaaccacagacctttacgagtttgttaattagttagataccgcccgacggtttatttagaacgaggttacaagacgtaaagtgccctgtgggttcttacagtatcaaataaactttggaggtattgatatgatttatgtcggaatcgacatagccaaggacaagcacgactgcttcattgtaaattccgatggtgaagttgtgtttgatgtgtttacgataccaaacaacatggatggctttcttgatttactttttaaaatcagaacttgtgagaaggatgcagacaaagtaaaagtagggctcgaagccacgggatactacagctgcaacattctcggatttttgaaaaacaaaggcctgccaaccatcgtaattaatccgctgtacaccagtctaagccggaagagcatcagtctgcgtaaaacaaaaacagacaaggtagatgctcgtacaattgcaagtatgataatgtctgacgtgagcttaaagccctactcagacaaattgtaccacaacgaagatttaaagtcactaacaagatacagatttgataaagttatgcaaagagcaaagctgaaacagtcggtatcaaggcttgtaaacatactttttcccgagcttgaaaagctggtttctactcttcacggcaatgctgtttacaaactactatccgaatttccaagtgctcagcacattgcatcggcaaacctcaaacatcttacgcacttgcttaataccgcatctaagggtaggttaagggttactgcagatgaaattcgcgaaactgcaagaaaatctatcagctcttatttacctgcaaaatcactggagttacgccatacaatcaagatgatttgtgagctcaactctgaaatatccgaaatcgaagccgagattaaaaagattatggatgttattgactctccaattttatcaatccctggtatcggtcagaaccttggtgctatgattatagctgaaattggtgacttttctcgctttgacaatccagataagatacttgcctttgccggatgctctccatcaacctatcaatcagggcagctatattcttcacatgcaaaaatggaaaagcgcggctcgaggcaccttcgatgggctttaatcaatgctgctgcctatgtctgcaattgggagccaactttttcagcctacttacaaaagaagcgttcagagggtaagcactactacgttgcactttcccatgctgcaaaaaagcttgtgagacttctgtaccacttggaaaccacaggtgaaacataccaaacatcatccattctctcttgaacctgagctaaaatctaatacaagccagccggcgcagcgtaccctttacaaaccgaagcaatcaaatgctacaattttttttgagggtgtgctgggtctactttgtcattctctccgtcaccctcgctaatactaaatagcatttgattgctgtttgtcaagggcggcgaatttttttgcacttttttcattttaggtcttgacttttaatagttagt

SEQ ID NO: 476 - DNA, 1523 bp, unidentified
  source 1..1523: mol_type = unassigned DNA; note = element_0341bc3
  misc_feature 1..4: note = core
  misc_feature 5..259: note = LE
  misc_feature 260..1513: note = CDS
  misc_feature 1514..1523: note = RE
ctcactggtgcaccatccttatgtcagtggtcttggatggactgctgatgcacccgaggtgccgccagttcatcgcccggcccgcttgacgcttcgacgtccaggatgagttctgcgggatctggcggttacccggggcgtgccgaccgtcgacagggctgagcgccaccgagcgccgaacagtgagcgaaccggcagccacgtcccggcaccggaacaaaggtgcctccccactgggactagcagcgaggaggcaggcttgaagtctgccagaaacaccctgcccgaagaacccgccggcggcgtgaccgccgggatcgactgggcccgtgatgatcatgccgtgtcggtggctgacgcccgcggccgtgagaagagccggtgcacggtcgagcacagcaccgccggcctgcgcgagctgatcagcgtcctggcccgctccggcgcccgggagatcgcgatcgagcgacccgacggcccgctcatcgatacgctgcttggcgccggggtcaccgtggtggtgatcagcccgagccaggtcaagaacctgcgcagccgctacggctcggccgggaacaaagacgaccgcttcgacgcgttcgtcctggccggtaccctgcgcaccgaccgggcccggctcgcgcccttgacccccggctgcccggccaccgttagcctgcgccgcgcctgccgcgcccgcaaagacctcgtcggccaccgggtcgcgatcgccaaccagctccgcgcccacctgcgcaacgtgctcccaggcgccgccgggttgttctcccggatcgactccccggtcagcctggcgttcctggcccgcttcggcacccaggaccgcgccgactggctcaccccggcccggctgggcaaatggctggccagcatcggttacagcggccataccggcccggacgtcctccacgcccgcctgaccgccgcacctcgcggcctgaccggacccgacgctgacgcccaagcctgcatcacccaggcactgcacgctgtcctggtcaccttgaccgagcagatcaagacgctgtccacccagatcggcggccagctcgccgcccacgccgatagtcacgtcttcaccagcctgccccgcgccggcaccgtccgtgctgcccgcctcctcgccgagatcggtgactgccgcacccggttccccaccccggagtccctcgcctgcctggccggcgccgccccctccacccgccagtccggcaaactccgcgccgtcaccttccgctgggcctgcgacaagcagctccgcgacgccgtcaccgattttgccggtgacacccgccacgccagcccctgggccgcccacctctacagccaagccagagcccgcggccacgaccacccccacgccgtccgcatcctcgcccgcgcctggctgttcgtcatctggcactgctggcaagaccgaactgcctacaacccagcccgccacaacgccctccagaccctcctcaaacaagatcagcaaagcgaggcttgacacagggcta

SEQ ID NO: 477 - DNA, 1377 bp, unidentified
  source 1..1377: mol_type = unassigned DNA; note = element_0349c53
  misc_feature 1..2: note = core
  misc_feature 3..86: note = LE
  misc_feature 87..986: note = CDS
  misc_feature 987..1377: note = RE
  misc_feature 1147..1365: note = bridgeRNA
tgatgctgtggacggctcctccaccggcacgcgagtgccatcgacgtggagcctgttgaggctcccacgattcggaggagccaagcatgcaagcggtcacaacaatcggttttgatatcgctaagtcggtctttcaggtgcacggtgttgatactgtcggccaagtgattattcgccggcagttgaagcgccggcaggtcatagggtttttccagaagctgccggcgtgcctggtcggcatcgaggcgtgcgcctcatctcattattggtcgcgcgagctgcaggcgcttgggcacaacgtgcggctaatgccgccggcctatgtgaggccgtacgtcaagcgccagaagaacgacatggccgacgctgaggcaatttgtgaagcggtcaccagagccaatatgaggtttgtgccgaccaagactgctgaacagcaaagcggcctgatgcttcatcgcacgcgccatctgttcatgcgccagcagacctcagtgatcaacgcgatccgcgctcatcttgccgagtttggcattgtcgcaccggttgggcgcagaggcgtcgaggaactgctgcgtgtggttgctgatccaagcgacaaacggctgcctgagattgtccgcgcctgccttgccgccttgggtagccagctgctcagcctcaaaaagcaaatcctagattttgatcggatgatcacggcttggcaccgatccaatcaaacgagcaaacgccttaactgcattcccggtgtcggtccgttgctatccaccgcccttgtcgccagcgtcgctgaccccaaaaccttcagatcgggtcgcaacttctcagcttggatcgggctagtacccaagcaaaactcgagtggaggtcgggataagctcggtagtatcagcaaacaaggtgaccgctatctgcggggcttgttcgtggccggtgcgttcgccgtgatccgctatgccaagatccatggcaccaagcatcggccctagctcacagcattgctggcacggcgacacaccaaagtcgccgcgatcgcgcttgccaacaagctagcccgcatggcgtgggcgatgatggctactggcgagcgctacaattatccggcctcgctgaaggtctaacgcgatcgcgccgacatccggcgtgatatgaaggttgggaggacgaacagcacgtaaagcagagccggtcgatccggcgatcaggacaacccacttgtgccattgcattctcgaatgcggggttttgaccgggacctgatccgcggaaagcattatggccagcggtcatgtgaaccgcatttaaaggccgaacacatggctgcaccgaccaagtctgctacgcgaagattcttcttgccaacccggagccgtccacaca

SEQ ID NO: 478 - DNA, 1184 bp, unidentified
  source 1..1184: mol_type = unassigned DNA; note = element_035f46c
  misc_feature 1..2: note = core
  misc_feature 3..212: note = LE
  misc_feature 213..1169: note = CDS
  misc_feature 1170..1184: note = RE
  misc_feature 3..194: note = bridgeRNA
cttgtatggttgaggcgtcggggtggagggacgtgcagtgctttcggccgcgcaggcggaccgacgagtgaggattctcccgccccacctgccaacgtcgatgaggaactgagcgcggccgtgcggtaggcatagggcagcgccgatctgcaagcaagccaacgggcaggtgagctgcaccccgacgccacgattttccgagcggagggaccatgatgcaagcggctgagcagtacatcggggtggatgtcagcaaggcggagctggtcattgcgcaggcgggcgggcagctgtgccgggtcagcaacgatgtggccggcatcagcgggtggctcgagcaggtttcacagccggcgctgatcgccatggagtcgacggggcgctaccacgggctgctcgcacaactggcgcacgaggcgggtgtgacggtgtacgtgctcaacgcgcgcgacgtgtacttctacgccaagacgctgggtagccgcgccaagaccgacggggtggatgcgacggtcatcgcccgctatctggtcgagcatcacgcgcggctgcggccgtggcggccgggcagtgcgctgcagcagcgactgcaggggctgctggcccgtcgtgcgcagctcaccggccatcgcgcagcactgcggcaggcgttggcgggcggcgagttgcaaggcatcgatgtgcagcccttgcacagcagcttcgcgcaggtgatcgaggcgatcgatgccacggtgcaggcgctgatcgacggcgacgccgagcttggccaaggctgtgcgcggttacgcaccatcattggtttcggaccgcaggccgcggcactgctgacggtgttgctcagtcgcctgcagctcgccagcgccgatgcgttggtcgcctactgcgggctggatccgcgtcccaacgactcgggcgcgcggcgcggccgcaggcgacttaccaagaaagggccgccgttgctgcgccgacagatctacctggtcggctgcgcggcggccggcagcaaggcgctcaagccgctttaccaatcgatccgcgcccaaggctttgctacgaccgaagcagccttgatcctgggccgcaagctgctgcgcgcagccttcgcgatatggaaaaacagcaagccgttcgatccagcacgactactgccgcctaaaagcgcttgactgaaagcatagaac

SEQ ID NO: 479 - DNA, 1378 bp, unidentified
  source 1..1378: mol_type = unassigned DNA; note = element_0361d5b
  misc_feature 1..3: note = core
  misc_feature 4..86: note = LE
  misc_feature 87..1106: note = CDS
  misc_feature 1107..1378: note = RE
  misc_feature 1125..1364: note = bridgeRNA
tgatgaggtggacgacgcccgctcccggcatcgaatgtgccaaagggtgatcgttggagaacgaatcacctgagggggtcatccacatgcaggctagcacgatcggtttggatatcgcgaagaacgtattccagctgcacggcgtcgacgcagcgggcaagacggtgatcaccaagcagcttcggcgggggcaggtgatcagctttttcgagaagctgccaccctgccttatcggtatggaggcttgcgcgactgcccatcactgggcacgcgagctgacgaaacttggccacaccgtgcggctgatgcccgcgagctacgtcaaggcctacgtcaagagatccaagaacgatgcggctgatgcagcggcaatttgtgaggccgtaacacgtccgagcatgcggttcgtagcggtgaaaacaatcgaccagcaggccgctctcacgctgcaccgttgtagggacttattgatccgccaacgcacgcagctgatcaacgcactgcgtgcgcacctcgccgaactcggaatggtcgcagcaacggggaaggcaggcgtagatcacgtggtcgcgatcgtgaccggcacgcagctgcccgcgccaatgaagcaagccttgcaagcgctcgtgaagcaactcgcggctttgcaggagcagatcggcgaactcgagcgtagcattcacgcccagcatcgtgcgagcgatcgaagccgtcggcttgagactatcccgggcataggcgtaatcggtgccaccgcgatcgacgcgaccgtcatcgacccgagcgccttcaaatcggggcgcgagctcgcggcctggatcggtctcgttcctcgacagaactcgaccggcggcaaggaacggctcggtggtatctcgaaacagggtgatcggtatctgcgcaggctccttgtggctggagggatgtcggtgatccgacacgcgcgaacgcatccagacaagcacccgtgggtgatcaagctgctggccaagaagccagccaaagtggtcgcggtcgcgctagccaacaagatggcacgcatcgcctgggccgttttggccaagggcgaaagttatcgggcgccagcacttgtggcagcggcctaagaggcttggcaatgggcgcctgaggaaatgtcggcgcgcagcaacgaattgcgagggtgatgatgacgtgatgcgaaacggtcgagccgtcgatcgggaaaacccgtaagtgttcacgcgcggaaagagcgcgtcactctgattgggaccagatccgcggatcacatcagggccagcggtcatgcgccgcgacaacaggccggacacatgacttgcacccgaccgcaagccgcacgtcagatttctcttgcaccgcgggcgtcgtccacaca

SEQ ID NO: 480 - DNA, 1340 bp, unidentified
  source 1..1340: mol_type = unassigned DNA; note = element_036877e
  misc_feature 1..2: note = core
  misc_feature 3..169: note = LE
  misc_feature 170..1114: note = CDS
  misc_feature 1115..1340: note = RE
  misc_feature 1089..1324: note = bridgeRNA
agataattggactccccctaccccgaagaggtagggtaatatactgttaccacacaaatatattaaaagagtcctgaaaataaatattactagagttggtgttgatttagcaaaaaaagttattcaagtttgtgtttataaaaatacaaaggtgcaatctaatacagaaatgacaccgaatgaattccttaattggcttgttaatcaaaaaccttttattatcatttttgaggcgtgtggtacgacgaactactggaagcaaaaagctttagaagcagggcatgatgctcgcttaatatcagcaaaattagtgtcagctgttagacaaaatcaaaaaacagataaaaatgatgcactgacaattatacaagcatcgttattaccagaagttaatttcattgatggtaagaatattaaacaacagcaactgcagtcaatcaagcgattacgagagctagcagttaagcagcgagatgctattcaaaaacaagttatcgctctattgttggagttaaatatacgatgtcccaataaaagcgctagcctgctgaagctcatatcagatgttttagaagacggggaaaacaacctattattcgaattcagacaagcgttggaaacagcaaaaataacgttaaccacactgattgaagctgtttttgcttatgatgattgcatgaataatgttattcaagcagataatgattgtaaaaagttccttaaactcgaaggagtaggctccgttaatgcagccaatttatatatagagcttggttgttctgaatcaacgagattcaataaaggtaaagatgcctcagcatgcattggtgttacccctattcagtattcttctggtagtaagataaaaataggcacgataggtaaaacaaaaaatagtttactaagaagtcaattgatcacaggttcaatggcgttcgtaaggcaggtagtaaaaagagagccgaaaaccactaaggaggtttggcttaaagcgctagcagagcgacgaggtaataagtgtgcagctgtagcgttagccaataaaacggtaagaacggcttttgcaatgattaaaaacagtaccgaatacaaagctgccttaatagcagcttagaaaagagttctaacaacaaaatgcaaaaataaagcaaagattaaaatcagcaagctaagtcagctaaaaacgaagagcctaatagctcgtaaaccagatttgacagtttgttcgcgtaaatatcatagagcctgggttcgctactcaaatagagctcgtacataagttcgcatttatttctttcattatttaaagttttgctgttgacaaagggggagtccacata

SEQ ID NO: 481 - DNA, 1677 bp, unidentified
  source 1..1677: mol_type = unassigned DNA; note = element_037008c
  misc_feature 1..3: note = core
  misc_feature 4..247: note = LE
  misc_feature 248..1462: note = CDS
  misc_feature 1463..1677: note = RE
cttatacagtaaactattaacaagcccactcgacacagggctggaacaagagtacacttgttctatgaaactgttgaacaagccagggaaagtctgtctcatccacccggctcgaccgattaagaaagctcgcacttccctggcattgctcctgagcgagaccgatcatgagagagacgcacttcgagcgccacagtataagggcccgtgaggacaggaagcattcgtgcagagaggagcgtttctgatgtggtataccggtattgactgggcggacgagcaccatgatgccttgacgattgacgaaaaagggcatcagatgggttcgatccgtgtggatcataccccacaaggattggccaagttggacacctttttgatgcagatcattggttctgcgtccaaagaacaaatggcgtgtattattgaaaccacccatggtctgttgattgttcacctgttggaggccggctggcctgtgtacccagttaatcctcgcactgtggatcgtcggcgatcggccagtggtgccaagaccgatacaatcgatgcctacttgctggccaagaccgggcgcgctgatttcgcagatttgcatcgactgaccccggatagtgacaaggtagccgagctcaaacaactgacacgtgaccaggatagcttgatccgcacgcaaacgcgtttggtcaatcagctcaccgcttgcctcaaagcctattatcccgtggccctggatctgttctcgaaactgcaacaaaagagtacgttggggttcttgcgagcctatcccaccttggagacagcaagagcagcttctctccaagaggttcaacagcaactcaagcacacgaggcatccccacccagccgatgctgcggcttcgattgtggaactgctgcaccaccctcagttgcaggccgatgtggtcctcactcgcaccaaatcgcgcttgatgctggccctggtgagccaactgctgccactcatggaacagattgccacctatgacaaagagatccacaccctttttttgacccatgaggatcacgccatcttcgagagtttgccgcgtgctggacaacatctggctccacggaggctttctgagattggggatgatcgtcagcgctaccaagatgccagcagtctgcaagcactggcagggacctcgccggtcctctaccagagtgggatgtattccaaagctcatcgtcggttgggctgcattaaaccgctgcgcaacgccttgtatcaatttgcgtggcagagtactcaaagcgaagcgtgggctcaggactactatcagcgtaaacgaacagagggcaaaagccacaccgttgccatacgggcgcttgccaatgtgtgggtcaggatcatctttgcgatgtggacccatcgagagtgttatcagacggcgacctttgagttggctcaacagcaccatgcccgcagagctgcctagtgctgtctccatcgccaggcaacggtctgctcgtgtagaacggacaacatgtcctgctgtgtctgcataagtcacatggcagatctttatcatgccatacacccacatgcgatggcatacagccttctgctcgcttacaggcatttctcttctctcctttcctcagtttttctcttgcctcaaaattggttcaaaaaggacttgacatagagagt

SEQ ID NO: 482 - DNA, 1199 bp, unidentified
  source 1..1199: mol_type = unassigned DNA; note = element_03703b4
  misc_feature 1..2: note = core
  misc_feature 3..187: note = LE
  misc_feature 188..1177: note = CDS
  misc_feature 1178..1199: note = RE
  misc_feature 13..196: note = bridgeRNA
cttgtgtctctccagtggggagtgattagctaccacccccacggcctgggagaaacccggatctaccctgacggtttcgaacctgttccgtagattggtctcccaggcttctatctcgcaaacctgaacggtatccaatgcccccttccggcgaggagaggctgtacgcacaagggaaagtggtgagatggcacatatcggcatcgatatcggcaagaagaaactggattgcctctggcttcgtgatatggagaagggcaaggtcaaaaccaaggtctttaccaatcggcaccaggattatccagcgctgctggactggctgacccggcagaccggtgagtctcccgaagcgttgcatgtctacatggaagccacggggatctaccatgagcccctggcttattggctccatgaggctggcgtcaatgtctacgtgctcaaccccgcacacgcgcatcattatgccaagagtgcaggtcgccttcacaagacggacaaggcagacagccgtgtcctagcagagttcggcgcgtcccgaagccaccggcggtggacaccggagcctgaagaaacgcgtgagctgaagcgcctggtggcgcgcctcgaagcggtttatcaggatattcagcgcgaaaagaatcgtctcgagaaagctcaattcagccgtgatacaggggccgagacctcgatcggccatgtcctggcggccctggagcgcgaagccaagcgcttacaggaggagatcgagacgcacctcgaccgccatgatcatctaaaacgagatcgacagttgctgatgagcattcctggcatcggtcccgggctttccacaaggctggtcgcggtcctgcgaagccgaccattcgagagtgctcgacaggcggccgctttcctggggctcgtgccgacgtattacacctctggcacgtcggtcaagaagacaccaaccctctccaagacggggagtgccgtgatgcgtcggaagttgtacatgggagccgtggtggccatgacacacaacccggatatccaggcgcaatatgcccggctgaaggcacgagggaagcacagcatgtcggccctcggggcggccatgcgtaagctggtgcatatcgcctatggcgtcctgaagacgcaaaccgagtatcgaccccaacccatccctgcggggggttgaggtcggtcgggagagacggtat

SEQ ID NO: 483 - DNA, 1338 bp, unidentified
  source 1..1338: mol_type = unassigned DNA; note = element_0377ebc
  misc_feature 1..2: note = core
  misc_feature 3..76: note = LE
  misc_feature 77..1087: note = CDS
  misc_feature 1088..1338: note = RE
agatgtgatgaaagcaggcgtgcctcccagagggtacattcgtgctcgaagcacagaaccctgaaggaggcacggaatgatccacgtaggagtagatcttcaccagagattttgttacatgacggcggtagattcaagggggcgattgctgggagccgggcaggtccggaatcaggaccaagccttgcgcagctacttcgcgcagtttcgcggaccggtgcaagcggcggtcgaggcctgcagtttttggccggcgtttcgcaaagcggtttgtgcgcgcgtccaggtgcgtctggtccatccgcagcgggtgaaagcgatcgcgtcggcgaagctgaaaaatgatcgcatcgattcggccaccctggcgcatttactgcgttgcgatttattgcccgcggcgtggatggcggacgaagccacccgcgagttgcgccagcaggtgcggatgcgggccacactggtgcggcagcggacacgattgaagaaccaggtgcacgcgattcttcatcagcaaggcttgcagtttgaaggcagcgatttgtttggacaaggcggacgggcatggttaaagcaagtgtccttgccggcggcgggaggctcggcggtcaaggtgtatctgaagttgatcgatgagttcaccgcgcagatcagtacccaggatgaggagttgaagcggcagtggaagaaagacgcgcgcgtgctctggctggaaaccattcccggcatcggctggtactcggcggtgctgctggtagccgagatcggcgacatcctgcgctttcaagacaagcgcgcgctggccaactatgccgggctggtgccttggctcagagaatcggcggacaagcgccacagtggaggcatcacgcgcgtgggttctccctggctgcgctggatcatggtggaggccgcccatgtcgcggtccgaacttcgccgccggtgaagaaatggtttgaacgactctgccgtcgcaagcacaaaaacgccgctttggtggcggtggcgcgcaaactgctggtggcggtttgggccatgctgcacgacggagtcgggtttgaagaaaagcattttgcgctgaactagacgcgcctgcaaaagtggaaagccaactacgcttcccactttcgcacccgcgctaccacggctgcaggattttgggtttgcggtcggtgtaaggcaaaccggtgagctcgttgtcatccttgtccctcgaggacgtcgctcagatggagccgccggccacggacgaaccttatgtgcctcgagcacgcatagaagtctgtccgcatcaccaccgcaaccaccctatggacaggtacgcctgttttcataga

SEQ ID NO: 484 - DNA, 1380 bp, unidentified
  source 1..1380: mol_type = unassigned DNA; note = element_037ddbc
  misc_feature 1..2: note = core
  misc_feature 3..87: note = LE
  misc_feature 88..1119: note = CDS
  misc_feature 1120..1380: note = RE
  misc_feature 1124..1368: note = bridgeRNA
tgatggtgtggaacggcccttcgcacccggcatcaaggatgcctattgtgatgatgccaatcgtcacatgatagaaggaaccattccatggacaagattaccacaatcggactggatttagccaaatcggtctttcaagttcatggcgttacggaagatggcggtgtcgctgtgcgacgtcgtttacggcgatcacagctattggaattcttccgtaccgttgagccttgtcttgtcggccttgaagcatgcgccagcgcccattactgggctagtgagatcagaaaattcggccacacggtacgtttgatgcctccggtctatgtgaagccttatgttaagcgaaacaagaccgatgcagccgatgcagaggcaatctgcgaagcagtcacgcgtccgacgatgcgttttgtgcccgtcaaatcacgtgaagagcaagctgcgggcattgtgttgaaaacccgagagctcctcgtgcgtcaaagaagccaaacagcaaacgccctgcgtgctcatatggctgagttcggaattatcgctgcaagtggaatggcgagtattgccaggcttacagccattttgcgcgacaatcaggatgactgcttaccaaacgcggccagagcagcgcttctggaaatggccgagcagatagaaaagctgacggacaggattaatgcgttggataccaagatcgttgcaggcgtgaaagccgatgaagcggctcgtcgattgacgactattccgggcgtcgggccaattattgccgcgaccgttcgtgcagtcatccaggatcccgctgccttccggacggggcgagacttagctgcctggattggccttacgcccaacgccaattccagtggaggaaaagagcgcctcgggagaatctccaagcgtggcaataaacaactgcgcactcttttgatcgtcggcgccacggcggttctgaagcaagcccgtggagcacagaagcgacctgaatgggtcctgtcattgttggcgcggcgtccctacaaagtggcggctgttgcactggccaacaagatggtacgcatcatatgggcgttactcgtgaaggggggaacatatcaagcgccaacggccatggcaaagatttaggactatcattgccggcgtttcaacgccgggataacacggcaaggtacgaaagcgtgatgaacccgcggggcaaaacctcaatatcaatcagaccgcctgttgcaatgcgccttcgagcgcgcaaatttgattaggcgattggtattgcggatatcatcgtggccagcggtcgatggccgcaaaaacaggccgtacatatgactgcaccgtccgacggaaaattaacgcagaaaaaccttgctttgtgggccgttccacata

SEQ ID NO: 485 - DNA, 1474 bp, unidentified
  source 1..1474: mol_type = unassigned DNA; note = element_03814dc
  misc_feature 1: note = core
  misc_feature 2..241: note = LE
  misc_feature 242..1459: note = CDS
  misc_feature 1460..1474: note = RE
  misc_feature 9..233: note = bridgeRNA
cgttactttctttgtggcccggatggagggatcctgagggttgacggcctgccgggctcggcatgattgctgccccctgtcgaagtcatgatctggggggtgttgtcaccgggcctggttggcggtgtgtgatcgctgataggggctggacccgagctgctgctcgaggccgttcgtaacgtggatgccgagacgcgccgcctgcggttgccgtcgtttgcgaaaccggatggaggacgaggtggtcacaagcatcggcaggtacgacgaggtcgacgtgttcgtcgggctcgacgtcggcaaaggcgaacatcacgcggtcgctctggatcgggcgggccagcggctctacgaccggccgctcccgaatgacgagcgcaggctcaaggcggtgctcgaccagctcgccgcgcacggcaccgtgctgctggtcgtcgaccagcccgcgacggtcggcgcgcttcccgtcgcgctcgcgcaggccaacggcgtactcgtgggctacctgcccggtctggcgatgcgacgcatcgctgacctgcatccgggcgaggcgaaaaccgacgcccgtgacgcgttcatcatcgcggagaccgcgcggacgatgccgcacacgctgcggtcgatccaagtgaccgacgagcaggtcgccgagctctccatgctctgcgggttcgatgacgacctcgcaagtcagatcactcaagtctcgaaccggatcagaggcctgctgacgcagatccaccccgctctggaacgcgtgctcggcccgcgactggaccaccccgcgatcctcgacttgctggcgcactacccgtctccggccgcgatgcgcaccgctggcgagaagcgactcgggaaccggctgctcaagaacgcgccccgcaaaggccgcgtctgggcggctgagatcctcacggctctcggcgagcagacggtcgtggtcacgggcaccggtgctgccgcgctcgtgctcccccgcctggcagagcagctcgcggcgctgcgtcggcagcgtgacgagatcgccatcgaggttgagaagctcgtcgatcagcaccctcttcagccggtcctgacgagcatgcccggagtcggcgtcaggaccgcagcccgactcctcaccgaggtcaccacgaagagcttcccaaccgccgggcacctagccgcctacgccggcctcgcacccgtcacccgccgatccggatcctcgatccgcggcgagcacccctcccggcgcggaaacaagatcctgaaacgaacgatgttcctctccgcattcgccgcgctccgcgaccccgaatcccgcgcctactacgaccgcaagatcgcacagggcaaacgacacaaccaagcgctcatcgccctcgcaaggcgccgctgcgacgtcctctacgccatgctccgcgacggcaccctctaccagccgcacgtcaccgaatccgcccttgccgcttgacaaacgacatagggg

SEQ ID NO: 486 - DNA, 1386 bp, unidentified
  source 1..1386: mol_type = unassigned DNA; note = element_038c354
  misc_feature 1..2: note = core
  misc_feature 3..68: note = LE
  misc_feature 69..1091: note = CDS
  misc_feature 1092..1386: note = RE
  misc_feature 1159..1383: note = bridgeRNA
taatgggatggtccgtcgtcttcaggtgaacctgtggcaggatgaaggcgaacaaggaggagtctctcatgacagcatatgtttgcggaatcgacctcggcaagacagtgtttcacctagttggccttagcaaggaaggccacatcaccgtcaagaagtgctgcagtcggaagcaattgcttacctatgcggcgaatatgccgacgtgtttgatcggcatggaagcatgtcctggtgcacacttcctggcccgagctcttgtggcgcaagggcataccgttaagctgatgccggcagaatatgtgcgacctttcgtgaaatcgaataagaacgactatgtcgatgccgaagcgattgcggaagcggtgcagcggccgacgatgcgatttgttcccatcaagaacgaggctcaactggatctgcaagcgctgcatcgtgtgcgggatcgctggattggtcgcagaacggcggtgatcaaccagctgcgagggtttctactcgagcatggcattacggttgctacaggccccgcgcacctcagcaagcaaatcccttccatcctcgaagacgctgataacttgctgtcgccacggatgagaacgctgatgatggagcttcggagcgagtggaaaaagctggaagaacaaatcgatgccatcaaccgtgagctcgccgaatcggcgaagaatcaagacagctgccggcgcttgcttactattcctgggattgggccgctgaccgcgactgcacttactgctgccatcggcaacgctaccgcatttcgcaagagccgggacttggcagcctggctcggcctggttccccggcagcattcaaccggcggaaaggccaggctgttgggtataagcaaacgcggcgatccctacctgcggcggctgttcattcacggagctcgttccgtgctggcacgagtaaagcgagacaagcacagcttcggcgagtggctcaataagcttgagactcgagcgcctcagaatgtagctgttgtagcaatggccaataagttggcccgcattgcctgggccgtgctgacaagcggtaaagtatattcctcagcagttgtttcgtgagggaaagtgaaaattgcgttgcgattctcacttgtcctcctcactgctacgacgacgatttctaaccaaggtttgcaagcagattcactgatggcagaacaggtccacccggcctaccttgagccagtgttgccatacggtcgcaattgagaccgacggggtaattaggagaaggtgggcgcggattccatcatggctcgaagcagtaccatcgcttcacaaagaagccgcatacatagaagcagaccgcttcttccatcaaagatttgcttgcaatcaggcgacggaccataca

SEQ ID NO: 487 - DNA, 1381 bp, unidentified
  source 1..1381: mol_type = unassigned DNA; note = element_038c5c8
  misc_feature 1..2: note = core
  misc_feature 3..78: note = LE
  misc_feature 79..1119: note = CDS
  misc_feature 1120..1381: note = RE
  misc_feature 1119..1368: note = bridgeRNA
tgatggtgtggacggccccctacggcatcagttgtgccagaatgaggttgttggaaatctcagacaagggagccgtccgtgaagcagattatccgcattggaatggatacgtcgaagcatttttttcagctgcatggggtcgatgcggcggagcaggtggtgttgcgcaagcgacttgggcgcaaggcgatggtggatttttttgccgagctgccgccgaccgtggtcgggatggaggcctgcggcgtggcgcattactgggcacgcgtgctgggtgaactgggccaccaggtgaagctgatcgcgccgcaacacgtgaagccctacgtcaagcgcaacaagaacgacgggcgggacgccgagggagtgtgtgaagcgatgagccggccgacgatgcggttcgtgccggtaaagacggcggagcagcaggcggccctgatgctggccggcatccgcgagcagttgatcgcaaggcgcacccagctcagcaatacgatccgcggctatgcggcggagttcggtatcacggcggccaaggggctcgacaagatcgcgccgctgctggcgcagatctcgcaagacaagagcttaccggagctgacgcgcggactgtttgccatgcaggggtgcgagtacgcgcagttacagctggagttgaaggcgatcgaggccaagctgagggcctggcaccgcgccaatgccgacagccggcgtctggcgcagattccgggggtcgggccgatcggcgccacgacactggtgatgaagacgcccgatccgcacgcgttcgcctccggccggcattttgcggcctggctcgggctgaccccgaaagaccattccacggcgggcaagaccaggctcggcaagatcacccgcgccggcgatgagaggttgcgcagcgtgctggtggcgggagcgaccgcggtgatccagcaggccaagcacggccgtggccatccatcaccttggctggtggcgctgctgaagcgcaaaccgccaaaactcgcggccgtggcgcttgccaacaagattgcccgtatcgcctggaagttgatggcgacaggcgagaattacgacgccgcgcggatgcttggtgcatcggcgctcgccgcctaagagatcagccgatcggtaagcccgtcttaccggccgagccggagctgcaagaggagtagatggtaggatcgatcgatccaaggtgcgagacagtccgtgggacccattggccgaagccaggtcgtgtggttgattggaactcgcgtcgcggaaaccatcttggccagcggttcaaaccaaccgcatcaacaggccggacatatggatgcaagcgatccgatctgacccaaaaaactcttgtgccacgggggccgtccacata

SEQ ID NO: 488 - DNA, 1368 bp, unidentified
  source 1..1368: mol_type = unassigned DNA; note = element_0394048
  misc_feature 1: note = core
  misc_feature 2..63: note = LE
  misc_feature 64..1107: note = CDS
  misc_feature 1108..1368: note = RE
  misc_feature 1143..1362: note = bridgeRNA
taatggaatggtctgccccacctgctgataatcggcatactgaggtttttacgggaggtcattatgagcacacaagcgattcacattattggcattgatcttggcaagaactggtttcacttagttggcatggatgagaaaggcaagccgctgttacgtaagaaactcaatcgcactcaacttgccgaatttgcgacaactgcgtcaacatgcatcgttgtcatggagtccagtcctggttcgcaatattgggggcgcaaatttcagaacgccggccacactgttcgcgtaattccggcgcagttcgttaaaccttatctgaaatccaacaagaacgatttcaatgatgctgaagcaatcgctgaagccgccagccgaggcacaatgcgcaccgtgccgttgaagacgaccgaccagctggagatgcaagcaatgcatcgggtacgtcagcgactgattgtggaacgcactgcgctcgtgaatcagatgcgtgcgttacttctcgaacatggcattgttattcctgtagggcgtgcgttattcgcacgagcattgcctcgtattcttgaggccgttgacaatgctctgtctcccagaatgcgacaactgctctacagatcgcgacaacgctggctggcgttggatgatgagattgacattgcctctgttgaaatccatcaaatcgccaaggagtcagaattatgccggcttgtttcaacagtgccgggtgtggggcctattgtgtcaagtgcactgatcgctgccgtaggtaatggccaggcattcggtaaggcccgggatatggcagcctggctaggcttggttccacggcaatattcgactggcggcaaatccaatcttggcagtatcagcaagcgtggcaacggatatctgcgaatgctggtgattcaaggcgcgcgagcgcttatgagccatatgaagcgcgatcagtcgcgaatggagcagtggcttcatgagattgagaggcgtagccatccccacgttgcgttgattgcattggcaaacaagatcgtatggatatgctggaaagtccttactggtggcgaaaactatcgaccattcccgtatgaatctataaacgcataacgaagcaccattgcagtaccgtagtaacaccttctggtttttgcgagccgtaattgttgatgacagaaccgttgaccgacgtactttaagcctgactaaaaaagcagtcttcaatgactgcacgctttatgaggaaaggtgcgtgcggattccatcaaggccaggaaatagtcatttccaaacataggccggatacattgacgcaaaacgtttgtctgaactcaacaaaaacatgcttgcaaatccggggcagaccataca

SEQ ID NO: 489 - DNA, 1378 bp, unidentified
  source 1..1378: mol_type = unassigned DNA; note = element_03a0bc3
  misc_feature 1: note = core
  misc_feature 2..221: note = LE
  misc_feature 222..1364: note = CDS
  misc_feature 1365..1378: note = RE
tagtctatgatggtcaccagttctcgggtggtttgactcaaacaccgatcgaccgttcgctgggttggtgccgcttggctttccggtttggtctgacccaaacagcgaccgaccagacacgtgtctttccctggatctgtcgaccgcccgggaacgccttgcggtgaggctttgtctcaaagatgccgcgtgaaccaagaagggcctgaccatttggtctcatgactgtcctgtccgtgcatttttgtcaacgaagcaagtctgccactgccgggaaggatgatcctatagccagatccaaacaaaccaccccagttgttggcggggttgatacgcacaaagaccttcatgttgcagctgttgtggatgacaatgatcaagtgctgggaacgcagagctttgccacaacacggcagggctacaagctgatgctgacatggatacgctcattcggagacttgcagcggattggcattgaatgcaccggcagctatggtgccgggcttttgcgatatatgcaggtcgctggtgtggacgtcttggaggtgaccgcgccggacaaattggaccgaaggcggcgtggcaagaacgatgacttcgatgcacagagcgctgcccacgcggccttcgcagagcggcgcacggtaaccccgcgcagccgggatgggatggtagaatccctgcgtgtattaagggtttgccgcaaaacggctgttcaagcccggcgggttgcattgcagatcatccaaaccacaatcatctgcgcacctgaccgtctacgtgatcttttgcgcaatatgacccgcatgcaattgatcaggacactggcagcttggcgtccggatttgacagggtttcgggatgtcgaagaatcttacaagattgcgctcaaatcgctagcacgtcgataccttgagctgcacgatgaggtcgccgatctggacgacatgatcgaagcaatcgtcactgaccttgccccatatctgattgcatgcagcgggatcggctttaccagcgcggctcaattgttgctgaccgcaggcgacaatcctgaacggctcagatccgaagccagcttcgctgctttgtgcggcgtcagctcagttcctgcatcctcggggaaaacaacacgacaccgattgaaccggagtggcgaccgagccgcgaacagcgcactccacatcatcgcaattgggcggttacggctggattcgaagacaaaggaatacgttgcgcgacgaatagctcaaggccattcaaagctggaagctattcggtgcctgaaacgatacatcgcacgtgaagtcttcaacatcatcgcgcgacgtcacaaacagatcaatcaggctcaaatcgcggcttgacacttagaagggcg

SEQ ID NO: 490 - DNA, 1307 bp, unidentified
  source 1..1307: mol_type = unassigned DNA; note = element_03a0d69
  misc_feature 1: note = core
  misc_feature 2..67: note = LE
  misc_feature 68..1090: note = CDS
  misc_feature 1091..1307: note = RE
  misc_feature 1102..1293: note = bridgeRNA
taatgggatggactacctccttcctctgcgattaactgtacgaaatgtgctcagcaggagaatcaccatgaatatcgtatatctgggtatcgatctggctaaaaatgtttttcagctttgtgggctaaaccaagccggtaagccagtttattcaaaacgcactggtcgaaaaggattactccagacggtggcaaatattccggcctgcctgattggtgtcgaagcgtccacgggggcattttactggcagcgtgagtttgaaagactgagacataaagtaaaagttatcagtcctcagtatgtaaaaccctttgtctgcggtcaaaaaaatgacggtaatgatgcacaggccatagccgtggctctaatgcagccaacaatgcagttcgtgccgccaaaaatcctggaacagcaggatattcaggctttgcaccgggcaagacagcggattgtcaatcatcgtactgcgacagtctgtcaaatcagaggacttctgcttgaccgtggaataacaatcggggcagcagtctcaagagttcgtcgtgccgttccgctgatccttgaagatgctgaaaatggtctcagtgccagaatgcgcaggacgattgcagaactttatgatctctttaacgaccctggtcgtcgtataaacttttttgataaagaaatcgatgctgttttcaggcaatcagaagcctgccagcgcattgccaaagttaaaggcatcggtcctaaaacggcgacggctgtcgttgccgcgattggcaaaggaactgaatttaaaaatgatcgtcactttgccgcatggctgggtctggttccccgacagcactcgagtggcgacaggcaggtactgatgaatatgacgaaaaaaggcgacaggcatttgcgaacactttttattcatggtacccgcgctgtcgtcagggttgccacaaataacaatgatggttgtctgcatcagtgggttaaccagttgaaggaacggtgcggatttaataaaacggccgtggcggtcgctaacaagaacgcgagaataatctggtcgatgctgagaaatgagatcgaatatcagtcaataggaagttaataccccgcaagaaaagttgcattgtactgaaaaatggcgacaggttgcacctgcacaatcggaacctgatttttatactggcctcagaggccgtccagttgttgaggcgattgtgtgcggattacccatttgggcacaggttttcctgatgccggatagatgtaagcaacaacctaaaatcagattcagtgcctgcaaaacggaggtagtccataga

SEQ ID NO: 491 - DNA, 1540 bp, unidentified
  source 1..1540: mol_type = unassigned DNA; note = element_03a84fb
  misc_feature 1..2: note = core
  misc_feature 3..81: note = LE
  misc_feature 82..1197: note = CDS
  misc_feature 1198..1540: note = RE
  misc_feature 1258..1469: note = bridgeRNA
agatcccatgaccggtggtggatagcgacctgcgctctggcagagtggggttgctgaccaacaactctgtggaggccaatcatgcgtgttgtagccgatcaatctgcggcgcctgccgctatccgcaccgatcttggcgcgatcttcgtttctttggaactcagtaaatcgacatggttgatcacttcgctgtcgccgggcagtggggagaagatgtcgaaacatgcggtacgcggcggcgatatcacgggactgctggcatgctttgcccagcttcaggacaaggcacaggcgcgcaccggccggcactttgcgcttgtagtcattcaagaggcgggtctcgacggcttctggatccatcgaaccctggaggtcgaggggatcgaaagccatgtcgtcgacgccgcctcgattgccacgtcgcgccggcggcgtcgtgccaagaccgacaagatcgatggtgaggcgttggtgcgtgcgctgctcgcctataaacgaggcgagccgcgcgtgtgcgcgatggttagggtaccgagcgtcaaggaggaggaccatcggcgcattggccgtgaacgcaaggttctggttagtgagcggacctgccatgtcaaccggatcaaggggctgctgtttgctcagggcatcaccggctacgagccgctgcggcgtgaccggcgacatcggcttgaggaactgcagaccggcgacggccgcgcgctgcccgaacatctgaaggagcaaatccgtcgcgagctcgaccggctcgagctggtgatagcccagatcaaagaggtgcaggccgagcgcgatgctctgctggcaatcgacgtcgccgaaacgccaacagcgacattgctcgatctaaagggaatcggccccgagtgtgcggccatcctctacacggaagggctgttccggcacttcgataatcgccggcaggtcgccgcctatgccgggctcgcgccgacaccttggcagagcggatcggtccagcacgagcaaggcgtctcgaaggccggcaacccccggctgcgaacgacgatgatcgagttggcctggctgtggctgcgcaatcaaccgggttcatcgcttacccgctggttccacgaacgcgtgatgcgcaatcaggggcgcctcaaaagacaaccatcgtcgcccttgcaaggaagctgctcgtggcgctgtggaaatacgtgaccgcgggcgtcgtcatcgaaggtgccgtcatgaaggctgtctgacgagaccacacctacacactcatccctcgaggtctgatcagcctcggcggatccgggaggcgaaccgagatttccagctggctagaatgccgtatcaaagacgggtctcgccctctgggcccctgccgccgcaagcgggatattggtgcagccgtcccaagcggcgaccgtatgtgagtttgactaggctcgattgactgagccgtgtcacgcaatcgggcccagttctggattccgctgccaattggagcaacacgatgccgccctaacacacctcttgacctcagcatcgtcatgtg

SEQ ID NO: 492 - DNA, 1168 bp, unidentified
  source 1..1168: mol_type = unassigned DNA; note = element_03ad14a
  misc_feature 1..2: note = core
  misc_feature 3..224: note = LE
  misc_feature 225..1154: note = CDS
  misc_feature 1155..1168: note = RE
  misc_feature 14..229: note = bridgeRNA
cttgtatctttaatttctgatcctgtttgtgcaaaagagggtaggtgcgagatccgtcgccaaggctgcttcttggagttaaaccaaagagcgcgccgtagtacgatccgtacctgcccaacagggctaatgaaactcgaacagttactggagcgaccaggctgcggcccgggtgggcgcacagcctggccagctcgcatttacaagcaggagttatttaacctatgaaacaaagcgttgtctatatcgggatcgatgtggctaaggcgcatctggatgtggcttggcaagagcaatcacgccgttttgccaatgacaaatgtggccaagttgctttaataaaatggctcaaacaaagtgcatttcccgtgcagctcatctgcgaagcgagcggaggttacgaacaggcattagtcgaaagcttggagcacaccgacatcacggccagcgtggtccaggcgaatcgagtgcgccagtatgcgcgtgcggccgggatcttggctaagaccgataaggtcgacgcgcgtgtgcttgcgggctttggagcagcgatgcaaccaaaaccaacaccaccgctctgccctgagcaaaagcggctgcgccaatacgaagcgcagcgccggcatctgagtgcggtgttggtggcagagcaaaatcgactagctcagttatcctatgcagagctgcgggtgttaagccgcagccttatcagcaaaatcaaaaagcagatcgcgacaatcgatgcgcgtatcaacactctaattgctcaagacaagcaactctgccaaaaagcgcaaaaactcacttccatcactggcgtcggtgcgcgtacggccgcgctcgtgctggcgcaaatgcccgaactgggtcaactcaatcgtcgtcaagctgccgcgctcggtgggctagcaccgtttaatcgcgagagcggcacgttacgcggcaagcgcaccatcttcggtggacgacgtgctttgcgcagcggcctttacatggccgcaatggtggccgctcggcacaatccaatcctctgcagcttttatcaacggctccgcgctaaaggcaaacctcacaaactcgctctaactgccgtcatgcgaaaactactcctcgccctcaaccaaaacctcaaacccattacatccccagcttgaaaccaagacagtta

SEQ ID NO: 493 - DNA, 1401 bp, unidentified
  source 1..1401: mol_type = unassigned DNA; note = element_03b3860
  misc_feature 1: note = core
  misc_feature 2..85: note = LE
  misc_feature 86..1117: note = CDS
  misc_feature 1118..1401: note = RE
  misc_feature 1159..1388: note = bridgeRNA
tgatgctgtggacggctcccacctaccggcatcgcaatgtgccaaattgtggtttcggtgaaccactaggaattaggagccgtccatgagcgaaattatcacaattgggatcgatattgcgaagaatgtcttccagatccatggcgtcgatgaaaccggcggtgttgttgtgcgccggcaactgcgtcgccgccaggtgctacctttctttcacagattgccggcttgcctggtcggcatggaagcctgtgccagctcccatcactgggcacgcgagatcggccggttcggtcatgaggtaaagctgatgccgccgcgttatgtgaaaccatacgtcaagcgcaacaagaatgacgcagccgatgcggaagcgatctgcgaggccgtgacccggccgacaatgcgctttgtgccgatcaagacggaagagcaacaatcggtgctgatgctgcatagcacccgtcaactgttcgtgcgccaacgcaccacggtgatcaacgccatccgcgcccatatggccgagttcggtattgtcgccggcatcggccgcaacggcgttgaggctctactggctctgatcgtcaagggcgaggatgaacgcattcccgctcacgcgcgtgactgtctgatggccttggcgatgcagcttgagttgctcaaacgacaaatccttgaagccgatcgcagggtgctcgtctggcaccggcaaaacgaactcagcaaacggctcgaagccatccctggcgtcggtccattgatcgccagtgcgcttgtcgccagcattcccgatccaacaatcttccgatccggtcgggatatgagcgcctggatcggtttggtgccgaaacaaaactccaccggcggcaaggaacggttgggcagtatcaccaaggcgggcaacaaatatctgcgcaaattactggtggtcggcgccttgtctgtcatcaagcgcgccaaacaagtcggctatacccggcatccctggctggtcgcgcttcttggccggcgcaccaccatgattgccgccatcgcgctggccaacaagatcgcacgcatcgcctgggcgatgatggtacgcggtgaaaagttcgagccatcacggctgcagccggcgtaggaacaacgaaccacggatacgcgggaactcgttcccgctcaccaggttggaaagggcaaggatcgaataacgcacccaagccagtcggcccacggatcgggacaacccacaagtgccaatgcgtcttacgaacgcgtgcttctgaccgggaccggatctgcggagagcattatggccagcggccatgcaacagcgccgcaaaaacaggccgaacacatggcagctccgaccagctgtgcgccatcgttcacaacgtccttgacagcagggagaccgtccacaca

SEQ ID NO: 494 - DNA, 1470 bp, unidentified
  source 1..1470: mol_type = unassigned DNA; note = element_03d541d
  misc_feature 1..2: note = core
  misc_feature 3..225: note = LE
  misc_feature 226..1449: note = CDS
  misc_feature 1450..1470: note = RE
  misc_feature 7..227: note = bridgeRNA
ctaatgggggcagaccaggtcggctaggacttggttccgagcccgccggtcggtgagcactttcggcgcctgagacttcgatctctggcctcagagcgtgccccggccggttggtgtgggctgcccgtgaacaccgatggggtgtcgtgccccgagcactgatccattaggccgtgtcgggcgccttcgagggttcgcactcgttgtcgagctgaggaggagccggtgatcttcgtaggagacgactgggcggaggcgcatcacgatgtgtatctctgcgacgaggccgggaaccggctcggcaaggcccgactacctgagggcatcgagggcatcggccggttcaacgagctcatcgccggccacgccggcgagcccgccgacgtggtggtcgggatcgagaccgaccggggcctgtgggttcaggcgctggtcgaggccggctatcgggtgtacgcgatcaaccctcgggcggcgtcgcgctaccgggaccgccacaccctgtccggggcgaagtcggatccgggcgacgccaagttgttggcggaactggtccgcaccgaccgccacaaccatcggcccgtggccggtgacagcgacctgggcgaagggatcaaggtcctggcccgggcccatcagaacctgatctgggaccggacccgggccacgaaccggctccgctgcgccctacgcgagtacttcccggcggcgctcgacacgttcgccgagttggccgaccgcgacaccctgtcggtgctcgcggtggcccccgatcccgtcaccgcccgaaagctcacccccggccgggtccggacgctgctgcgcaacgccggacgccaacgcaacatcgaggtcagggcacacgccatcgtcgagggtctccgggccgagacgttgaccgcgccgccggcggtcgtgtccgcgttcgcagcgacgacccgcgcccaggtcgcgctcatcgccgagctcaacacccagatcgccgggctcgagaccgagctggccgcccattttgaacagcacccggacgccgacatctacctctcccagccaggaatcggtgtcatcctcggcgcccgggtgctcggcgagttcggggatgacccgaaccgctatgccgacgccaagtctcgcaagaactacgccgggacgtcacccatcacccgcgcctcgggcacccggtcggtcgccctggcccgcttcgtgcgcaatgcacgcctcgccgacgccatcgatcaatgggcgttctgcgctctcacgaacagctccggagcacgagcgttctacgaccaccgtcgagaccagggcgactcgcaccacaaggccctccgcgctctcggcaaccgcctcgtcggcatcctccacggttgcctacgcacccacaccacctacgacgagaccatcgcctggagccaccgccaagaccggcccgaccacatcgccgcttgacacccaccgatcctggggtgt

SEQ ID NO: 495 - DNA, 1385 bp, unidentified
  source 1..1385: mol_type = unassigned DNA; note = element_03d8ed4
  misc_feature 1..2: note = core
  misc_feature 3..88: note = LE
  misc_feature 89..1114: note = CDS
  misc_feature 1115..1385: note = RE
  misc_feature 1088..1372: note = bridgeRNA
agatggagtggttgccgccctccccagacggcatcgcaatgtgccaatatggtggtgttgaacgccactaagcgaggaggacggcgagatgaaggatacaatgattggggtggatctggcgaagcgtgttttccagctccatggggccacaatgagcggggaggtaaagttccgcaagaagctgtcacgggagcaattccgggccttcatggccgcgcagccagctgctttggtcgtttttgaggcctgcgggagcgcaagctactgggcccgggaaatggtggcgctcggtcacgaagcccggctgatcgcgccgcaatacgtgcgtcccttcgtcaagcgccagaaaaatgatgcggctgacgcagaggcgatcgtgatcgcggcgcgccagcccgacatgcggttcgtggcgccgaagacagcggagcagcaggcaaaggcggtgttgttccggggacgtgagcggctcgtccatcagcgcacggagctggtgaacgcgctgcgggccgtcctctacgaatatgggcacgtgttccccgtcgggttctgccacgtgaagcgcatcgccgctgtggtggaagatcccgactacgacctgcccgcccttgtcatctcggagtgccaagacctgctggcgcagattgccgagaaaacggagaggatcgaggccaaaaccaaggccctgaaggcgctcgccgccgagaccgataccgcacggcgtcttcagacgatgccgggagttggcccactgactgctctcgcggtcgaagccttcgcgcccgacatgacgcagttcaaaaccgggcgcgactttgcggcttggttgggactggtgcccaagcagcattcttctggaggcaaggagcgcttggggcgcatgaccaaggccggtcaggctgacatccgacggctcctgatcattggagcaatgtcgcgaatgaactggcttggacagcgcaccattgtggagggcagctggctgtctcgcatgttgacgcgcaagcccaaaatgctggtcgcgatcgcgctcgccaacaagatggcccgccagatttgggcgatgctgacaaagaacgaggactacaaggatccggcgctggtgacagcatgaccatcgtgtcgtgaacaaccagcaacggtaccaaggggggtgagaagacgacgacctgaatggacaaacgatcgaatagatccggattgggaaaaccagacaagcgctccgtgcagaaagcacgcccagtagatttggacctgatccgctgatcaccatcccggcccgcggtttctggaagtgccgcatctcgaggcctgacagaagaccgcactcgatcacatgtcaaagagggtcaaaaacttcttgcactacgggcggcaaccacaga

SEQ ID NO: 496 - DNA, 1323 bp, unidentified
  source 1..1323: mol_type = unassigned DNA; note = element_03da94e
  misc_feature 1: note = core
  misc_feature 2..73: note = LE
  misc_feature 74..1099: note = CDS
  misc_feature 1100..1323: note = RE
  misc_feature 1111..1319: note = bridgeRNA
taatgaaatggccagcccgatcccagcgactgctctaccataggaagtgcggtcgaacatggaggagggcatcatgaacgaggtcacgctgatcggcattgatctgggcaagcatgtttttcatctgcatgcgcaggatatgaagggtcgcgaggttttccgcaaaaagctctcgcgcatgcaactgattccgttcttcagcaacctgaaggcggttaccgtggtcatggaggcatgtgccggagcccactggctcgcacgcaagctcgatacggtgggtcatcaggcaaggttgatttcaccccagtacgtgcggcgtttcgtgaagagcaacaagaacgactacatcgacgccgaagcgatctgcgaagctgcatcccggcccgccatgcgtttcgtcgagcctcgaacggaggcgcagcagctacttgcagcattgcatcgggtgcgtgagggtctggtgaccgagcgtactgccaccatcaaccggattcacgctgtactgctcgaattcggcatcgtcgttccgttagcgagagccacgctacgccgcttacctgatgtacttgcagtccaggactcgccgccgcgactgatccagcttatccaccggctccatgctcattatcgttacctggaccagcagattgccgatgtcgagcgggatctgacctcgcagttgcacgaagacgagaacgcggcccggttactgtcgattcccggtatagggaccatcacggcaagccttctcgcgtcggaagtgggtaacgtcacacagtttgccggtggccggaattttgcggcctcgatcgggctcgtgccacggcagcacagcaccggcgggcgaagcgtcctgtgtggaatcagcaagcgtggcgacaagcacctgcgccatctgctcgtgcaaggtgcgcgagccgttatccagcgcgtagagaagcgtactgaccggctcggggaatggatccgctcaatgttgacacgacggcactcaaacgtggtcgcctgtgccgttgccaacaaactcgctcgcatcgcctggcgggtgctcaccagacacaccacgtacgatgccgcgcgcctgaagctcgcggactgatttgtcgtttcacccaacaaggttttgcgaccgctggcaatttgatgatccaacggcacagcgaccggacgaagaacctgacaagttgtacagctcacagcagctgccgacattatgaggatcgaccggtgcgattttcatcgcggaacattgattccggatagatttgcgcaagccacaaagacgtcagaaccagaggttgcaaaattcgggctggccataga

SEQ ID NO: 497 - DNA, 1163 bp, unidentified
  source 1..1163: mol_type = unassigned DNA; note = element_03dede4
  misc_feature 1..3: note = core
  misc_feature 4..210: note = LE
  misc_feature 211..1152: note = CDS
  misc_feature 1153..1163: note = RE
  misc_feature 37..216: note = bridgeRNA
acttgtcttatgactttgtggtccgttcgggtcaggatgcgatgtccggtccggggtggccaccccggaccggacggaaggggacggatcgcaaaaccgctggtcgtgaagggaccgggttagagtaggatcacccctttctttttcatcaggcccgaacggataccggggctttaaggcccggatgacaagcatgggacagcgaaaaagatgagcaacctcctaccacaaaccatcggcatcgacatctccaaagcgacgttggactgccatgtccatcccgccgggatcgagcgccagttcgccaataccaccaagggtcacaaggcgctgatcgcatgggccgggcaatgggaggtcgagcggatcgcctatgaggctaccggcacctaccaccgcgcggtggaggtcgcgctcggccatctgccctgcgtcaagctcaacccggaacgggcaaggcgcttcgcccaggcgacgggcacgctcgccaagaccgatcgcatcgacgccaggctgctcgcccggatggcggccacgctgcaaccacccgtcaggcccgcccgaagcccgcagcagaaccagttggccgaactcgtcaacgcgcgcgacggcctggtgcgcgatcgtaccgccctcaagaaccgcgaaaagaacctcaacgtcacgctgctcaagcgccagtgcagtcaacggctcgaacagatcgcccgccacatcgaagcgctcgatgccgaaatcgcaaggctcatcgccgctgacgaaaagctcgcccggcgccacgacattctcaccagcatcgccggtctgggtacactcaccgccaaccagatcatcgccaccatgcccgaactcggatcgctcgataacaagcaggccgcctcgctcgccggccttgcgcccgtcgcgcgacagtccggccagtggaaaggcaaaagcttcatccgcggcggcagggccaatgtccgtcaggccctctacatgcctgccctggtcgccgcgcgcttcaatccagacctcaaggccaaataccagcagctcatcgctgccggaaaacccgccaaaatcgccatcacagccctcatgcgaaaactcatcgttaccgcaaatgctctcctcagagcagaccgaatttggctccaatcccccgcttgaccatcacggat

SEQ ID NO: 498 - DNA, 1365 bp, unidentified
  source 1..1365: mol_type = unassigned DNA; note = element_03e81bf
  misc_feature 1..2: note = core
  misc_feature 3..76: note = LE
  misc_feature 77..1102: note = CDS
  misc_feature 1103..1365: note = RE
  misc_feature 1078..1353: note = bridgeRNA
cgatggggtggacgccccctgacggcatcgaagtgccagagtggaggtgttgaagcaccactcgaaggaggcgtccatgggcgaggttacgacgatcgggctcgatctggcgaagagcattttccaagcgcacggcgctgatgcagctggccaggtggtgttccgcaggaagcttaggcgcgatcaggtgttgagcttcttcgccggccagccgcgctgcctagtcgcgatggaggcctgcgccggcgcgcaccattgggcgcgtgagcttgctgcgcttggccacgaggtccgtttgatcccgccgtcctacgtgaagccgttcgtgaagcgccagaagaacgacatggcggacgcggaggcgatctcagaggcggcgctgcgtccgacgatgcgcttcgttgcgccgaagagcgccgaggcccagggcgcggccgtgatcttccgcacgcgggatctgctggtgcgccagcgcacccagctcagcaacgccctgcgcgggcatctggcggagttcggcttcgtcgtgccgcagggtgttggccacattagccggctgatcgggatggcggtcgatccgacgaccgagctgcccgatcaggcccgcccgatcctcgccatcatcgccgagagcatcgaggcgctgcaggcgaagatcgccctgctcgaccgcgagatcaaagctcgcgcgaaggcagatcctgtcgccaggcggctcatgaccattcccggcgtggggccggtcgtcgccacagcgttggtggcgctggcgccgccggcgaacaccttccggcgtgggcgagacttcgccgcctgggtcggtctcacgccccggcagaactccagcggcggcaaagaacggcttgggcggatctcgaagatgggcgagcgcaacctgcgccggctgatcatcctcggcgccagttccgcggcgaaagtcgccgcgcgagacccatcacaggcgagtccgtggctggccggcatgctgtcgcgcaagccgcgcatgctggtcaccgtggcgctcgctaacaagatcgcgaggatcgtctgggcgctgatggcgcatggcgggtcctacagagctccggccgcagcagcttgatcgcagcgacggtctgaggcgtcagaggaggcaggaaggtcagacgagacgtatggcgcaacggtccacgagacggggcccggaaaaccaggaatgtctgccgcgcctcgagcgcgcaattgcggcatggaccgggtccgcgaactccatacaggccagcggccgcgcgaaggccgcaccaatcaggccggacacacggaagcacctaaacctgcgcgccctgccctcagaaaccctcttgcatccgaaggggcgtccacaca

SEQ ID NO: 499 - DNA, 1138 bp, unidentified
  source 1..1138: mol_type = unassigned DNA; note = element_03ed8fa
  misc_feature 1..2: note = core
  misc_feature 3..200: note = LE
  misc_feature 201..1124: note = CDS
  misc_feature 1125..1138: note = RE
  misc_feature 6..198: note = bridgeRNA
cttgtatcttggctttgcaggttgtgtgaggcaaaagagaagcggctgcgagatcatcatgtcccttggtcagaacttttagttctgaccggtcggagtcagatccgcagccgccatgtgttcgaactcgaacagttactagagcggtgtgagctctccgcagccacaccagctcgcatcaacaaggaggagtctctcacgtgaaagaagaagttgtctactgtggcattgatgtggccaaagcgcagctggaggtaaggctcggccagcaaggggagtcgtttgctaacaccccaggagggcagcgacgattggtggcttggttgcacaaaaggagggctcgggtgcatgtgatctgtgaggccagcggtggttacgagcaggctctggtgcaggctttagaccaagccggcatcgcgctaagtatcatccagcccaatcgagtgcgacagtttgcccgggccagcggggtcttagccaagaccgaccgcattgatgccgaggtgctgcggcgctacggctatgcgctcaggccagccgccacggtgccgctagcaggtgacgccttgcgcctgcgccaatgggatcggcaacgcacccacttaatgcggctgatagtggcggaagaaaaccgcttggagcatctcgcttgcccgcaactgcgccgcttcagtcgcagcttaatcaaacaaatgcaaaagcagatcacccgaatcgaccagtgcctgacccagtgggtggcacgagatcaggtgcttgcgcaaaaggccaggctcctgacttcctttagtggcgtcggctcgcgcaccgctatcatgctgctcgcgcagctgcctgaactaggccgactcaaccgccgccaggttgcggccctcgccggcctggccccatttaaccgcgacagtggaaccctgcgtggacgtcgctcggtttacggtggccgccgctccttacgcagcggcctctacatggctgccctgaccgcggctcaccgcaatcacgtgctcgcacccttttaccagcgcctcatcaccgcaggcaaaccacccaaggtcgccctcaccgccgtcatgcgaaaactgctcatcgccctcaatagcgccctctgcctacaacccacttgaactccacacagtta

SEQ ID NO: 500 - DNA, 1372 bp, unidentified
  source 1..1372: mol_type = unassigned DNA; note = element_03f736a
  misc_feature 1..2: note = core
  misc_feature 3..84: note = LE
  misc_feature 85..1113: note = CDS
  misc_feature 1114..1372: note = RE
  misc_feature 1087..1359: note = bridgeRNA
tgatggagtggatgcccctcccgacggcatcgagatgtgccatgctggtgctgttctaacagaccagaaactgaggaggcgacaatggacaagattacaatcatcggagtggatttggcaaagcgcagttttcaggtgcatggggcatcggctgacggcagtgttctgttccgcaaaaaactgtctcgggcgcaagttgtgccatttttttcacaacagccagtttgcatcgttgctatggaggcttgcgcaaccgcgcatgattggggacgcgagattggggcgctcggccatgaggtgaagttaataccgcccatctatgtgaagcctttcgtcaaacgacataagaacgatgctgctgatgccgaagcgattgccgaggctgcctcacgtccgaccatgcgaacagtcgccgtgaaaacccatgagcagcaaagtcgggcggttttgttccggacacgtgacctgctcctgagacaacgcacacaactgatcaacgccttgcgggctcatctcgccgagtttggtaaggtcgcaccgaaggctgccactaacatcaaacgtctgaaggaagttctggaagatcctgagaatggtttgccacaaatagtgatggatattgggtcgatctacattgaccaaatcgccactctaacaaaccaaattttcaggcttgagaaacaggtgcgcatcgaagcagcaaaagacgatgctgctcgccgcctccaaaccatgccaggcattggcccgattactgctatggctgtctctgcttttgccccgcccatggaaatctttcgacggggtcgagattttgcggcttgggtcggactggtgccgaaacaacactcgacgggaggaaagcagaagctgggccgaacgtcgaagatcgggcagagagatatccgtaggctcctcgttatcggtgccatgtccgtcgtgaaggtggcggttcataagggtgctcctgaaggatcttggctccaaaggatgctcgagaggaagcctcgtatggttgtcgctgttgcgctcgcaaataagatggcgcgcaggttatgggccatgttggtgaagaacgaagattacagagatccgaccatcgccgccgcgtaagcgttgcggtgggcggtacgctgggaatgtgaggaggtctttgagtgtaagggcaaatgatcggaaagatcgggttcagtaaaaccaggaactcacaccgggataatcaacccgccattgtgatgtggaactgaaccgcgtatctccataccggccagcggcatctgaaacgccgcatcaacaggcctgacagatgaccgcatccgttcacattctcaaacgctcaaaaacaacttgcattaaagggggcatccacaga

SEQ ID NO: 501 - DNA, 1938 bp, unidentified
  source 1..1938: mol_type = unassigned DNA; note = element_03f89f2
  misc_feature 1..2: note = core
  misc_feature 3..132: note = LE
  misc_feature 133..1419: note = CDS
  misc_feature 1420..1938: note = RE
  misc_feature 1602..1875: note = bridgeRNA
agcttcctgtataattcaaatatagggaattccaagaaagaaggttgagaaaaagaaatacctcagagtaaaataagattactgactttggacggttagtaaaaaatcttattaaacagagaggtatcttaaatgaattataacatacaaaacgcaaaaattgcatccataactgaaaagactttaattgttggtattgatgtcggaagtgaaacgcattatgcaagagcctttgactggagaaactatgagtttacgaagaagcctctggccttcagtaacacagaggctggtttcctgactttcaaagcgtgggtcgaagatttacaggaaaaatacggtaaaaccgctgtgattgccggaatggagccgacaggacactattggtttgcgcttgggaagttcctgcaggacaacggaatgaagcctgtgcatgtaaatcctcaccatgtcaaaaaatccaaggaactggatgacaacaatccgaataaaaatgaccgcaaggatccgaagacgatagcagcactggttaatgagggacgtttttcctatccgtatataccgactggaatttatgcagagatccgaagtttatccaatctgcgtttccaaacgcaggaggaagttacgcggatcaagaaccgcattgccagatggttttccatctacttccctgaatataaagacgtttatggggatgtaaaggcagtcagcggacggatggtgctgaaaaaagcccccttgccggaggatatcaagaaactgggtgtggaaggtgtgaataaaatctggagagacgcaaagcagagaggcgctgggatgaagagggcaaagaccctggtatcagctgcagagcacagcgtaggaagtaaggaagcaccggaagcagcaagaatagaactgaagcacttattgggggatatggatgtttacacagcgaggctggaagaactggtagagaagcttgaaaacaagctgaaagagatcccatatatagataagctgctggagatcaaggggatcgggatgataaccgtgagtggatttattgcagaggtgggggacattggacgttttgataacccaaagcagctgcagaagcttgcaggatatgcgattgttgcaaatgattccggtaagcacaacggagaaagccggatcagttaccgtggaagaaagagattgcgctatgtcttgtatgaagcagcgatctctctggtaggaaagaatacggagttccgtgcaatccatgagtattatcggacaaggaaagagaatccactgaaaaagatgcagtccgtagtagctgtggcatgtaaggtgatcagggtgttttatacaatcctgacaaagggagttgactatgatgccggaaagctgcttggtgatatcaggcatcgaaaagtgcaggcagcataaggaattcaaatatactcaatgaaaaagaaccctgtcatagttgggttgagcgttcaaggatgattgagggctgaatccagctatgacagaaaagctggagtatcaggaaagaaccgggaaaacgtccgccgcaaggtgccggaacaggaatgataccaacaggtcagtaagactaaaaaaagaatgagccagtagtcggcaggaatattttccatagggcaggaccctggttaggagctaagctgacaccctggatatgggcaggcagaacgaaggaagttaggacgcacagcgagaggtgagcagatcctggtagacacgggaggtaagttgccatagaaggagggggatacacaaggccatgtaaagcggaaacgagagacgttttacttcgtataccccaaaccagctattttcgtaccagatacacagaaatacccatcttcgtggctcattcatctgagatatgtaactaaaaattccttgaaaaataaggaaaaaacacttgactatataggg

SEQ ID NO: 502 - DNA, 1358 bp, unidentified
  source 1..1358: mol_type = unassigned DNA; note = element_03fcd23
  misc_feature 1: note = core
  misc_feature 2..69: note = LE
  misc_feature 70..1119: note = CDS
  misc_feature 1120..1358: note = RE
  misc_feature 1141..1352: note = bridgeRNA
taatgggatggtccgccccgcgccccggcgtaagctcttatggcattgccaagcaaaaggagagaagggatgcgaaccaaaccattatccgaagcccatgcctatggaatcgacattggcaaaagggtgttccacgtcgtcgcggtcgatcgtgatggtgccgtgatccagcgtgccaagttcgggcgcgaaacattgcatttgtttttcgatatggctccgaaagccctgatcggcatggaggcatgtccggggtcacaatggctggcgcgtaagctgatcgagatgggccatgatgctcggatcattcccgcccggttcgtgaagccgtatgtgaagtcgaataagtcagacaccatcgacgcagctgcgattgccgaggcggtgacacgaccgaccatgcgatttgttcaggtgcgcacgccggaacaggtcgatttgcaggcgcttcaccgcattcgcgaccggcttgtcgcacaacgaaccggattgatgaaccaagcgcgtgctttctgcatagaatatggactggtgatgcgggtcggggccggtggctttcatgccgatatcaggcaacaccttgccaatcctgagaatggattgacccaaaacatgcgggcgctgctgaacgacctactggatgacctagtgtatatcgagagccgggtcaaaacattaagtgccaggatcgaagcgatcgccaacgaagacgagacgatccgcaggctgctgaccattcccgggataggcgccctgggggcgactgcactggtggccgctgcgggagatggccgtcaattccgcaaggcgcgagacatggctgcatggctcgggcttgtcccggcggagcattcgaccgggggaaagcagacgcttcttgggatcagcaagcgcggaaacggatatgtgcgccgtctgatcatccacggtgcgcgatcctgcttcctgcatctgaaccgcgaaagccatgccctgggccgctggctgaacgcgttggaagcccgcactcatcgcaacaaggccgtcgtcgccttggccaacaaactgacgaggattgtctgggcgatccttacaaagccgggaaccgtctatatgcggtcaaaaggggcagcagcataagctgaaaccttaccgcacaacccattgcaggggacatgatgaccaaacggttgatcgaccatgggtaagccacgcgcaaaaaaacgggacatgatcccgtaacgctaatctggaacccaaggtgcggatctcatcaaggccttgtcgccaaaagcggttgactgatcagaggccggatacatttacgcaggccgacgcgtcatccacgagaaccttgcaatagcgcggcggaccataca

SEQ ID NO: 503 - DNA, 1422 bp, unidentified
  source 1..1422: mol_type = unassigned DNA; note = element_040e383
  misc_feature 1..5: note = core
  misc_feature 6..204: note = LE
  misc_feature 205..1407: note = CDS
  misc_feature 1408..1422: note = RE
  misc_feature 1..188: note = bridgeRNA
tccctaagaatggttggcggtccgggaggaccgggtgtggctgatggcggtctgtcgttgatggctcggaaggactggccgcccggttctccgggacgctccgaccactgattgagaactgcggtcatcgctggttagggacctgtcggcggggtgttcttcggaccatgaagtgctggtcacgagggacatggagcgacggctttgagtacgtctggcaggcggatatgggtcggcgttgatgccggcaaggggcaccactgggccgtggccctggacgcggacggcgaaacgctgttctcgacgaaggtcatcaacgacgagacgcagatcctctctctcatcgaaacggcccgtgagaaggcggacgaggtgcggtgggcggcggacatctccggacgggcctccaccctgctcgtggccctgctggtcgcgcacggccagcaggtggtctacgtgcccggccggaccgtcaaccggatgaccggtgcctacaagggcgagggaaagaccgatgccaaggacgcccgggtcatcgcggaccaggcacgcgtgcgccgggacttcgctccgctggacacaccccccgagctggtctccactttgcgggtgctgacgaactaccgggccgacctgatcgccgaccgggtcaggctgatcaaccggctccgtgacctgctggtcggcatctgccccgctctggagcgggccttcgactactccgcggccaagggtccggtggtcatgctgaccgagtaccagaccccggccgccctgcgaaggatcggcgtgaagcggctgacgacctggctggaacgccgcaaggtccgcggcgccgacgctgtcgcggccaaggccgtcgaggccgcccgttcccagcagatcgtgttgcccggcgagaagcgggcggcgaagctggtctgcgatctcgctcaccagctcctggccctggacgagcggatcaaggacaacgaccgggagatccgcgagaccttccgcaccgatgagcgggccgagatcatcgagtccatgcccggcatgggcccgatcctcggtgccgagttcgtcgccatcgtcggcgacttgtccggctaccgtgacgccggccgccttgcctcgcatgccggcctggctccggtcgcccgggactccggccgccgcaccaacaactaccaccggcccaagcgctacaaccggcgcctgcggcacatcttctacatggccgcgcagaccgcgatgatgcggcccggcccctcccgggactactacctcaagaagcgcggcgaagggctgctgcacacccaggccctgctctcgctcgcccgacgccggatcgacgtgctctgggcgatgctgcgtgacggaaggctcttcacctccgccccaccggtcacgcagacggcttgacacgatcattgagat

SEQ ID NO: 504 - DNA, 1585 bp, unidentified
  source 1..1585: mol_type = unassigned DNA; note = element_040eb4f
  misc_feature 1..2: note = core
  misc_feature 3..462: note = LE
  misc_feature 463..1299: note = CDS
  misc_feature 1300..1585: note = RE
  misc_feature 14..288: note = bridgeRNA
ctactacaatagaattatggataaggtacatgacaaccaaccatgtccatatccttcttattgctcaagctgttagaatgaagggaacaatggtatgactgcttcccacttggacttcgcgtccgtccggtagaatgtcagcctgccctcattcgcagcattcgttttacgcaggtagagctattacgttcgtgtcagccagtagttagaataagcaatgagtaaagccgaccttaccattggcaaaatacaaaacaaggagaatacaatgaatgcagtaggtattgacgtatcaaaaaacaaaagtacaatcgctatcctccgcccattcggagagattgttgctaaaccatttgatgtaaaacacacatcttctgacataacatatctaattagccagttgaaaagcttaaatggcgatactcgaattgttatggaacatactggccgatactatgagccatggcgcagtggttatcagacgctggtttattcgtaagtgccattaatcctaaactaataaaagactttggtaataatacattacgtaaagtaaaaacagacaaagctgatgcaataaaaatcgcacgctacactcttgataactggtgtgaacttaaaccatacaacaacacggatgaattacgccgacaactgaaaaacatgaaccgccagtttgatttctacatgaaacagaaaacagccatgaagaataatcttattgctcttcttgatgaaacatttccaggtataaataccttctttgacagccctgcaagaaatgatggaagccaaaaatgggtggattttgtcactatcttctggcacgttgactgtgtacgtagacattctatttcttcgttctctgagcggtatcaatcttggtgtaaaaagaaaaataataattttcagtcccaaaagcctaacgatatatatgaatttagtcacgatcttatcgcaacactgtcaaaagataatgtaacgaaacttttgattcagcaagcagttgatcagctaaatatagcctcaaaaaatgtggaatcacttcgtctccttatgaaccagactgccgctaaacttccagaatacccaatagtacttgatatggctggggtaggaactacactcggcccgcaactgatagctgaaatcggtgatgtatcccgtttttctcataaaggtgctctaactgcctatgccgggttgatccaggtgccaatcaatctggtgactatgagcaacaaagtgttcgaacatcaaagcgaggagctccacaactcagaaaaaccttatttctaattatggactcacttatgaaactggcacctccagatgatccggtatacggatttatgatgaaaaaacgtgctcaaggcaaagattattacgtttatatgaccgctggtgcaaacaaatttctccgtatttattacggacgagtcaatgaatacctctcatcattgacttcttaatagtagtttttcatctttcccttttcagccggcaataattggcggctttattgtgataccaattttttaatataacttattttaaaaataactattgactttttctttgcagg

SEQ ID NO: 505 - DNA, 1818 bp, unidentified
  source 1..1818: mol_type = unassigned DNA; note = element_0417412
  misc_feature 1..3: note = core
  misc_feature 4..239: note = LE
  misc_feature 240..1454: note = CDS
  misc_feature 1455..1818: note = RE
tcttatacgttaagatatatccagccctcggtgtgagggtggcagcaagcgcacttgctgcgaaccaatcgcccggagaagccttctcctttcactcggctcgaccgactgcgacagatcgtgctctccgggcgatgctcctgggtaaaaccgatcattagagggttgtttcgcttcgagcgccacggtataagaactcgtgccacccaggagtgctcacctaaggaagggacactgctatgtggtatgctggtatcgactgggccgacgaccatcatgacgcggtcgtgcttgatgacaacgcccggcagattacgaccctgcgggtcgctcacacgccggctgggctggctcagctcatcaccgccttggaacaaatctgtgggaaggcggccaaagagcaactggcctgcatcgtggaaaccaatcgcgggttgctgattagcgccctgctcgaagccggcttcgcggtctatccggtcaaccccaagacagtggatcggcgccgcaatgccgccggggtcaaaaccgatcagatcgatgcctatctgctggccaaaactggccgcagcgacctggccgatctgcggcgcttgaggcccgatagcccactggtccaagaactcaaggccttgacgcgcgaccaggatggcctgatccagagtcagaccaggctgctcaatcaactgaccgcctgcctcaaggcctattatccggttgccttgcagctgtttggcaagctgcatcagccctcgacgatcgccttcttgcacgcctatcctaccccgcatcaagtcatggccgcttcggtagacgcgatcgcggccgtgctcaagcaagccggacacacgcgcgcagaggcggccgctcgcacgatcttccagacgctccagcaagagcagctcaccgccgatgcgatcactactcgcaccaaagcgcggctgatgctggcgctgctggcgcaattggagccggtcatgcagcagctcgccgcctacgatgcggagatcgaacacctttttttgctgagtgccgacagcgcgatctttgcgagcctgccacgagccggcaaacggctggccccgcggctgttggctgaaatcggcgatgatcgcagccggtatgctgatgcgagcggcctgcaagccctggccggcacggcgccagtctgctttgaaagtggcaagtatgccaaagcccatcggcgctacgcctgcctgaaaccattgcgcaatgccatgcagcactttgcgtggcaatcgagcttgcaggagggatgggcgctggtctattaccagcgcaagcgctcggaaggcaaaagccacacggtggcgatccgcgcgctggcgaatgtctggttgcggattatctacgcgatgtggcgcgaccgcacgccctacgtgagcgcgacctttgaggcggcccagcagcagaagctgcgcaaggccgcctaagcacacgcttgctgcgcatggcggtctgacagcgccgcccaagcggtccccatccgcaccagcggcgaccaggaggcgtcggctggcatggagtgctgcctgacgttcgccgcgacccgcgaccgcgtcccctcccggtgcgggatggcagcgccgcccacgccgagtcaaggccgcgcgggggccagcttgaacaggtgcgcgcagcgcttccttctcgcggcccagcgcgcgcttgtcttggccttgaccggtgtggcagaatcggcagacccgcaccggaggcgcgctttcgtaccagcgttgattgtgcgtgcgatcactggtcatgattttgtacactttgccctattgacatagaggg

SEQ ID NO: 506 - DNA, 1410 bp, unidentified
  source 1..1410: mol_type = unassigned DNA; note = element_041d2e9
  misc_feature 1: note = core
  misc_feature 2..90: note = LE
  misc_feature 91..1122: note = CDS
  misc_feature 1123..1410: note = RE
  misc_feature 1173..1402: note = bridgeRNA
caatgggatggactcctcttccccctaagcggcatcaaagtgccagactggatgtgtttaacacccgtgagcgaagagaaggagtccaccatgaagcttatgcgcgttggcgttgatttggcaaagaacgtaatccaggttcacggcgtggaccgcaacgaggagcctgtctggcgtcggcggctctcgcggaagaagtggctgaaggtgttgctcgagacggcggagccggcctgcgagatcggaatggaagcctgcagcggcgcccatcattgggcccgtcagctgcaggcgcagggcttcacggtcaagctgatcgccccgcagttcgtcaagccgtatgtgaagagcaacaagaacgacgccaacgacgcggaggcggtgtgcgaggcgatgagccgaccgagcatgcgtttcgtggctgtgaaaacggtcgagcagcaggacatccaagcggtccatcggattcgctcggagttggttggtcagcgcaccgccaaggccaaccagatccgtggcctggtcggcgagtacgggttgattgcagcgcaggagcttcgccaactgcgccgggccataccggactggctcgaagatcccgacaatggcctgagtgaacgcttccggcggctgttgcacggactttgggacgatgtgaagaggctcgatgagcgggtggccgaactcggccaagaaattgccacgatcgccgaggaggctcccgcggcccaacgcctgcagcagctgcgcggcgtcgggccgatcaccgcgaccgccttggttgccgccgtgggtgacggggcccagttcgccaacggccgccagatgtccgccgctttggggctgacacccagacaacatagctccggcggcaaagatcggctcctggggatcagcaagcgcggagacagctatctgcgcaccttgctgattcacggggcccgggcggtgatccgcaccgccaagcacaaagaggatcggttgagccagtgggccatggccttggctgaacgtggccaccctaacgtggccgccgcggccctggcgaacaagactgcgcgcattgcctgggccatgttgcgaaacggcaccgattaccaaccggatcgggtgacctgctgaggcacccatctccaactacagtcgactgaccgagtcttacagaggagcccatcacccacgattgccgagcaaaccgaacgatggcgaacaggtcgaaccggcgccggcagaacccgtgcgagagcaggtgcgaaaagcacgataaaccgatcgggagctggcgcgcgaatagcccatcatggcccggtatcggacgcccgatacacaacgcagaggccggatacacgtgagcagtcgaacctacccgccaaagaacggagtgcttgcaactgaggaggagtccataca

SEQ ID NO: 507 - DNA, 1373 bp, unidentified
  source 1..1373: mol_type = unassigned DNA; note = element_0422044
  misc_feature 1..2: note = core
  misc_feature 3..89: note = LE
  misc_feature 90..1121: note = CDS
  misc_feature 1122..1373: note = RE
  misc_feature 1117..1361: note = bridgeRNA
tgatggagtggacgctccctgctcaccggcatcaaagtgccaaagggtggtcgtcgtgaagatcgccacaaggagagggagcgtccgccatgcagattaccacagtcggcctggatctggccaaacacatcttccaggtgcacgccgttgatggctctggccaaatcgtggctcgcaagaggctgcgccgcacggaggtgctgcccttcttcgcatccgtgccgccgtgcctgatcggcatggaagcatgcgcgacctctcaccactgggcccgcgagctgaccgagctgggccatacggtcaagctgatgccgccagcttacgtcaaagcctatgtcaaacgcggcaagaccgacgcggctgatgctgaggcgatttgcgaggcggtcacacgcccgagcatgcgcttcgtgccggtcaagtcgggtgagcagcaaagcgtcttgatgctccaccgagcgcgggctctgctgatccgccagcgcactatgctggtcaatgccctgcgcgggcacctggccgagttcggcatcatcgtcgctcaagggatcagccgcatccgcgagttgatcgcaatcctcacagacgagagcgccgatgccgtgctgcctcctctggcccggcgggctctgtcgcctcttgtcgaccaactgctcgacctacagccgcggatccgcgcgctcgaagctgaactcctggcctggcaccggcaaagccaagagagccgcaggctcgagacgatcccgggagtgggcttcatcaccgccacggccatcgcggcgactgtgccggatccatccctcttccgctccggccgagagtttgccgcttggctgggactgaccccacggccgaactcctccggaggcaaggagcggttggggcggatctcgaagatgggcgatggctacttgcgaacgctgctggtggtcggggccaccgccgttattcgctacgctcggacgaagaccgcggcggacaccgcttggatcaacagcctgctgtccaagaagccagcccgactggtctctgtggctctggccaacaagacggctcggatcgcctgggcactgctggccagaggcgaggtctaccgatctgtcgtggtggcggcctcttgagggtcgccacggattgaaggtctcagtttgggaagggtgacgatgacgtgatgcaaaccggtcgagccgggatcagaacaacccgaggtactgtcagagctgcgagttcgtcaagttgtaagggatctgatccgcggacttacatcagggccagcggccaaataagccgcactcacaggccgtagatatgactgccccgaccccttgcactcacgttcaacaaaacccttgccggcagggagcgtccagata

SEQ ID NO: 508 - DNA, 1510 bp, unidentified
  source 1..1510: mol_type = unassigned DNA; note = element_0434af8
  misc_feature 1: note = core
  misc_feature 2..277: note = LE
  misc_feature 278..1495: note = CDS
  misc_feature 1496..1510: note = RE
cactgataatgggaatcgcgctatcgacgagggttatcggcgaaaatgcgcatgagccgacgcgatggcccattaaagaactgccgtcgattccagcgactggcctcaactcgaagagcctcgcgtcggccccgaccaaggccggccaatgacctaataggagcatgggctcgagcgcgtggacctagcaacccgcatggtacagcccccatcaatgttctagctagccagccttcggctcggattacatcgcaagcgttgatctgaagggctgcatatgagcgagttggagaaagacctcgtctttgccggcgtcgacacccacaaagacacccacaccctctgtctcctcgaccacatggggagagcaatcgggacattcaggttcgccgcggacgcgaagggctacgatgccctcgccggcaagataggcggcccggcaacgtgcgtcggcgtcggcatcgaggggaccggctcgtacggcgccggcttgacgcgaaggctccttgagcttgggtactgcgtgtatgaggtgatggtgccgggaagggcgaggcgcaagccgggccgtccgaagagcgatccggccgacgccgaggtggcggcgcggcaggttctcgccagggtcaacctgtcgaagcccaaggaccagtccggatggacggaagagctcaggcagctcatgatagcccgcgaccgcctcgtgcaggccacatcggccatgataaacgctgcgaaatccctgatagtgacggcgcccgaggatttgagaaggtcgttggagggcctttccaggaagaatctcagaagcgctctctcgacgctcgaccccgccgctggcggcatcattctggccctggggtccttgggaaaagcctgggatctccaggatcgggaggcagacgccatcgaggagaggatgaagcgggttttggaggcgaatgcccctgccctgctcaccatttacggctgcggcaccgtttccgccgccgccctggccgtggccggcgggggaaatcccgaaaggctgaaaagcgaggccgagttcgcctccctatgcggcgtcgccccgctgctggcgagctcgggcaaaacggaacgccatcgcttgaacagagggggcgacaggcgcgccaacagggcgctttaccagatcgcagtgaccaggatgtcgtatgatcagaggaccaaggattacgtcggaaagcgcaagcgcgacggaaaatccaagaaggaggccatcaggtgcctcaagcgctacatcgcccgcgaggtgttccgggcgttgcgcaacccgctcgaaatcaaagggccgtcgtggaaggatctgcgccccgcaagacaagctctgggcattaccttggtggaagcggggaaggccctcaacgtcggattccaaagggtaagctacgctgagaccggccgcctgatgaacgttcggttcctggaagaatacgatgcctggctgaaatctcaggcgaaaagagagagttgacatacataggagctt

SEQ ID NO: 509 - DNA, 1169 bp, unidentified
  source 1..1169: mol_type = unassigned DNA; note = element_0437385
  misc_feature 1..2: note = core
  misc_feature 3..203: note = LE
  misc_feature 204..1163: note = CDS
  misc_feature 1164..1169: note = RE
  misc_feature 20..215: note = bridgeRNA
cttgtaatagcgcaatcgaatattgtcggcatgttccgaaaggaatggcctgccgcagatggcgatccgcgacaggccgctggcgatcggatcgagcccaccctgagccgtctctggctgcagtgtagcgtgatcgcgtcagcaccttcatcggacccggatggttgccggaacaacttggttcgcttcacaaggcagggacgatgaagatgactgagattagcacaacgacggctggaatcgatacctccaaactcaagctcgacatcgcggttcatggtggaaccgaacgttggcaggtagccaatgcttcgcctggctggcgcacgcttgcggccaacctggccaaggcctgcgttacgcgcgtcggcatcgaagcgaccggtggttatgaacgcggcgtggtggagcatctacgggcggttggcttcatcgtcctcgtgctgcagccgatccaggttaaggcctatgcgcggatgcatctgcgtcgggccaagaacgatgcgctcgatgcggttctcatcgccgcctgtgccgccgctatcgagcagccgaggatcgcgcccgatccgcgattgatggaattggcgggatatctgaccttccttgagcagatcgaggaagacatcgcgcgcttcaagacccggctcgaacatatcgatgcgccgcggctgcgacgtctcgtcaccaacgacattgcgcggctgaaggtacggcggaccgcgcaaatgcttctcatcgaaagacagcttcgcgctcaccacgatctcgcccggcgcctcgatctcgtgctcagcattccaggcctcgccgagagaaccgtgctcgccatcgtcatccgtatgcccgaactcggacaggtcagccgcgaggaagtcgcagctctcgccggccttgccccattcgacgacgacagcggcagacacaagggccagcgccacatcgccggcgggcgcgggcggttacggcgctcgctctacgcagcagcgctaccggcagccttccgctggaacaaggcattgattgcgctttatgcccgcctcaccgcgaatggcaaagcccacaacgtcgccctcatcgcctgtgccagaaaactaattatttacgcaaacactgtcgtccagcgcggtacgccatggaccgaaagatcggtcgcgacttaatggttg

SEQ ID NO: 510 - DNA, 1207 bp, unidentified
  source 1..1207: mol_type = unassigned DNA; note = element_043c182
  misc_feature 1..2: note = core
  misc_feature 3..226: note = LE
  misc_feature 227..1192: note = CDS
  misc_feature 1193..1207: note = RE
  misc_feature 45..225: note = bridgeRNA
cttgtattatccacccgtgtttttcaggagataatgaaatctcgcaaaacatgcctgaggggcacctcaggtttgggtcactggatgccgtatcggaccttggactattgaagcccgagacgtagacccctgcagcagtgacccaccctcgatcaacgatcggacagtctcttcggcccggattccggcagcctgcattcacaaggtagatcatttgaggttttcaatgtcccatttttatctcggtatcgatgtttcaaaagccaagctggattgctcattacgcttgtccaacggtaagtttcgcgccaaagtggttcccaattcgcttgaaggctttacagctttgttgacgtggctaaacgcccaaaaagctgaatccgtgcaggtctgcatggaagcgaccggcatttattgggaagacgttgctcagcatctggcaaccaacggcttaactgtcagcgtcgtcaatccggcacaaatcaaagcttatggcgcttcacggctcacccgcagcaagaccgatacggtcgatgctaaactcattgccgatttctgcgccgaacgcaaaccatccgcttggcaaccccgttgcgaggcggaagtcacgttacgcgcactagtgctgcgcctggacgccctgcaaaccatgcgcacccaagaaagcaaccgtttgcaggtggctcgcgaagcggtgcgcgaggacattcagcagcatctgaattggctggataccgctatccaacaattgatcgacgccatcaatgatcacattgatcgccatcccgatctcaagcaacagcgcgaattactcgacagcatccccggcattggcgagcgcaccagcgctattatcctagcgttctacgccgatacctcgcgcttcgccaatagccgacaagccgcagcctttgccggactcgatcctaggcaatacgaatcgggtagtagtattaagggcaaacccagactctccaaaataggccactcgttcttgcgaaaagccatgtatatgccagccatggtcacattgtataaaaccgcctgggggaaacaattcaggaaccgattagcctgcgccggtaagcccaataaactcattatcggcgccatgatgcgaaaattgattcatgtggcgttcggcgtcttaaaatccgccaaacccttcgattcggctattcatttggcttgacttggataacagtat

SEQ ID NO: 511 - DNA, 1481 bp, unidentified
  source 1..1481: mol_type = unassigned DNA; note = element_043d337
  misc_feature 1..2: note = core
  misc_feature 3..101: note = LE
  misc_feature 102..1184: note = CDS
  misc_feature 1185..1481: note = RE
  misc_feature 1193..1454: note = bridgeRNA
agacggtatgaggaggctggggcctcgccacatgtgaacgtgggttgctgtcaggaagttggtcctggccagtagagccacagatgtggatggaggccccagtgaagattcagcgtacgagtgttgggttggatgtgcacgcccgatcggtggtcgggtgtgggttggatggggataccggggaggtattccagcggcggttgacccccgaccgtggtgagatcgcagcatggctaagggatcttccgggcccggtggcggtgacctatgaggcgggtccgaccgggttcgggttagcccgggcgttggatgccgcgggcatcgcctgtgtggtggctgcgccatcgaagttgattcgcccgacgggtgaccgagtcaaaaccgatgcccgcgacgccgcgcatctggcgcggttgttgcatctgggccagatcaccgaagtgacggttcccagcatcgagcaggaagcggcgcgcgatttggtgcgggcccgcgaggatgtccgtggggatttgatgaccgctcggcatcggctgtcgaaactgttgttgcgccaggggatcgtctatagcggtggacgagcctggatccgtgagcatcagcggtggttgcgtcggcagcggttcgacaacgcggcgctgcagctggcctacgacaccgctttcgacgcgatgctggccaccctcgagcgccgggagcgcctcgataccgcgatcgccgagatggccgctgattcgcggttcaccccggtggtgacccggctggggtgtctgcgcggggtgtccacgctgaccgcgttcgggctggccgtcgagatcggggactggtctcggctgaccgggcgcagtatcggcgcctatctggggctggtgccaagcgagtactcctcaggagcgacgcgaacccagggcgcggtgaccaagaccggcaatggtcatgcccgccgcctgctcatcgaagccgcctggcatcaccgagccccctaccggcccggcgcggtgatgcggcggcgctgggatgccgcatccccagccgcccgcgcccgcggccaggccggcaaccggcgcctgcatgaacgctggatgcgattcgatgagcgcaagaaacgctccgtggtggccaacgccgcgatcgcgcgtgagctggccggatggtgctggtcgctggccgtcctcgaggactaagcggcccacaagcgtccagatgagcaagcagatgtcggcaagcgtcttggagtgacccgcgtcgccgctatgagcaatcacgttgcaccacaaccgatcacgctcgacatctagacaagcggaccgctccgactcgaaagtcccgtcctgcggtaaccaacccgcgtatatcagactgacacgcgtcgacacgacacgctcgacacctcaacgctcatctggtcaacgaagcggcggcctcgacgacggttgcggccgccgcttcaccctgccccttgacaaaatgactcacatatc

SEQ ID NO: 512 - DNA, 1378 bp, unidentified
  source 1..1378: mol_type = unassigned DNA; note = element_0448288
  misc_feature 1..2: note = core
  misc_feature 3..86: note = LE
  misc_feature 87..1118: note = CDS
  misc_feature 1119..1378: note = RE
  misc_feature 1149..1366: note = bridgeRNA
tgatgctgtggacggctcctccacgggcacgacagtgccaaggagtgggcgccgtttgaggctcccacgattcggaggagcagcctatgcagtcaatttcgacaatcggtctggatatcgcgaagtcggtctttcaagtgcatggcgttgacgcagccggccaggtggtcgtacgccgtcagttgaggcgcgggcgcgtgctggcatttttcgaaaaactgccgccatgcctggtagggatcgaagcttgcgcgtcttcgcactattggtcgcgtgagctgcaggtgttgggacatccggtgcgattgatgcctccggcctatgtgaagccctacgtcaagcggcaaaagaacgatgccactgatgcggaggcgatttgcgaggcggccacgagaccaagcatgcggttcgtgccaaccaagacggtcgagcaacagagctgtctgatgcttcatcgcgcgcgtcatctcttcatcggccagcagactgctgtgatcaattcaattcgcgcgtatcttgccgagctcgggattgtcgcccctgtcgggcgcaggggcgtcgagcaacttctggaaatcgtcgccgatacaaccgaccggcggctccccgaggtggcccgcgtatgtcttgctgctctcggcagccagttgagggcactgaaggcccaaatcctggagttcgaccgacgcatcatcgcctggcatcgatcaagcgcgacgagcagacgtctggacgcgatccctggcgtcgggccggcgctggcgacagcgctggtcgcgagcgttgccgatgcgaaagccttccgatcgggtcgggacttctcagcctgggttgggctcgagccgaagcagaactcgagcggcggcaaggacaggcttggcagtatcagtaagcaaggcgatcgctatttgcgcagtctgttcacggcaggcgcactcgccgtgatccgctatgccaagatccatggcacgcgacatcggccctggctcactgcgttgttggcacgacgacccaccaaggttgccgccatcgcgctcgccaacagactcgccaggatggcctgggcgatgatggccaggaacgaacgctacaaggaacccgccgctctcgcggcgtgaacgagatcacaccggacatccggcgtgacgtaacggttgggaggacgaacagcacgtaatgcatcgccggtcgatccggcgatcaggacaacccacacgggccacggcatcctcgaatgcgtgcttttgaccgggacctgatccgcggagggcattatggccagcggtcatgggtaccgcgcaaacaggccgaacacatggctgctccgaccaacgctgcaagtgaagattcttcttgccaacccggagccgtccacaca

SEQ ID NO: 513 - DNA, 1509 bp, unidentified
  source 1..1509: mol_type = unassigned DNA; note = element_044923c
  misc_feature 1..2: note = core
  misc_feature 3..244: note = LE
  misc_feature 245..1489: note = CDS
  misc_feature 1490..1509: note = RE
  misc_feature 47..239: note = bridgeRNA
ctaatgagtgttaccgggtcggcttcgggcagactcggtgcctggtagccgcaggcaggtgagcacttgctgttgctggacttcgagtcctggtcccagaccgtgcccctgcctgctggccgggagagttgatcgctgatgggatgtcgtgcccgccctggtgtggcgtgagcactgttcattaggtcgctgattttctcccgcaggctgctggccgtgaccgatcgagggcgggagagacagattgaagctgtttgtcggggatgactgggccgagggcgatcacgatgttgagctgatggacgccggcgggcggcggctggcgaaagcgcggctgcctgacggggtggccgggatagcgcggctgcacgcgatgatcggcgagcagctgggccaggacgctgacgaggaggacgacgccgggcaggtcgcggtggggatcgagacggaccggggcccgtgggtggcggcgctggtcgcggccgggtacacggtgttcgcggtcaatccgctgcaggcgtcccggtaccgggcgcggcacggcgtgtccggcgcgaagagcgacgcggccgatgctcacgtcctggcggacatggtgcgcaccgactctcaccagttccggccggtcgccggggataccgcgcaggccgcggcggtcaaggtcgtgacgcggacgcacaagacgctgatctgggagcggacccggtgcacccagcggctgcggcacgcgctgcgggactacttccccgccgcgctggaggccttcgaggacctcgacgcccccgacgtcctggagctgctggcccgcgccccggacccggcgtccgcggcggctctgacgaccgcgcagatcagcgccgccctcaagcgcgccggccgccgccacgtcgcgggcaaggctgcgcagatccgggcggtcctgcgcgccccgcacccgggccagcccgaactggtcaccgcagcctatgccgtgtcagtccgcgccctgatcgcggtcctgtccgccctcgacgagcaggtcaaggccctgcaagggcaggtcgaggcctattttgggcagcacccggacgctgagatcatcctgtcccagcccggcatgggacaagtcctcggcgcccgggtgctcgcagaatccggcgacgaccccgcccggtacccctcggcgaaggcccgcaagaactacgccgggaccagccccatcacccgcgcctccggcaagaagaaagccgtgctggcccggtacgtgcacaacgaccggctcgtcgacgccctcatggcccaggccttctccgccctccgcacctcccccggcgcccgcgcctgttacgaccggcagcgggcccgcggcgccgggcacaacgccgccctccgccagctcgccaaccgactcaccggcatcctgcacggctgcctcaaagcccgcacccgctacgacgaggccaccgcctggccacagcacgcagcccacgccggaaagaccgcagcttgacatccaagctcatgggatgt

SEQ ID NO: 514 - DNA, 1155 bp, unidentified
  source 1..1155: mol_type = unassigned DNA; note = element_044fae2
  misc_feature 1..2: note = core
  misc_feature 3..207: note = LE
  misc_feature 208..1143: note = CDS
  misc_feature 1144..1155: note = RE
  misc_feature 12..213: note = bridgeRNA
cttgtcttatgaagatcccagcttttgtgcgaaacaagagccacagatcagcattctagaatgctgatctgtggtggtggttggatcgtaagacgcttggtctttgaggaccgttcgagagtaagatcaaccaccaccttcgccaaaggcctgaacggatacagagcggcgcaaagccctctaggacaagcataggatatgacgaagatgacggatgataccattggtatagacatttccaaagcaactttagacattcaccggctgagcgacgggaagattatgtcgtttagcaattgccccgcaggatttagggcacttgccaagttctgcgcacagacggctgtgatacgcgttgtttatgaagcaacaggcgcctaccacagcgggcttgaacgcgccttgggcgtgcatttgccattggtaaaagtgaaccctttgcaggcgcgccgatttgcgcaagcacaaggcatgcgcgcaaaaaccgacgccgttgatgccaaaatgttggccgtcatgggggatgcttttgtattagcaccagatgaaccggctacaaaaacacagcatgatctgaaggagttacgcactttccgttcaggattggtcaaagaccgaacgcgcatcatgagccgtttgaaaacccaaacactgtccatcacttgccgtcaaagtaaagcacgcttggttcacgttgaaaagcaaatcgctgaaattgatgctgaggttgaccgtctgataaactccaacgacacactggcgcactcgatgaaaattctccgctcaattccaggaatcggtgcggtctgtgcgtccaccattttgatagagatgcccgaaatcgggagtatggaccgaaagcaggtggctagtttgaccggagtagcgcctatgacacgtcaatctgggcaatggcgtgggaaatcattcattcagggtgggcgcaaagtagtgaggaacgccctctacatgcccgccctggtggcgatgagacacaatcccgacctcaaggccaaataccaagccatgatcaaagctggaaagccaccaaaagtcgccattacggcgctcatgcgaaagctgattgaactcgccaacgccctcatcaaagcaaatcgaaattgggtgaagaaagaggcttgatcaagacggata

SEQ ID NO: 515 - DNA, 1313 bp, unidentified
  source 1..1313: mol_type = unassigned DNA; note = element_045196a
  misc_feature 1..2: note = core
  misc_feature 3..71: note = LE
  misc_feature 72..1085: note = CDS
  misc_feature 1086..1313: note = RE
  misc_feature 1087..1307: note = bridgeRNA
ttaattagatggtccgcctcactctaaagccgctaggctttagttgtgagtatctagagaggcgaaccatcatgttaattaaagtacttggtattgatttaggcaaaacttcatttcatctaattgggcacgattatgcgggccgtgaggtatatcgcaaaaaatgtaaccgtgctcaactattaaaaatattgcttcaacttgataaaactactgttgcgatggaatcttgtgctggatctcactggctagcaagaaaatgccaacagttcggacataacaccaaactaatccctcctcaatacgttaaaccctatgtaaaaactaacaaaaatgactacattgatgcagatgctatcgctgaggcttcaactggaccttcaatgcgttttgttagtgtcaaaactgaagaatcccaaattttatctgcagtacaacgtatccgttctgggtttattaaagaacaaacagcaacgatgtgtcgcattggtgcactactacttgaatttggtatcaactttcctcgtggacacgctgccatgggaaaattatttcaatggcttgccgataaaaatcacaccttaccgccgcttctgcttcaagagttagctgttctttatgagcattatcaatatttacatcaaaagattgctgagcaagataaaaagataaaagcagttttgaaagaatcagaaatgggcgaattattacaaactatccctggtattggaccgatgattgcgagcgcatgtttatcagaagtaccatcaccaaaagattttaaaaatggacgacatttagctgcatgggtaggcttagttcctcgtcaatattcaacaggagggaaatccacactgctgggtatcagtaaacgagggaataagtcattaaggacattatttattcacggagcgcgagctttgatatcaaggccaaaaatagctgaagctatttttggggattggataacagaattattaaaacgaaaaccatttaacgttgtagttgtggcgttagctaataagttagcaaggatcgcttggtcagtaatggtaactggattgccatttagaaaactaaattaatcagatttgcatgtgtaaagagataacagaacggttaaaccaccagataaaggacctgatataaaaaacagtgattatacactttcggttttttaaggattatctggcgcggagcttatcgtggagatgaagtttaagtaagttaacttcaattaaactccgaatacattagcgcaaaccaacctcgttatcgaaatttgtacttgcaataacgaggcggaccataca

SEQ ID NO: 516 - DNA, 1533 bp, unidentified
  source 1..1533: mol_type = unassigned DNA; note = element_046d868
  misc_feature 1: note = core
  misc_feature 2..120: note = LE
  misc_feature 121..1140: note = CDS
  misc_feature 1141..1533: note = RE
  misc_feature 1193..1499: note = bridgeRNA
gaatgaaagggacttccccgtcccgagtgatccgcgcaattgcggggtacggcatcaaagtgccacgatgggaagtgcaacctctcatcaactcactcgtttttgtggaaggggaagtccatgtctgccattgtcaccattggaatcgatctcgccaagaacgtctttgctgttcacggcgtggatgccacaggcaagagcgcgctggtgcgccccagcgtgccgcgcggcaagttgctcgaactcatcgcctcgctgccgccttgcctcatcggcgtggaagcgtgctccggcgcccaccactgggcgcgcgagtttgagaagtttggccacaccgtgcgcctgatggcgccaaagttcgtcatcccgtaccgcctctcgggccgccgtggcaagaacgatgcggccgacgcagccgcaatctgcgaagccgtcacccgcccaaacatgcgattcgtaccgatcaaatcgatcgatcagcaaggccagctcatggtgcaccgcgcacgccaaggctttgtggagcagcgcaccgccacattcaaccgcatccggggcctgctctctgagctgggcatcgtgctggcgctcaaagccgctgtggtgcgccgcgaggccatggcccgcctggaagacctgcccggctgggccaacactgtcatcggggatctgctcagcgaggtcagccatctggacgaacgcattacccagtacgaccaccacatcgagttgatggcgcgtcacagcaccgaggccaaacgcctgatgcagctaagcggcgtagggcccaccaccgccacggcgctgctcagcaccattggcaacggacacgacttcaagtgcaggcgccagctgtgcgcctggctgggcttggtgcctgggcaatacagctcaggcggcaagcagcgcttggggcgcattaccaaggcgggtgacccgtacctgcgcagcctgctggtgctcggtgcccgagcagtgctggcagcggccaagaccaagagcgatccgatcagccgatgggccgtgagcctggagcagcggcggggctactggaaagccattgtggccattgctgcgaagaacgcgcgcatgtgctgggccgtgctcagccgaggcgaggccttcaggctgccggcatgagtgcttgaaccgcactgccaatacattgacacagaggaggtttgtttcgatttccaccaccgcgtgcagccagcaacgttggtgagtcaaggttggacctgcgcggggcgtgaccggttaactcaaggagatcagggcgactggaaacagtggccaacctcggctaacgaatgggtcccccgcgtgcgtcttttcatcagggtccgctgcaacaagcagcattaatgaccgtttgtagtttcgctgtccgcattccttgctcgattgggcaacgcagcgctggcgtagatggtgtgaattgaatcaagtcagtcgaaatgcattccgtgatccatcgctgcgcgatgcatcacggttggaaatttgtttgacttttatggggaagcccttgta

SEQ ID NO: 517 - DNA, 1596 bp, unidentified
  source 1..1596: mol_type = unassigned DNA; note = element_046f912
  misc_feature 1..2: note = core
  misc_feature 3..262: note = LE
  misc_feature 263..1474: note = CDS
  misc_feature 1475..1596: note = RE
  misc_feature 12..282: note = bridgeRNA
ctattacaatagtttttggtaggaagcccagcatccggataggcttctttccgtctcatgcctaagctacaataaggggagcaactggctgaccatcacctccttgggctttcatgcccgactgtaagactgtcagccatccctcttattgtagcgttcgatttgagcaggttgagccatagagttcgcgtcacccaatagattgaatcggcaatgagaaaaagatggactccagttgcaaattcgtatgggaggcagatacatgaactctgttggtatcgatatctccaaaggcaggagcacgattgccgtcatgcgtccctttggagaagtcgtcatctcgccctttgaggtgtgccacaccggcagtgaactgagcgcgctggcaaagcggctcaaaagcctggacggtgagactcgcgtggtcatggaggccacagggaactaccatgcgccggtggcaaagctgcttcacagtgcagggttatatgtttccgttgtcaatgcaaagctggtgcatggctatgggaacaacgatttgaggcgggtcaagaccgaccgaaaggatgccgtaaagctggcaaactacggccttgaccgctggcttgctttgccaaggtacaccccggaagaagatacccgattgctgcttaagaactgctaccgccagtaccggcagtattccaaggtgcagacagttctgaagaacaatctgatttccttgttggatactgttttcccaaatgcaaatcgcctgttcggtagtcctgcccgtgcagatggaagcgagaaatgggtggactttgtggcggagttttggcattgtgaatgtgtcagcaaacgctcagaaaaggctttcatcaaccaataccagaaatggtgcaggaagcatggctacaacttcagcgaggaaaaagcccatgatatttacattgaggccggcggacacattggcgtaatgccaatgtctgaaaccgcgaagctgcttgccgagcaagctgtgtctcagctcagggcaacttctgcggcactcgccgcactcaagcaggaaatgcaatcattggcttcccagctgccggaatatcccgtcgtcatggatatgtttggcgtaggcccaactctggggccgcagctcatagccgaaattggcgatgtgcgacggttttactcaaagaaagccctcgttgcctttgcgggcattgacgcccctccgaacgattccggcgatatgaccggcaggcacaagagcatgagcaaaattggcgcttcgtcgttgcggcggacgctgttcctgattatgagcgtctatttgcagaactcgccgctggatgaaccagtctaccagttcatggacaagaaacgggccgaaggcaagccctaccgcgtctacatgatggcctcagccaacaagttcctgcggatctactatgccactgtgaaagcctatctcgaagcgttggaacacatcgcctgaccttgccataaaacattggttggctgccatttcatttttgatatgcgaagcggcctgctctgctgcggcctttttgcgcactgcactaccttgaaatttctacttgacttttattagcaggt

SEQ ID NO: 518 - DNA, 1141 bp, unidentified
  source 1..1141: mol_type = unassigned DNA; note = element_0470ab1
  misc_feature 1..2: note = core
  misc_feature 3..169: note = LE
  misc_feature 170..1126: note = CDS
  misc_feature 1127..1141: note = RE
  misc_feature 3..174: note = bridgeRNA
cttgtatctttcagcccgcggaccggctcgggtagcccgtgcggcctctgggccagtcgatgaagcccgcgcctgagcgctgggcgcctgtgccggaccgtcctttcttgcagcccgaacggttgtaggaactcgaagttcgcatagacaaggatgggagcgagaggacgtgtccgactctgttttcgtgggtattgatgtgtccagtcagacgctggagatcgccagcagcgccgccgcgaagacctggcaggcggccaacgacacggctggcatcgagcagttggttgttcagctgacagggatgaagccggctctggtggtgttggaggccacgggcggctatgagttcgaggccgcttgtgcgatacaggccgcgggcctgccggtggcggtggtgaacccgcgcacggcacgcgactttgcccgcgccatgggagcactggccaagacggacacgctggatgcccggatgctggcaacgttcgcccgcgtgctgcatcagcaccccgagcgcgaacggttcatcaagccgctggcagatgcccaattgcagcggctgcaggcgctggtgctgcgccggcgtcagatcgtgcagatgctgactgccgaacgccagcgcatgcgtatctcgcatgcggccgcgcgccccagcatcgagcgggtcatcgagttcctcaaggccgaactcggcgacagcgatgccgaggtggccgaccatgtgcagcgccatcatgccgaactggcagccgccctgagcagcgtgcccggcatcggtgcggccagcgtcgcggtactgctggcgcaactacccgaactgggcaagctcgacaggcgccgagttgccgccttggtcggcgttgcgccgctgaaccgcgactccggtcagatgcgcggccagcgttcgatatggggtggccgtgccgacgtgcgacgcaccctctacatggccacgctgacggccgttcgtcacaaccccgtcttggccgcccattacgagcgcctgctcgccgcaggcaagcgcaagaaggtcgccctcgtggcttgcatgcgcaagctgctgaccatcctcaatgccatcgccaagcacggctcgacctggaacccgtctcttcatcacgcttgactgccaagacggttg

SEQ ID NO: 519 - DNA, 1439 bp, unidentified
  source 1..1439: mol_type = unassigned DNA; note = element_047aef7
  misc_feature 1..2: note = core
  misc_feature 3..227: note = LE
  misc_feature 228..1424: note = CDS
  misc_feature 1425..1439: note = RE
  misc_feature 9..223: note = bridgeRNA
gctctaccttctttctgggctcaccgcagccgttcgtagggttgtggggcccaggggagccgggtgtggctgacaagtggctgccgtctgtggcttcagatgcttggccgcccggcttcccacgacgactcggccgccgattgggaagtgcgagaaggtcgctgtgtagagccatgccggcgaggtcgtccgtggtacgaattgcaggcacgacctgatggagcatgatgagccggatatgggcggggaccgactgcggaaagacccatcaccacaccctggtcatggacgccgagggcgacacgctgctgtcgcggcgggtggccaacgacgagccggaactgctgaagctgatcggtgacgtcctggacctcgccgacgaccgggaggtcacctgggcgatggatatgacgggcggcgagcccgccctgttgatcgccctgctcatcaatcacgaccaggagctcgtctacatccccggcatcgcggtcaaccgggcctccgccggctaccgcggggcgggtaagaccgacgcccgggacgcccgtgtgatcgccgaccaggctcgcatgcgccgcgacctgcagccgatccgccccggtgacgacgcgagtatcgagctgcggctgctgaccgaacgccgtacggatctggtcgccgaccgcacccgcaccaccaaccggctcaaggccctgctgaacagcatgttcccggccctggaacgggccctggacatcggcacggccgggtcgctgctgcttctgacgggctaccagagcccggcggcgatccgccgcaccggcctgcgccggctgaccacctggctgcgcaaccgcaaggtccgcaatcccgaggccctggctgccaaggccgtcgaggccgccgagcggcagcacaccgccgtcgcgggcgagagcgccatcgcgaagatggtgcacaccctggcgaaggaggtgatgaccctcaacgagaagatcaccgaaacggacaagctcatcgagagccggtttcgcgaacacgagctcgcggaggtgatccagtccctgcccggcgtcggcacgaccctcggtgcggagttccttgtcgcggtcggcggcagcctggaggcgttccccagccccgaccgccttgccgccttcgccggcgtggcccccacgccacgcgactctggcaaggtcaccggcaaccatcaccggccccagcgctaccaccggcgcctgcagcgggtcttctacacctcggcactcgtcagcatccagtgcgaccccaactcgcggaagttctacgaccgaaaacgcgccgagggcaaacgccacgttcaggccgtgctcgccctcgcccgccgacgcgtcaacgtcctgtgggccctaatccgtgaccgacggtgctaccaggtcacaccaccagtcaccacggcggcttgacttcagcattgggaa

SEQ ID NO: 520 - DNA, 1435 bp, unidentified
  source 1..1435: mol_type = unassigned DNA; note = element_0481207
  misc_feature 1: note = core
  misc_feature 2..81: note = LE
  misc_feature 82..1146: note = CDS
  misc_feature 1147..1435: note = RE
  misc_feature 1198..1426: note = bridgeRNA
taatgggatggtccgaccgtgctcctgccccgccagccagtacactggcttgggggcacccatgacaacaaggagcacaccatgtctcagacactcaacacggccatcgctgtcgtcggcatcgacatcggcaagaacgcgttccacgttgttggccacgatcatcgcggcgcgattgtgctgcggcagaaatggtcgcgtggtcaggtggaagcgcgctttgccaacaggtcgccatgcctgatcggcatggaggcctgcgtcggcgcgcatcatctcggccgcaagctcaaggcgcttggtcacgatgcccggctgatgccggcgaagtacgtgcggccctattcgaagggacagaagaacgacttccgcgacgcggaggcgattgccgaggcggtgcagcgcccgacgataaagtttgttacgacgaagacggccgatcaactcgatccgcaggcattgcaccgggtgcgggcgcggttggtcagccggcgcgccggcatcgttaatcagatccgcgcctttctgctcgagcgcggcgttgccgtgcggcagggattgcggttcttgcgcgccgagctgccgcgcatccttgccgcaccctgcgacgttctgtcgccccgcctggtgcgagtgatcgaggacctggccggtgactggcgccggctcgacgagcgcatcgaaggcctgtcgagcgggatcgaggcctttgcgcgccaagacgccggttgcgagcggctgatgagcgtgccggggatcgggccgatcatctccagcgcgatggtggccgcgattggcacgggagatggcttctccaagggccgcgacttcgccgcctggctggggctggtccccaggcagatgtcgaccggggatcgcacgatcctgggcaagatctccaagcgcggcaatcgctacctgcgcgtcctgttcgtgcaggcggcctgggccgtgctgatcaagccccagagttgggagcgccacgggctcaagccctggatcgaggcggccaggaagcggctgcaccacaacgtgctggcgatcgcgctcgccaataagctggcccgcatcgcctggagcgttcttgctcatggccgggacttcgaggcaaggacgctgaccggcgcgaccgtccaaaccgcttgatcgtccaacgcgagattgaggagcgcgtgatcatgtagcccaatagcctttacctgccgaggtctgcgagaggatgagacgagatggaggttcggtcttcccggcgcgtgcgaacactggtgacccaaatggcccggcgaggcctatacgctaatgagatcgcatgcgcgctgatacccatgatggccaggagcacaacacgctccaaccaaaggccggatacattgatgcaagaccgctcaccgccagatcgacaaaaacctcttgcgacgcacggccggaccataca

SEQ ID NO: 521 - DNA, 1538 bp, unidentified
  source 1..1538: mol_type = unassigned DNA; note = element_0489b67
  misc_feature 1..3: note = core
  misc_feature 4..246: note = LE
  misc_feature 247..1425: note = CDS
  misc_feature 1426..1538: note = RE
  misc_feature 8..213: note = bridgeRNA
tttcgtattatcaggttagccagtaattactggttggcctttttttgcggtcgttttacgatgggggagccgggagaacgaggtggttttaggggctaggaccccgtaacaaaaactgttctcccacgacctccaaaagaccatgtttgagctggttggggcagtcgaccccgtataacaagcgaagctatgggtttggaaccatcgtggaaagggccggcgtaacgaaagatagggagtgaagaaatggaacctgttgtgggtgtagacgtcgctaaaggctcaagtgtggttcaggcgtttcgaaaacgaaatgagccgtttggcaaagccatagacattgtgcatgaaccaagcggattcgaccaattcacggagatgttaggcgcgcttcaagccgaaacaggcgttgctccagtggtcgttttggaagcgacagggcattatcatcgtgccttggtgtgctgtctggatcagagtggatacacctattacattgtgaatcccttgcaatccaagcgagccaggggagcgcagttacgcaaagtgaaaacggatgcaacggatgcctggcatttggctgagatgtactaccgaggcgatgtgaaggcacaccgaacttgggatgagacgtttacggaactgcagcatttgacccggcagcatgaatttgttacaggaatctttgtacaggccaaactgaacagcagagccttacttgagcaagtgtttccggagtacgaagggttattttcgaatgtattttccgcaacgtcattaacggtactggcttgttgtttagaagaaggtacagcggattggattgaagtgattcagggtagcgcaggaaagtctcgttccaagcaatgggtcattgaaaaagtcagaaaactggaggaagtgctgggtgactggagagaagctcggcgtagcccatcacaacgccaagcactgctggggatggttaagttattgctgacgatgatccggcaattggacgagctggaaaagcaaatggaggacatcgcgaccaatctacctgaagtcgaactcgtgaaaagcatcccgggaatcggaatgaaactagctgcagccatagtagctgaaataggtgatgtcaggcagtttagggacgctaagcaactcgtggcgtttgcgggtcttgatccgggaattttcagttcagggaagtttacagcaacaggcacacgaataacgaaacgaggctctaaaaggctcagacgttcgctatatttagcggtacaatgcggaatgcgaaagaatgtgaatgcaaaaattggttcgtattacgagaaaaaaagaaaagagggcaagccctacaaggtggtcgtgatcgcctgcgcaaacaagctgttgcatcacattttcgccatcttgcagaagagccagccctaccaatcgtaacccatatttaaccaaaacctccatagcagtggaggttattcgtgttggtcggaaaaagtataccacgaaaagagaactcacccaacaagaaatgcttgacaaacattagctgg

SEQ ID NO: 522 - DNA, 1323 bp, unidentified
  source 1..1323: mol_type = unassigned DNA; note = element_048fde6
  misc_feature 1: note = core
  misc_feature 2..56: note = LE
  misc_feature 57..1076: note = CDS
  misc_feature 1077..1323: note = RE
  misc_feature 1088..1321: note = bridgeRNA
taatgaaatggacacccccttctatactgagtaggtcagtttaaaaggaggacgttatggatacgattcatacaattggtattgatttagccaaatcagtttttcagatatgcgcttttaatcgagctggaaaaaaactgtttaataaaatgctacgtcgcaatcaacttcttcgtttcttaagtaatatagagtcatgtttgattggaatggaagcatgcggtagctcccattattgggctagagagataggtaaactaggccatactgtgaagttgatgccaccacaatatgtaaacccttgtgttaaaacgaataagaatgatgcagcggaagccgaagccatttgtgaagcggttagccgaccaaatatgcgtttcgtttctgttaaaagtgaagagcagcaagctttgcttttactccatcgagaacgagatggtgttgtacgagaccgaacggctttaattaatagaattagggcaagtttgcaggagtttggtgtcagtatcccagcaggaaggtttcgtttacagatatggtttagagaggattttgccttagttgaagattgtctgcctaagatgttgtgtaatcttattaagtcaatgcaatctagattaatggatttagagaaatacctagatggcttagatacacaaattgatagagcgagccaagaaagtcgccaatgtcaggctattagagaaattccaggtgttggtcgattaacctcatcagcgttagtggcaagtattggtgatgcaagagaatttgattctggtcgtcaactatctgcttggttgggtttggtgccgagtcaacactcaagtggaggaaagtcacttttactaggtattagtaaacgaggcgattcgtatttaaggcgaatgtatattcatggtgctagggcggttataagacatagtaaaccgggaaaaccttattatgagtggattacaaacctgttaaacagaatgcataaaaacaaagtcattgtggcattagccaacaaattggtaagagttgtttgggcgatacttgcacgagatcaaaaatatcaggctcaaacggtctaaatttaaaagagtgatacaccaagttttgcttagtaaaaaagagtgatgacaagataggtaagaccgtgacttggaaattctgggactaacatcgtttcgttgaaaacgccaaaatgattagaaccaagtcagcggagttcatcagggataaaagctaaaaaagctttacgaaaaatccgaatagatggctgcaaaactgttcttgttagatcttgattttacttgcaaaaatcggggtgtccataga

SEQ ID NO: 523 - DNA, 1412 bp, unidentified
  source 1..1412: mol_type = unassigned DNA; note = element_049e3bf
  misc_feature 1: note = core
  misc_feature 2..223: note = LE
  misc_feature 224..1399: note = CDS
  misc_feature 1400..1412: note = RE
  misc_feature 15..238: note = bridgeRNA
ctacttgtttaatttgatctacgacctcagcccggccaggctgggtcgaggtggccggtgggttgctctgttcgcggctgtccacggcacaagggtgtgactctctcatggcgtgcgcccgccggccaccgtacggggagtggctcaggggtttgcccagctcaaagtagcgctgccctccccgagcattcgtccactgtgcacgagcggggagacacagcgaatgggtcgcgtggtgatcggaatggatccgcacaagcggtcggccaccatcgaggccatcgaccaacgggaacgggtgctgaccacgggccggttcgggacggacaccgccggctatcaagcgatgctcgctgctggtcgccaattcccggatcgggtgtgggcggtcgagggttgcgccgggattggccgccacatcgcccagcgtctggtcgccgacggcgaaacagtattggatgtgccggcgaagctgtcggcgcgggtccgcgtgttcggcaccggccaaggccgcaagaccgacccggtcgatgcccacagcgtggccgtggccggcctacgcagccgcgacctacgcacggtggccgtcgatgatgccaccgtggcgctgcggctactggttgaccgccgagacgaactgggccgggcccgcaccgagaccatcagccgtatccaccagctgctccttgaactgatcccgggcggggcgaagaagttcctcacccgcggccaggccagctacctgctgcgcaccgcaccgacaccggtgagcatcgtcgcccggacccgccacgacctggcccgcgaactcatcgacgagctcaccgtcatcgacgccaagatccgcacagcggacaagcagctacgtcagctggtcgccgcagcgggcagctcgttgaccgacctcaacgggatcggcccgtccggtgccgcgcgcctcatcggcgacatcaccgatatcggccggttccgcaccgccgcgcacttcgcctcctggaacggcaccgccccaatcgaagcatcctccggcgatcaacgtcgccaccgcctatccagactcggcacctggcacatcaaccggatcttgcacatcatggccgtcgtccagctccgccaccacacccccggccggacctactaccggcgccgtctggcccagggcaagaccacgacggaggccatgcgtgccctcaaacgccacctgtccgacgtgctctacaagcagatggtccgtgacgccaaaccaggccgcaccggcgggacgggtccgggaggacactcgggagcgactctgcaatccagcgcggacagcccaatcccgacggctgcctcttcggacaagtcacagcccggacccgccgccaggaagcttagaacaaaccttgccgtgaccccttgaccgagaggggagc

SEQ ID NO: 524 - DNA, 1379 bp, unidentified
  source 1..1379: mol_type = unassigned DNA; note = element_04a3066
  misc_feature 1..2: note = core
  misc_feature 3..246: note = LE
  misc_feature 247..1116: note = CDS
  misc_feature 1117..1379: note = RE
  misc_feature 1087..1366: note = bridgeRNA
agatggggtggttgccgccctccccagacggcatcgcaatgtgccagagtgtgatcgttggagatcatgtagcggagaggatggcaatgaagtatacaatgatcggggttgatctggcaaaaaatgttttccagcttcacggcgcgtcgctgacgggcgaagtgcggttccgcaggaaattgtcgcgcggtcagtttctgcgttttatgggaagccagcccgcttgcattgtcgtcatggaggcatgtggcagcgcccaccattgggcgcgggagatggccggcgctgggccacgaagtcaagctgatcgcgccgcaatatgtgcgaccattcgtgaagcgccagaagaatgacgccgccgacgcagaggccattgtcatcgcggcgcgtcagccggaaatgcggtttgtcgaacccaaaactcccgatcagcaagcgcgcgctattctgttccgggcaagagagcgcattgtccaccaacgcacggagttggtgaatgccctgcgcgcaatgctctatgaatatggccatgtcgttcctgtgggcatcggacatatcaagcggctggaagcggcgctgaacgacgtggccaataatttgcccgatctggtgcgcgaggaaggccttgatctgctggcccagatcggtgaaatgaccgccaagatcgatagcaagacgcagaaattggcctcacttgccaagcagaccgatgtggcgcggcgtcttcagacaatgcctggcatcgggcctatgacagccgtggctgtcgaggcttttgcgccggcaatggaaagtttcaagtcgggccgtgactttgcagcctggctcggccttgtcccgaggcagttctcatccggaggcaaggagcggttgggcaaggtctcaaaggccgggcaagcggacattcgcaggctgctgatcatcggcgcgatggcgcgtgtgaattgggcgagctgcaaggaagcatcagcggatccctggatgatgcgtatgcttgggcgaaagccccgaatgctggtggcgatcgcgctggcgaacaagatggcacgcatgatttgggcgatgttgatgcggcaggaagattatcgaaatccgacgttgacgacggcggcatgaaggctgctatcaccaacgttggcaaggaggtgtgagaagtcgatgacctgaatgggcgcaagatcgaacgatccggatcaagaaaaccagtgggagtccttcgagcgtcatagctcgggaataagatttggacctgatccgctgatcaccatcccggccagcggcttctgaaagcgccgcaaacgaaggcctgacagaagaccgcattcgatcacacgtccaaaggctcagaaacaacttgcacaacgggcggcaaccacaga

SEQ ID NO: 525 - DNA, 1825 bp, unidentified
  source 1..1825: mol_type = unassigned DNA; note = element_04b172d
  misc_feature 1: note = core
  misc_feature 2..550: note = LE
  misc_feature 551..1690: note = CDS
  misc_feature 1691..1825: note = RE
  misc_feature 115..286: note = bridgeRNA
tagtataataatggtgtagtcaataatgactacaggttaatagttacaaagtctaaatgaataactgaaggagggattccctctccatcagaagttattctttccttaccgtgtctgagacttccatatgcaccaggccagatcctgaggtataatcactgaggcagggcgattgacgtttcctccttgggacccggtcttccgccgggaaaacctcttagaaagtctgtctgtccattcggtggtgatttatggtttggctggttgggaagcctcaggctatacctgtataagccactaggttgtgtatccgccttatggaaatggatgcctgccggaaaggattttcatcatgcattacaaaagattactttcatttattgacagcgcttcttcttacctctctgtcggtcttgatgttggcgctgattttacctagatgtccattgcgctccccaatggctcttttgtcggggagccctttaagatcatccattctgatccccggtccagagatctcgccgtcgcaaaaataaaagaagcacaagagatgtattctctcaaaagccgctgcttccttgagtctaccgggatctaccacatcccgctcctgtgcttccttcgtgataaggggtttgactgctcggtcattaatcctatcatcactaagaatagcacaaatatcaacataaggaaactacataatgataaatttgattcaaaaaaggctgcacttgttggtctcaatgtttctctcaagacttccatcatcccggatgattccgttgtcgatctgagaaacctggtccgcgattattattatttcaaggatcgccagtctgctgttgctctcaagctcactgcggaaccgaaagtatctttccctgcttatgctaaggtcttcagcaaagtcaccatacagtcttccttaaagctgttaagctcgtatcctcttccagaggacatgcttgccgcttccaaagagaacattgtggatatcatccgcagtaccgcacgctttggcgaagcttatgctctgcgtaagtatgaagccatcatcgctgccgcaaaggatgccgctgtttttggcagggctcttccgagcaacgctgtccgcatccgcctttatgttgatacttaccaggaataccagaagcatctggacacgctcctgaaagcactccatgagacagtagagaagctgcaggataccctgatctacgatcagatctgccttctgcagtccctgtgtgggatcggcttcttaagcgcagtcgtcctgattgcagagatgggggattttaaacttttttcttccccgaaaaagctttatgcctactttgggcttgaccccgctgttaaacagtctggaaaactcaacggtgataaagtccatatgtccaagcgtggttccagccttgccaggcgtattcttcacatggccgcgctcaataacgtaaaggtttctaaagggagcggcacacctgtgaatcctgtgatctacgactattacacccagaagtgcaccggcaagaaaaagccagtagcgatgggcgctgtcatgcataagatctgtaacatcatctttgccatgcttcgggataagaaaccttttgagatcatcactccggaggaacactgcaggcactttgctgcgaagcatcccgacaagataaggaagtccgcataatcaacacggcgttctggatatttagtttctgaccagtcctatatcggggaatggtctgttaaggttaccttttttgctctgttgtaataaatttaacttttttcatatcacctcttgacatttcttagctggact

SEQ ID NO: 526 - DNA, 1639 bp, unidentified
  source 1..1639: mol_type = unassigned DNA; note = element_04b4c5f
  misc_feature 1..2: note = core
  misc_feature 3..298: note = LE
  misc_feature 299..1549: note = CDS
  misc_feature 1550..1639: note = RE
tttcctccatttccccgcgcctaaagtcgcgcggacacaaatactttattaataaattctttttccacgccttatgtgttaccatgaaaaagaggtggtacacgacagagcacgtgagggtgagtaggtattctactcaatagaattaacctgcattattataagttgccgtcatcatttcaagtacaaataataggggacgccaagcccggacacttaaaattgtttaatcaactgttgtcgattcgctttgatgaccgtcaatgccacttctccttttacagaaaggagattttttatgacttttaaagttgttcgctttatttgtggcggtatggatgtccacaaaaatctgattgttgctacgattggaactacagacagacaaactttgattactgaatatattcagcagtcgttttcgacattttattcggacttgattcgtttaaaagaatggtttatatcacatgattgttatgatgtctgtatggaatctacaggtaaatactggattccaatttataacgtccttgaaactgaattgaaaatttgtcttactcacccaaaatatgttaaagccattaaaggcaaaaagactgataagcgagattccaaatggatttgcgacctttacaagtgtgaccttgtaaagcattcttttatccctaaaaaagaaattcgagaaatgagagaaattgcccgttacagatgcaaacttgtctatatgcgctcttccgaaagaaacagatatcagaattgtttgacagtctctaatatcagtcttgcttctgcagtttctgatccttttggcaaaactgctacaaacatcatgaaggaattgatgcaatctgaagtaattgaagatgacaagattttgaaacttattcataaaaattgtaaagacaaagacaagatcttagattcattacagggataccacatcgaatcagatcaacgttttaaaatggatacagttatgaatcatattgagtatctcgataaacagattcaagcctgcgaagctgaacttatcaaaagagcttatcctttgcgagactatttccaacacataacccatatcaaaggaatcagtgcactctcagctatcctgattgtttctgagattggtacagatatgaatcagtttgaatccgataagcagcttgtcaattgggcaggcctttctcctgcaaacaatgaaagtgcaaataagaaaaaatccgttcgcatctctaaagctggtcaatacctagaaccattgcttgttcaatgtgcactttcttctattaaagacaagaattcatacttcggaatcaaatactgtcgaatcaaaaaacgcagaggccataagaaggcgattatcgcaatagcacgaatgatgcttgtctgtatatatcacatgattcttacgggtgaagaatttaatccatgtgattatgaatctttaacaaatccaaagccgaaaaaagaaccaataatgacagttgaatctgctttacaattcttaaaagattcaaactttgatttttcttcaattcagttataaacaataatttgaaattgtttttttagtgattttgaccacctctttttagtgcggccttttttttatcttttttctatgttttattcacac

SEQ ID NO: 527 - DNA, 1390 bp, unidentified
  source 1..1390: mol_type = unassigned DNA; note = element_04c03bc
  misc_feature 1..2: note = core
  misc_feature 3..88: note = LE
  misc_feature 89..1138: note = CDS
  misc_feature 1139..1390: note = RE
  misc_feature 1109..1377: note = bridgeRNA
agatggggtggatgccacccttccgcagcggcatcgcaatgtgccatgtttgtggtgttacagccacacaaaaaggaaaggggcatccatgaaagaggttaccataatcggagtcgatcttgcaaagagcgtttttcaacttcacggagcagcatcggacggagctgttgtgttccgaaagaaattgacgagggtacagtttcataaattcatgtctgagcgtccagcctgcactgtcgcgatggaggcttgcgcaagtgcacattattgggcccgtgaattgacggggttcgggcatcgggtcaaactgatagcgccggtttacgtcaagccattcgtgaagcgacaaaagaacgacatggccgatgcggaggcgatcgttgaggcggcacagcgtcccaccatgcggtttgtcgagcaaaagacggcttcgcagcaggcgcgtgccgttgcattccggacccgtgaacagcttgtcggccaacggaccgaaaccataaatgcgctgcgcgcacatctttacgagtttggctatgtcgcccaaaagggactgggtaacttgtcccgccttgccgaagttatcggtgatgaaaatacgcgtcttccggacctggtccgcgatgtatgccgtgacttgctggagcagatagatcagttgacggcccggctaaagaaactgaaggcccggatcgacgcgcttgcccgggaaggcaaaacctcgcaacggctgcagacaatgcccggggtcgggccgatcacagccctggcaatcgaaacttttgccccgccgatgggcgtgttcagacgaggccgcgattttgccgcctggctcgggctggtcccaaaacaatattccagcggcggcaagcagcgactggggaaaacatccagaatgggtcaacgtgatatcaggcggttactgatcattggagcgatgtcggtggtaatagcagcctcgcgcaaaggtgcccccgaggggtcctggctcaagcgcatgctggccacgaaaccgcgtctggtggttgcaatagcgctggccaacaagatggcccggggcatctgggccatgctcagcaaacaggaagattacaaggatccgatcagggccggagttgcgggggatattacctgcacctgacctgaaatcggtaaacagatgtgaggaaggcatgaactgcatgggcaaatgatcgatcagatcggggttgggaaaaccaggaatcacctcagagcatcaaaagctcgccgttgagatttggacctgatccgcgtatcgccataccggccagcggcgtgtgaaaagccgcaaacaaaggcctgacacaagaccgcactcgatcacatatccaaaagttcaaaaattccttgcaaaccgggtggcatccacaca

SEQ ID NO: 528 - DNA, 1251 bp, unidentified
  source 1..1251: mol_type = unassigned DNA; note = element_04d8221
  misc_feature 1..2: note = core
  misc_feature 3..153: note = LE
  misc_feature 154..1041: note = CDS
  misc_feature 1042..1251: note = RE
gtcctaccttctttgttgggtctgaactggtcattcgtaggatcggtggaccctggggctccggtatggctcgcatggttccgccgcagtgaaggctgaaaggacttggccgcccgggcccccgcgacgactcgaccgctcattgggatacgcgtggatcgctgtgcaggacatcgtcggcgtggtcgtctgtgggcgatcgacctgaacagcggcggtgccgcgctgctgatcggcctgctggtcaaccacgcccaggaattggtctatatcaccgggttgaaggtccaccgcgctgccggaacctaccggggcgaagggaaaaccgacgcgaaagacgcgttcgtcatcgccgaccaggcccgcctccgccgcgacctcggcccgttgcgggccggggacgagatcgcggtggacttgcggaccctgaccaaccggcgcaccgacctggtctgcgaccgcacccgggcgatcaaccggatcggccaccaactgctggagtacttccccgcactggaacgcagcctcgacccctcccgcaaaggacacctggtactgctgacagaacaccagaccccggaccgaatccggcgacttggcgagcaacacctgacccactggctgcagcaccgcaaggtccgcaaagccgaatcggtcgcacacgcggccatcgaagccgccgccacgcagcacaccacgctgcccggtcagaaactcgccgccgcgatggtcgaacggctggccaagcggacgatagccctcaacgccgaaatcgccgaaatcgccgaaatcgacgcgatgatcgaggaacggtttcgccagcaccgccacgccgaggtgatcctcaccctgcccggtttcggcccgactctcgctgcggaatttctcgccgccaccggcggcgagatgaccgcgttcggctcggtcgaccgtctcgccggctacgccgggctcgccccggttccccgtgattccggccgaatccgcggcaacctgcgacgacctcgccgctaccaccgcggtctgctgcgggcctgctagctcgccgcctcggccagcttgcccagctgcccgatctccaaggcctactaccagcgcaaacacgccgaaggcaaacgacacgaacaagccctgctctgcctcgcccgccgacgcctcaacgtcatatgggccatgctccgcgacgacgctgactaccacgcttcacccccgatcccggtggctgcgtgacttgacaatccccattgggaa

SEQ ID NO: 529 - DNA, 1356 bp, unidentified
  source 1..1356: mol_type = unassigned DNA; note = element_04e1b4f
  misc_feature 1: note = core
  misc_feature 2..161: note = LE
  misc_feature 162..1097: note = CDS
  misc_feature 1098..1356: note = RE
  misc_feature 1098..1343: note = bridgeRNA
tgatggtgtggacgacctccacccaaccgggttcgctgatgtgtcgtcgatagggacgtcatgtctagggagcggatcatgcaagaggtcgccgtcgttcgggttgggatctggcgaagaacgtctttcaggtgcacgggatcgacgctgcaggcgtcgtggtggtgcgcaagcagctacggcgtagccaggttcttcccttcttcgagggcttgtcgccctgtctggtcgggattgaggcctgtgcgtcggcccatcactggggccggcagctgatggcggtcgtccacgaggtgcggctgatggcgccagcctatgtgaagcgcggcaaaacggacgccgccgacgcggaggcgatcgcggaggcgatcgcggaggccgtcacccggcccaccatgcgtttcgtcgccgtcaagaccgaggcccagccggcgattttgatgctgcacaaaacccgcgacctcctggtgcgccagaggacaatgctgatcaacgcacttcggggtcacctcggcgaattcgggatggtttcagcgcagggctccgcaggcgttcaggcggcgctgaggtcactgatcctggagcaggaacggttgccggagctggcgcaggccgcgctccggggactcgcggggcagctggagacgcttcgggcggagattgaacgactggagcatcagatcctcgcctggcatcggcaggacgccaccagccggcggctcgccacgatcccaggcatcgggccgatcaccgccagcgccctggccgccagtgcgcccgaccccgccctcttccgatcggggcgccagttcgccgcctggctcggtctagcgcctcgcgctcacagcagcgggggtaagaagcggcaggccgggatcagcaagatgggcgacggctatctgcgacgcctgctggtggtcggagcgacagccgtgctccgtatggcccgccaacgcggtgtcggcggcgcctggatccagggccttctcgagcgcaagaagccgaaggccgccgccgtcgcgctggcgaacaagacggcgcggatcgcctgggtgctgatggcccggcaggaggtctacaagcccgcagcagcttagagatcggcgacggtcacccggaccgacgccgtagacgccagagtgatgagacgtgatgacgaaccggccgcagccggggaccagtcaaacccagggggtcagagcgcttcgagcgcgttgacgtgattagggagccagtccgcggacttcatcaaggccagcagcctcgaccgctgcagcaacaggccgaacacatgactgcactcgaccgagcgccgaacgtcaatttcacccttgcgtcttggaggtcgtccacaca

SEQ ID NO: 530 - DNA, 1374 bp, unidentified
  source 1..1374: mol_type = unassigned DNA; note = element_04f7f1e
  misc_feature 1: note = core
  misc_feature 2..90: note = LE
  misc_feature 91..1122: note = CDS
  misc_feature 1123..1374: note = RE
  misc_feature 1139..1366: note = bridgeRNA
caatgggatggacccctcctcacctgaacggcatcgaggtgccagactggaagtgtgatcgaccagtcaacggagagaagggggtccacgatgaagcttatgcgtgttggcgtagatttggcaaagtcgatatttcaggtgcatggggtcgatcgccacgagcaggtggtctggcggcggaaactgacgcgcgcaaattggctcagagtcttcatcgagacggttgagccgggttgtgaggttggcatggaggcgtgcggcggtgcgcatcattgggcacgcgtgttacaagcgcatggttatagcgtcaagttgatcgcgccgcaattcgtgaagccgtacgtgaagagcaacaagaatgacgccaacgatgccgaggcgatctgcgaggcgatgagtcgtccgaacatgcgctttgtggcggtgaagagcgtagcccagcaggatgtccaagcggttcaccgcgtgcgcgccgaggtaagcaagcagcgcaaagcgaaaggcaatcagatccgcgggctggtatccgaatacgggctggttgcgccgaaggagttggtgcacttgcgtgcggcgattcccgcctggctggaagatggcgaaaacggcttgacggggcggtttcgccgactgctaaacgcgctgtggcacgacttgcgcgcattggatcagcgcatgatcgagctcgatcgcgagatcgcgcagattgccgccgccgatcccgtggccaagcggctgcagcgcctgcgtggtgtcgggccggtcatcgcaacggcactggtggcgacggttggagatgtgcggcaattcgccaacggccgacagctggcggcggcgctcggcttgaccccaaggcagaacagctcaggcggcaaggagcgactgctcgggataagcaaacgcggcgacgcctacctgcgcacgttgctcgtccacggtgcgcgatctgcgttgaggacggcccggaacaaagaggaccgactcagccggtggatcagccggatcgccgaaactcgccatcacaatgtggcggccgtcgcgttagccaacaagacagcgcgcattgcctgggccatgatgaagaacgggacggactatgagccggaccgggccgcagcttaaccatcgcaagatgccgtccactacgattgcatagcaaaccgtctgatggctcacaggtcgaaccggcgtcagcaaaacccaacaatgtccagggccctcaaggccgaagaagcgatcgggagctggcgtgcgaatagcccatcatggcccgacatcgattgttcgatgcgcggttagaggccggatatacgtgagcagtcgtaccttgaaagccagaaacggcgagcttgcaaacgaggaggggtccatata

SEQ ID NO: 531 - DNA, 1494 bp, unidentified
  source 1..1494: mol_type = unassigned DNA; note = element_04fdbb5
  misc_feature 1..2: note = core
  misc_feature 3..245: note = LE
  misc_feature 246..1340: note = CDS
  misc_feature 1341..1494: note = RE
  misc_feature 6..244: note = bridgeRNA
ctaatgggagctaccgggtcggccaccgggcagactcgggtccggtagcggccagtgagtgagcactctcgtcgccaggcattcgatgcctaaggtcagaccgtgcccccgctggtcgtggggaggacgtgaccactgatggggtgacgtgcccgccgaaggctggcgtgagcactggaccattaggccgccggtgttcctcttccgcgctgctcaggacacgatgctgaccgtgtggagggtatgtgttgttcgtcggagatgactgggctgaagatcaccacgatgtcgaggtgcaggatgagacgggtcggcggctgggtcgggctcggctgccggagggcgtgaccggggttgcccggctgcacgcgctgatcggtgagcatctgcccgagggcgccgagcctgaccaggtcgtgatcgggattgagactgatcgaggtccatgggtccaggcgctgatcgcggccgggtacacggtgtatgcgatcaacccgcggcaggtggcgcgctatcgggagcggcacggcacctcgggcgccaaaagcgacgccggggacgcgcacgccctggccgacatggtgcgcaccgaccgtcatcagttacgcgcggtcgccggtgacaccgagcaggcccaggccgtgaaggtggtggcgcgggcgcaccagacgctgatctgggaccggcaccggcacatgctgcggctacgcaccgcggcgcgcgagttcttccccgccgcgctggaagccttcgacgatctcctcgccccggatgcactggaactccttggccgggcaccggacccggaccaggcggccagggtgtcacgcgcgcagatcacgggcgcgctcaagcgggcccggcgccgcaacgtggacgagaagaccaccgcgatccagaccgcgctgcacactgaacacctgacccagccgccggccgtggccgccgcctacgcggtgacggtgcggtccctggttagcgtgatcactgccttcaacaccgagatcgccgccgtgcaagagcaggtgcaggcgtgttttggccgagcccgggacgctgagatctacctgtcccagcccggcatgggacagatcctcggggcccgggccctcggcgagttcggcgacgacgccgaccgctacgcgagcgcgaagaaccggaagaactacgccggcaccagcccgatcacccgccagtccggtaagaagaagaccgtgctggcccgcttcgtccacaacgaccggctcgtcgacgccctgcaccagcaggccttctgcgccctccgcgcctcacccggcgcccgcgcctactacgacgagctccgcggccgcgcggcatgaaccaccacgccgccttacgccagctgtccaaccgactcgtcggcatcctgcacggctgcctcaagacccggagcacctacgacgaacacaccgcctgggcacaccacaaccgagaccagcaagccgccgcttgacaaacaaaatcatggggtgt

SEQ ID NO: 532 - DNA, 1350 bp, unidentified
  source 1..1350: mol_type = unassigned DNA; note = element_05007f4
  misc_feature 1..3: note = core
  misc_feature 4..85: note = LE
  misc_feature 86..1117: note = CDS
  misc_feature 1118..1350: note = RE
  misc_feature 1121..1337: note = bridgeRNA
tgatgctgtggacggcgcccactctgcggcatcaaagtgccaaggggtggtcgcgtgaagcgaaccacgttgaggggagccgtccatgggcgaggttagcacgattggttttgatattgcgaagtcagtgtttcaggtgcacggggttgatggcactggcgcggtagtgatgcgcaagcgcgtcggtcgctcgaaggtgttggagttctttggcggcttgtcgccgtgcctggtcgggatcgaagcttgcccatcagcacattattggagccgtgagctgcagacgctcggccacacggtgaagctgatgccgccgagctatgtgaaggcctatctcaagcgcagcaagaacgacgccaacgatgcggcggcaatctgcgaggcagtgacgcggccatcgatgcggtttgttgcgatcaagacgaaggaacagcagactggcctgatgctgcaccgaacccgacaattgctggtacggcagcgcacgatgctgtcgaatgcgatccgtgggcatatggccgaactcggcatcatcgcggccaagggccgcaatggcacggctgagctgttgcagattattgccgacgtggcggacgatcgcatcccgccggttgcccgattctgtctcgaccttcttgctcgccaatacctgaccctcagcgcagaggtctcaaccatcgacaagcgcatccatgcttggcaccgatcgtgtgaagagagccgacggctcgaggagatcccgggcattggtccgatcgtcgccaccgccctgattgccgagattggcgactggggggcgtttcgctcggggcgcagtcttgctgcctggatcggtttggtgcccaagcagcactcgaccggtggcaaggaacggctcggcagcatcaccaagcagggcaatcgctatttgcgatggctactggtcgccggcgccatggccgtcattcgatacgcccgacagcacggcaccaagcgaccttggctgatacgaataatggatcgccgacctgcaaaggtggcggcagttgcactcgccaacaagatcgcacggatagcctgggcgatcatggttcgcggcgagcgatacagagaaccgaagctgttgctggcagcgtgaatacaccaattggcgagggcataacgacgtaatgcagatacggtcgttccggggatcgggaaaacccgtttgggtcaacgcactttaaagtgcgtgctttcgattgggacccgatccgcgcagagcattagggccagcggcacatccgccgcatcaacaggccggacacgtgaccgcacccgaccaatgctgcagctacgtcagaaagttcttgccaaggcgccgtccacacg

SEQ ID NO: 533 - DNA, 1204 bp, unidentified
  source 1..1204: mol_type = unassigned DNA; note = element_0508996
  misc_feature 1..2: note = core
  misc_feature 3..238: note = LE
  misc_feature 239..1189: note = CDS
  misc_feature 1190..1204: note = RE
  misc_feature 6..225: note = bridgeRNA
cttgtatgtttaaaccagaccagcgcggtacagtctgatcaccgctgaggtgaccggaccggatcgtgtagcctgaaatcgtctggagtcggcgagtccgctcgccagctcgtacctgagttgattgcgcacgttctccgtgctggtcttcctgaagcccgaacggttagtcgagcggtttgataccagatcgcatgcacaagaaagggataagaagaccatgtctggatcatccgtaatggtgggcatcgatgtggcgagtacccatgtcgatgtggcgtgcctgggggctaccttgcccgccgcactgacacacatcagcaatgacaccgaggggcacgtcgcgctggcagacgccctgacgaagctgcagcccggacttgtgctgatggaggccactggcggctatgaggcggcattggcttgcacgctgcaagcagccgggtcgcgtgtggcggtgatcaatccgcgcatggctcgtgacttcgctcgtgccatgcagcgcctggccaagaccgaccgcatcgatgcagccaccctcgccgaattcgctgccgtacttgcccaacgccctgactgcgagcgcttcgtgcgtccgctgagcgatcccgcacagcaggatttggcggctctggtcacccggcgacgccaacttgtggccatgcgactctccgagcgtcagcgcctgcgcctagctcgtccggtcacacgcccgagcatccaagcgctgctcgaagccattgcctgtcagcttgacgaagccgacgccaagatgctcagtcacgtcgagcagcaccgcgccgtcatgtcgaaggtgttgcaggacgtggcgggcgtcggccgcgtcgccgcgacgaccttgattgccgaattgcctgaactgggtcatctcaatcggcgccaaatctgcgccctggtcggcgtagcaccctatgccaaggattctggttccatcagaggtcgtaggcgcatcgccggcgggcgcttcgaggtacagcgcgcgctatacatggcaacgctcaccgcgactcgattcaatccggccgtccgcgccttctacgaaagcttggtggccgctggcaaactcaagaaagtggccttgatcgcgtgcatgcgcaagctcatcacccacctcaatgccatcgcccgtacccacctgaatgcccaaaatcagcccgtgacagcttgacattgaacacggtta

SEQ ID NO: 534 - DNA, 1371 bp, unidentified
  source 1..1371: mol_type = unassigned DNA; note = element_050eb69
  misc_feature 1..2: note = core
  misc_feature 3..80: note = LE
  misc_feature 81..1106: note = CDS
  misc_feature 1107..1371: note = RE
  misc_feature 1120..1360: note = bridgeRNA
tgatgatgtggacggcctcacccgaacggcatcaagtgccaaggcgtgaccggtggcggtcgcggatagggaagccgtccatgaaaagctttatcaggattgggatcgacctggcgaagaactttttccaggtgcatgcgatcgagcgtgaaggcgcgcctgcggtggcgcgtaagttgagccggggcaaggtgcttggtttcttcgcccaagcggcgccctgccgcgtcgggatggaggcttgtggatcgtcccattactgggcgcgagagatccaggcgttggggcacgaagtggtcttgattcctcccgcttacacgaaaccctacgtcaagcgcgggaagaacgatgcgaacgacgcggctgcgatctgcgaggccatgtcgcgccccgacatgcggtttgtgccgatcaagagcgcggatcagcaagccgtgctgatgctgcacaagacccgggaattgctggtcaagcagcgaaccatgaccgtcaacgcgctgcgcgggcatctctcggagttcggcttgatcgcgcccaagggcatccaccgggtcaaggaattgctggcgctcgcgctcgccgacgagaccctccccgaagaggccaagcaagcctcggcgatgctggcctcgcacagcggcggcctcgacgaaaagatcgacgatttggagaagacgatcgcccgagcaagcggcaagaaccagacaagccagttgctggacgagatccccgccttcggcccgctgatcgcatcggcgatcgccgctcttactcccgatcccagggtcttcaggtcgggaagcgatttcagcgcgtctctgggccttacgccgagccagcactcgagcggcggtaaggacaagctcggcgccatcaccaaaaagggcaaccgatatctgcgcaagatgctggtcgtgggatgcacgtcggtgttgcgggcggcccacaaacacaaaggggccttggccgaatggatcgtcgccatgagggccaggaagcctgagcgcgtcgtcgcggtcgccctggccaacaagctggccagaatcgcgtgggcgatgatgtcgactggcgaaagcttccgaaccgaactgtataccaaggcctgaagaaagggctttccaggataggcgtttcattttcgaagagattggcaagcgcaacgacgtgatgaacgacatggtcgccacgaaagcccaggacaccccgacattcgtcacgagctcccaagctcgccgcaatgatagggaccagggctgtcgaatatcatcagggccagcggtcctatgccgcaccaaaggccggacatatgaccgcagccgaccaaagcgatcagaccgtcgaaaacccgcttgccaagaggccgtccacata

SEQ ID NO: 535 - DNA, 1410 bp, unidentified
  source 1..1410: mol_type = unassigned DNA; note = element_05113fc
  misc_feature 1: note = core
  misc_feature 2..62: note = LE
  misc_feature 63..1097: note = CDS
  misc_feature 1098..1410: note = RE
  misc_feature 1177..1401: note = bridgeRNA
taatgagatggtccgccgccgagtagcataactcgacagtttcaatctggaggatcatcgtcatgcacatcgcatccatcggcatcgatctggggaaaaccacatttcacctggttgcattgggagaacacagcaaggttctcgttcgcaagaagttttcacgtacgcaagtgctggcctatacagcgaatctgccttgctcactgatcggtctggaggcgtgttccggagcgcactttctgggagccgctctacgacaacaaggtcacgaagtgcggctcatcccagcccagttcgtaaaaccttaccggaagtcgaacaaaaacgacttcctcgatgcagaagcaatcgccgaagccgtgaccaaacagaatatgcgctttgtgccgatcaagacgcaggagcagctcgacgtgcaagccatgcaccgagttcgggaccgactggtgcaacgtcgcacggcactgataaacgagatccgtggttttttgttggagcgcggcatcacctttcccgcacagccaactcacctgcgcaagaacctccctagcgttgtggaagacgccgagcagaacctaacccctcgtctgcgctggctactggatcggctgtggcaggagtggaaacagacagagatcgacatcgagaccgtcacggacgagattgagcgcattagcaaccaagatgagcgctgccaacgtctacgccagattcccggctttggccctctggtttccaccgccatggtagccgccatcggcaacggggcggcgtttcgccgagggcgggatttcgcggcctggattggcgtcgtgcctcgacagtactccaccggaggtaaacagaagctgttgggcatgagcaaacgcggcaatatctatctgcgtcgcatgctgatccacggtgcccgcgctgtactctttcgcatcaagtacgacactgcggggctgggacagtgggtgcaccggctgagtcaacgagctccccgcaacaaagtggttgtcgccatcgccaacaaactagcccgcatcgcctgggctgtattgtccagcggcaaagactatcgacatcagcctctgcaacgtgcgacagcttaatggccgtggaaaagacgctgtgcttggaaagcacagaacgctttccacttttccaccgccacgacgacgggcttcatagacttccaaaggtctgctgaggagagaagaaagacgaaacaacgtccaacggcgtgccggaaaacctggacactcaaatgcgtccctagggaccgaggggtttaataggaccgacacgtgcggatcatcatcgcgtgcccggagaagttattctccactaaaaggccggatacatttacgcggactgagcttcgtccaacttcaaacctcttgcagttcggtggcggaccataca

SEQ ID NO: 536 - DNA, 1537 bp, unidentified
  source 1..1537: mol_type = unassigned DNA; note = element_051497f
  misc_feature 1..2: note = core
  misc_feature 3..241: note = LE
  misc_feature 242..1432: note = CDS
  misc_feature 1433..1537: note = RE
  misc_feature 3..218: note = bridgeRNA
cttgtattatagagtagtagttattaaagcccctctccaagggctgtgctacactgtaagggatgctgtggatcggtgtaatccccctaccacaagatggttcaagaaaggttccaaccacagccccttacaattttgttgatcagttaaataccgccagacggtttatgtggaacaaggctacaaaagtaaggagcactgtggatgcagcatcacatatttttcgttggaggtataggttatggtggtttctgttggtatcgatgtttcaaaggataagcacgactgcttcattgtcagttccgagggtgaagtcctggcggatgcgttcataatttccaataccttggacgggttccacgacctgttgcagcgaatccaggaatgtaccgcacctcaggacaaaataaaagtagggcttgaggcaaccgggcattacagctacaatctgctcgggtttcttcttgacaacggtctggccacctatgtcctgaaccccttgcgcacaaacctttaccgaaaaagcctcagtctgcgaaagaccaagaccgaccgggtggatgcacgaacgattgcttctatgctgttatccgatgcgggcctcaaaccctacacagatacagcataccacaacgaggaattaaagtcactgaccagataccggtttgacaaggtgaaagaacgtgccaagctgaaaagctctattgcacggctggtctgcattctgtttccggaattggaaaaactcgttccttctctgcatatcgcttctgtatacgccctgctggaggagtttcccggcgccaaacagattgccgcaacccatttaacgaggctgaaagcactgctcgaaaccgcctccaatggtcactacaaacgggatatggctcttgagatccgggatgccgccagaaactctattggctcctggatgcccgccaagtcccttgaattacagcacaccatccggctcatccgtgaactggatgtcgagattgctgagattgaggaacaaatccagtccattatggatgagctgcattctcccattaccaccatccccggggtggggttccgcatggctgctatgatcttagccgaagtgggtgacttcacccgctttgactccccagacaagctgttggcttatgcagggatgtcccccctcaacttaccaatccggacagctcaaaaattgttacccgcacatggaaaagcgtggttcccgatacttacgctacgcactttacaacgcagccaagtatgtctgtcactgggatccgacttttgccgcttatcttgccaagaaacgggcggaaggcaagcattacaatgttgccatttcccatgcagtcaaaaagctggttcggctgatatttgctatggaaaaatccggagtgccgtacctcttggctgcctaacgtctttctaatagccaataggggcctgctcgggcctctgctttgctataccctttttgtaccatcttctttttcaccgccactcattttttaggggttgacttttaatagttaat

SEQ ID NO: 537 - DNA, 1390 bp, unidentified
  source 1..1390: mol_type = unassigned DNA; note = element_051c786
  misc_feature 1: note = core
  misc_feature 2..95: note = LE
  misc_feature 96..1127: note = CDS
  misc_feature 1128..1390: note = RE
  misc_feature 1171..1387: note = bridgeRNA
taatgtaatgaaccatccccgcctctgctaggcatttgcattctcgctacctagcactcaagttgaaagtctttgacccgggaatggagaatgacatgacagttagtgtactaggtatcgacatcgcaaaaaacacgtttcaacttcacggcgcggacagtgccggtaattcggttcttaggaaacgtcttccgagaaacaagcttgctgcctttgtggccaatctacctcaatgcaaggttgttatggaatcctgtggcagtgcaaactattgggcaagagttttccaaagtagtggtcatacagttaagttgatcagcccacagtttgtaaaaccctttgtaaaaaccaataaaaatgacgcgaatgacgcccaagcgatagtggaagcagcaagtagaccttcgatgcattttgtacccatcaagggaatcgagcaacaagatattcaatcgattcaccgagtccgaagtcgaatagtgaagaatagaacagcattgattaacgaaatcagggggctatgtttagagtatggaatcatagtttcaccaggggcgacaaaagttaaacggtcactgtgcttaatcattactagtgacacgaaccaactcactcaatcatctcgagaatgcatgagagatctttatgatgagttgattgagaatgaagctagattgaagaaactggataagaagatccggcaaatatgtctaaaaaatgagacctgttatcgcctactaaaaataccaggagttggtgaactgacggcatcggctatcgttgcagcagtacccaatgcgaatgaattcaaaaatggccgccatatgtcagcctggttagggctggtacccaggcaatcatccagcggcgataagcaggtcttgctagggattagtaagcgaggtgacaggtatttgcggaccttgttgatacatggagcaagagcggcattaagccactacaaaaaagtagacacggtctatgggcgttggctaagtcaaagaaaggcgacgctcagctttaataaagccgctgtagcactggccaacaagaatgcccggatcatatggtctttgctccatagtggcgaagaatttgatagtaatgttcaactggctgctgcctgatactcaatatctggccgcttatttaaaccgaatggaaatatcccaagtttgctgtagttgatatcaatgatggctaataggtcaaaccaactcttctaaaacctgtaacttgtcacggctctatgaagccatggtattgatgaggaagaagagcgcgaatttacatcagggcacaagctttgcttggaagccgaatatatgaccgcaacttagacgtatggctatagttgaaaatcgacttgcaaaaggggatggttcatata

SEQ ID NO: 538 - DNA, 1413 bp, unidentified
  source 1..1413: mol_type = unassigned DNA; note = element_052bc59
  misc_feature 1..2: note = core
  misc_feature 3..96: note = LE
  misc_feature 97..1113: note = CDS
  misc_feature 1114..1413: note = RE
  misc_feature 1171..1412: note = bridgeRNA
ataatggtatggacccactccaccttacaaccggcctcgtaatgggccaaaatggagattcaagcaaccatttaacaaaagcggagcggatccaacatgaagattacaacagtcggcctggatatagcaaaatcagcctttcatctatacgcggtcaataagatggggagatacatgaaaaagaagcagctaaagcgcaagcaagtactgccgtatcttgcccggctcgagccctgtgtgattgcgatggaagcctgtggcggcgcgaactattgggcaagggaaatgaaggatttgggtcatgaggtgaggctcattgcacctcaatacgttaagccctatgtcaaagggaacaagaatgactacaacgatgccgaggccatagccgaagcggcccagcgcccaacgatgcgttttgtcccaatcaagtccgttgagcaacaggatatacagaatcttcatcgtcagcgtgaacgcatcaaaaaagcgcgtaccgcgctggtgaatcaggttcgggggttactagcagaatacggtattgtcatcaacaaaggggttgctgctgtgcgcaaagggctgcccggcattcttgaagatgcagaaaatggcttgacgatgcgcggcagggagttattcgctgatttgcttgaagaattgcgcgtgcttgatgagcgattcaaacaaagcgagaaacaaatagaaatcagcaaccggggaaacgaagtctgccagcgtttagacgagatattgggtgttgggccgatcacagcaagtgccgcttacgcagccgccggtgatggcaaggattttgttaatgggcgtcatttctcagcgtggataggcctggttcccggccaacattcgaccggcggcaaatccaccttgctggggattagcaagcgaggcaatgcgtatctacgaacgctgtttatccacggtgcacgagcggtgctacggcattcggcgaataagacggatcgctttagcctgtgggcgcaagccctgttagaacgcagaggccataacaaggcttgcgttgctgtggccaataaaatggcccgaatggcatgggtgatcatggcaaaaggtgaaccctatcgtgcagcgacatgagcgaaattaatataaatgactgaagcggaacctggcttcaatcaacagagcaagagaaaccctttacttcagttgcaaaagataaattgatcggatggtgagataggtcagaccggttcattcaaaacctgacacctgcattggccacatacaggccggagggatgatgaggaggatgagcgcaaataaccatcggggccaggaaggagcaaacttccacaaacaggccggatatatgagagcaatgatttcctctcacatcaatgatcaattatcttgcaaaccggagtgggtccatat

SEQ ID NO: 539 - DNA, 1499 bp, unidentified
  source 1..1499: mol_type = unassigned DNA; note = element_052c4e3
  misc_feature 1..2: note = core
  misc_feature 3..243: note = LE
  misc_feature 244..1479: note = CDS
  misc_feature 1480..1499: note = RE
  misc_feature 15..239: note = bridgeRNA
ctaatgagtcttagggagcgcgccgtctggcagactccgggtgtggtggccgccggcaggtgagcacttcaggctcctgggctttgagccctgatgagagatagtgcccctgccggtgaccgggagagttgatcgctgctgggatgtcgtgcccgcctgctggcgtgagcacagtttcattaggtcgctgatagttctcccgcaggctgctgaccagattcgatgtcctggacgggagaaacggtgcggctgttcgtaggggatgactgggctgaggaccatcacgacgtcgagctgatggacgccgcgggccgggtgctggcgaaaagacggctgcccgagggcgctgcggggatggcccggctgcacgagctggtcgggcagcagctgggcgaggacgcggacgatgcggaggtggtgatcgggatcgagaccgaccgcggcccgtgggtggccgcgctggtcgcggccgggtacacggtgttcgcggtgaacccgctgcaggcctcgcggtaccgggagcggcacggcgtgtccggggccaagagcgacggcgccgacgcgcacatgctgaccgacatggtgcgcaccgattcccatcagctccgggcggtggcgggcgacagcgcggacgcggagggcatcaaggtgctggcccgcacccataagacgctgatctgggaacgcacccggcacatccagcggctgcggcaccagctgcgcgagtacttccccgccgcgctggaggccttcgaggacctggcggcggctgacaccctggagctgctgggcaaggccccggacccggcccgggcacggaagctgacccgtgcgcaggtcagcgccgcgctcaagcgcgcccgccgccgcgacatcgccggcaagacgacggcggtcctggccgcgctgcgcggcgagcagctgggccagccgccggccgtcaccgccgcctacacggtcaccgtccggtccctgatcgcggtgatcaccgtcctgaacgagcaggtcaaggccctgcaagggcaggtggaggaaaattttggccggcacccggacgctgagatctaccggtcccagcccggcatgggcgccatcctcggcgcccgggtgctcggcgaattcggcgacgacccgcaccggtacgccgacggcaaggcccgcaagaactacgccgccaccagccccatcacccgcgcctcgggcaagaagaaggtcgtcgccgcccggtacatccacaacgaccggctcgtcgatgccctcaacgcccaggccttcgcgtccctgaacgcctcgcccggcgcccgcgccctctacgacgagctccgcgcccgcggcatcgagcacaacgacgccctgcgacggctcgcgaaccggctcgtcggcatcctgcacggatgcctcaagacacgcaccctttatgacgaggcaaccgcctggtcgcaccgggaaaacctccctcaatcttccgtcgcggcttgacatttaagctcctgggatgt

SEQ ID NO: 540 - DNA, 1360 bp, unidentified
  source 1..1360: mol_type = unassigned DNA; note = element_05308da
  misc_feature 1: note = core
  misc_feature 2..65: note = LE
  misc_feature 66..1118: note = CDS
  misc_feature 1119..1360: note = RE
  misc_feature 1128..1354: note = bridgeRNA
taatgggatggtccgccccgtcctcctcgctcatcatgaggcggccaaaccaaaggaggaagcaaatggctcatcgcaatctgccgcggccggccgcggtctatggcattgatatcggcaagaatatcttccacgtggttggtctgagccgcgatggtacacccgttcagcgggtgcgctttcgacgcgacacccttctccagttctttgctcgcgcagatccgagcatagtcggcatggaatcctgtgccgggtcgcagtggcttgcccgcaagatacaggcgctcggccacaaggtccgtctgatccccgcgcactttgtgaagccctacgtcaagtcgaacaaaaacgacatcatcgacgctgaagcgatcgccgaggcgacgacgcggccgacaatgcgcttcgtcacggcgaaggcaaccgatcaggtcgacctccaggcgctgcatcggatccgcgatcagatggtcggctccaggacgcgcttgatcaatcagatgcgcgccttctgcctggaatatggcgtccctttgcggcagggagcggggttgttcaaagttgatctaccaacggctttgaatgatccggagaatgatttgtcaccggcaatgcgtcggctgctgggcgatttacacgccgatctcctgcgcctcgaagagcgcatccgccaagtcaccaaggagatcgaagcgatagccgatcgcgaagacgttgcgcgccggttgatgacgatcccggggatcggcgcgttgggcgcgaccgcattgctggccgccatcggcgatgggcagcagttccgcaaagctcgcgatctagcggcgtggctgggattggtgcccagacaatactcgaccggaggaaagcaaacgctgctggggatcagcaagcgcggcaatcgatatgtccggaagcttctggtgcacggcgcacggtcgtgtttccgacatctcgacccgacgcgcgatcggctggggagttggctcgacggccttgaggcgcggatgcatcccaacaaagccgtcgttgcactggcggccaagatggcacgcatcgtctgggccgttctgaccaagccgggcgcactctacgaacgcagggatcctgctttcgcttgacgctctgagctcgactgcaaggctcgggacgagtgatgacgaaacagtggatcagcatgccgtaaaccctgcgcaaaaaagcgggcttcgtgcccgaaccatttattgggaacggcgtgcgcggatctcatcatggcctggctgcaaccgcagtccactcgcgagaggccggatacatttacgcaactggaaacgtcatctacggcgtcgcgaccccttgcacggacggcgcggaccataca

SEQ ID NO: 541 - DNA, 1290 bp, unidentified
  source 1..1290: mol_type = unassigned DNA; note = element_053725d
  misc_feature 1..2: note = core
  misc_feature 3..240: note = LE
  misc_feature 241..1278: note = CDS
  misc_feature 1279..1290: note = RE
  misc_feature 17..243: note = bridgeRNA
ctgacttgtctaatcggtgcaggcgctcgggttcgcgactcgtagcgttcagggcgccgactggcacaggttcgcaggctccttgccgccctcgaggctggctcattgatagcgtgccccgccggtcggcgcccgccgtggtgtggctcgacagaggcatgaactggcatggcgtgactccaagtcagggtgcccaccgcggcgatctccccgccgccgagcctccggagctccccagctgtgatcacgatcgggatcgacccgcacaagtcctcgctgaccgccgtcgccctcgaccacaccggccaccaactgggcgcacgccggttcccgctcaacgccggcaccctgcgcgccctgctcggctgggccgtcggctggccccagcggcagatcgccgtcgagggcgcgcacggcctcggccgcggcatcgcccagcagctcaccgccaccggcgagcacgtgctcgacgtcccggccaccctggccgcccgcgtccggctgctgaccaccggtggcggccgcaaggccgacacccacgacgcgcacgcggtggcccaggtcgcccagcatcagcagcagaggctgcgcgtcgtggtcgccgaggaccagacggtcatcctgcggctgttgtccgagcgccgcgacgacctcaccgccgaacgcacccggctgctcaaccggctccaccagctgctgcgcgagctgatccccggcggcgcggacctgcacctgacggcggataaggccgcggcgctgctgcgcggggtccggccggccaccgcgaccgacgcctgccggcgtgacctggctcgtgatctgctggccgacctgcgtcggctggaccgccggctcgccgacaacgaaacccagctgcgcgacgcgctcgccgcgacccgcagcggcctacccgagatccacggcctcagcgtcatcaccgccgcgaaaatcctcggcctcgtcggcgacgtcacccggttccccagcagcggccacttcgccagctacagcggcaccgccccgctggacgcctccagcggtcaacgcgtccggcaccgcctcaacaccggcggcaaccgccagctcaacgccaccctgcacaccatcgccgtctgccaggcccgcgaccccggccctggacggatctactacctgcgcaaactcgccgagaacaagaccccgaacgaagcccgccgcgccctgaaacgacgcctcgccaacgtgatctaccgccagctcctccaagatcaacgccgatccgcatccccagcggcttgacacacagaggcg

SEQ ID NO: 542 - DNA, 1589 bp, unidentified
  source 1..1589: mol_type = unassigned DNA; note = element_05385b4
  misc_feature 1..2: note = core
  misc_feature 3..261: note = LE
  misc_feature 262..1458: note = CDS
  misc_feature 1459..1589: note = RE
  misc_feature 27..281: note = bridgeRNA
ttggtacgttataagtgcagtaaataatcttgtataagattagaagactagcgcttatttttattataataagagagtaattggtttacgaaggtcttttaggaattcgcttccgaaaaataaactgttaaccatctcttattatagatattcgattaagcaggttgaaaccaattagatggctttcgtgtaactaaccaaaatgaatagtaataagtgagatgggtacaattattaactttaagggtgaggataatgaatatgataagtattggaatagacgtatcaaaaggaaagagtatggtttgtattatgaaaccatatggagaagttattagaatgccttatgaaataaaacatactaaaaaggatttatctgatttagcaagtatgattatggcttttgatgaagaaagtagagttgttcttgaagctactggagcgtatcatttaccagtgttaaattatttaaaacagaaaaatatctttgtagcagtaatcaatccattgataatgaaaaaatatgcaagtattgctattagaaaagggaaaacagataaaattgattctataaagattgctaattatggactagataattggtttcatcttaataattatagtgcatcagatgaattgtatgaggaattagatatgctttgcagacaatacaaccaatatgttagtataaaagttaaatgtaaggttaatctggtgaatttattagataaaacaatgcctggaattactaccttattgagaaaccatgattatattggaaagtataagctgaattcatttgtgaaagaatattggcattatgataatataactaaaaaaagcgagaaacaatttatagcgagttatttaaaatgggctaaaagagaagggtaccatgcaaacgaagataaaggtaagagtatatatgcgttagcacaggagagtataacaactcttaatcctaaaatgaaatctacaaaaatgttagtaactgaagcaatccgagtgtttcaagaggtagaaaaaactgtaagaatgattttattgcagatgcaggaattagcaaaaaaattagatgaatataatatagttagagagatgcaaggggtaggagatgtattagcacctagattaatagcttctattggagatataagacgatttcataatgcgaaagctctaatagcttatgcaggaatagatactccaccatatgagtcgggtaattttaaaggaacaaagcaaagaatatcaaaacgagggtctgcatatttaagaaaaacaggatatgaaataatggcttcattaaaggctataaaaccaagcgtagattcggttgtatatgactatattttaaagaaagaatcagaaggtaaagctaaaaaagtagctaaaatagcaggtttgaataagtttttaagaatttattatgcaagggtaaaagaagtatatagttaaaataaaaaaataatatcaataaaaagagccacttcaaatttttaagaatgaaatggcttatttgttatgtaaatttttattgaaataagaggcaaaaaaattgctgaaaagtattgactttgcttagcagg

SEQ ID NO: 543 - DNA, 1365 bp, unidentified
  source 1..1365: mol_type = unassigned DNA; note = element_0539635
  misc_feature 1..2: note = core
  misc_feature 3..75: note = LE
  misc_feature 76..1098: note = CDS
  misc_feature 1099..1365: note = RE
  misc_feature 1077..1352: note = bridgeRNA
tgatggggtggacgccccccaacggcatcgatgtgccaaagtggaggtgttgaacaccacttgagggaggcgtccatgaaaaaagttagcaccattggattggatttggcgaagaatgtttttcaagcgcatggcgcggatgcgtcgggggccgtcattttccgcaagaaactgcggcgagcacaggtgctggaattctttgcaactcaaccggcgtgcaccgtagcgatggaggcttgcggagggtcgcatttctggggtcgggagatcggtaattacgggcatcgcgtgcggttgattccgccggcctatgtcaagccctttgtaaagcgccagaagaacgatgccgccgacgcagaggcgatctgcgaagccgcccagcgccccaccatgcgcttcgtagcggtcaagagtgaagcagcgcaaggcgcggcagttgtgttccgaacacgcgatatgctggtgcgccagcgtacgcagatcatcaacgctctacgtggtcatctcgccgagttcggcttgattgtcgctcaaggcccggcacacgtcgccaagctcattatggctgtgcaggatccaaagcagcctctcccggaagcggcgcgccccatcctttgcgtcttggttgatatgctggatttgctggatcaacgcataaagctcctggacatcgcaattgcgcggcgcgccaaagaagatgaagtagcgcgtcgccttatgagcatccccggggtgggtccagtgatcgcgacggctgtggcagcgctggcgccgccggctgaaacgttcaaacgaggtcgcgactttgcggcttggctcgggctcacgccattgcaacattccaccggaggaaaacaacgcctcggcgcgacgtcgaagatgggagagcggacgctgcgacgtctgctcatcatcggcgcgagctcggtggtgcgttgggccgcgcgaaaaggagcgcccgcgggctcgtggcttgcgagcatgatcgcacgcaagccagcgatgctggtgagagttgcattggctaacaaaatggcccgcgtcatttgggcgttgatggccaaaggagggacttaccgagctccggtcgtggcgtaaacttgctcacgatcgtggggctgtcggaggcgtaggaggtcaaacggaaagtatggcgcaataatcggtgagatgggatcgggaaaaccagtttgcgacggagtgtttaaaagcacgcggttctgatttggacccgatccgcgaactcccatacgggcccgcggcgtgtgaaccgctgcattcgtgaggccggacacatgtcagcacccgactacgcgccatagccatccagaagatttttcttgcgccgaagcgggcgtccacaca

SEQ ID NO: 544 - DNA, 1818 bp, unidentified
  source 1..1818: mol_type = unassigned DNA; note = element_0540497
  misc_feature 1..3: note = core
  misc_feature 4..239: note = LE
  misc_feature 240..1454: note = CDS
  misc_feature 1455..1818: note = RE
tcttatacgttaagatatatccagccctcggtgtgagggtggcagcaagtcagcttgctgcgaaccaatcgcccggagaagcctattcctttcactcggctcgaccgacctaagcagatcgtgctctccgggcgacactcctgggtacaatcgaccattagagggttgtttcgcttcgagcgccacagtataagaactcgtgtcacccaggactgctcacggaagggagggacacagccatgtggtatgctggtattgactgggccgacaaccatcatgatgcggtcgtgctggatgacggcgggcgtgtcgtgctgacgctgcgcatcgcccacacaccggccggtctggcccaactgaccaccgccttggcacagatttgtgggccgactgccaaggcgcagctggcctgcttcgtggaaaccaatcacgggctgctgattactgccttgctctctgccggcttggcggtctatcccgtgaaccccaagacggtggatcgtcgacggaacgccgcgggggtcaaaaccgatcagatcgacgcctatctgctggccaaaaccgggcggagtgacttggccgatttgcgtcgcctgacccccgatagtccgctgatccaggaactcaaggccttgacgcgcgatcaggacagcctgattcagagccagacccggctgctcaatcaactcagcgcctgtctcaagacctattatccgatcgctttggagttgttcagcaagctgcaccagaggtcgaccatcgctttcttgcgggcctatcccacgccccaggatgccagggcggcctcgatcgaggcgattgcagccatcctcaaagcggctggccatacccgcgccgagcaggcggccgcgaccatccatcagcagctgcaccagccccacttggtggccgatgccatcacgagtcgcaccaaagcgcggttgctgctggcactgctggctcaattgcagccggtcatggagcagattgccgagtacgatcgggagattgagcgcctttttttgagccacgccgacagcgcgctgtttgcgagcttgccacgcgccggcaagcggctggccccgcggctgttggcggaaatcggcgatgagcggacccgctatgccgatgcggctggtctgcaagccctggctggcacggcgccggtctgctttgagagcggcaattacgccaaagcgcatcggcgctacgcctgcctcaagccgttgcgcaacgccatgcagcagtttgcctggcaatcgaccttgcaggaaggctgggcgctggcctattaccagcgcaagcgctccgaaggcaaaagccacacggtcgcgatccgcgcgttggcaaatgtctggctgcggattatttatgcgatgtggcgcgatcacacgccctacgtgagcgcgacctttgaggcggcacagcagcacaagctgcgcaaggccgcctaagcgtaagcgcaggcagcgtgcgcctggcggtctgacggggccgcccaagcggtccccaccagcggcgaccagaagtggtcggctggcatggagtgctgcctgacgttcgccgcgccccgcgaccgcgtccccttccggtgcgggatggccagtagccccacagcgagtcaaggccgcgcgggggccggtttgaaaaggtgcgcgcagcgcctccttccttcggcccaacgcgcgcttgcggtggccttgaccggtgtgggagaatcggtcggcccgcacgggaggcgcagcttcgtaccttgctcgattgtgacggcgatcaccggtcatgattttgtacactttgccctattgacatagaggg

SEQ ID NO: 545 - DNA, 1660 bp, unidentified
  source 1..1660: mol_type = unassigned DNA; note = element_054c5ea
  misc_feature 1..4: note = core
  misc_feature 5..296: note = LE
  misc_feature 297..1571: note = CDS
  misc_feature 1572..1660: note = RE
ttcataaaaatctccattccgccgccaagcggcggcacaaatagtaatgaaaatgtttcacagctcaactctatggcctaaaatagttttcaagaagctatactacaaagcacggggagaggagttgtaaaaactttctctgttttagacagcataaaaatcagtgtaagttctgccttttcaagcacaaataagtggtatcacgaatccgtacactaagaattgttaaagctctttgttttattgtgtggcagttcagtcaatggcttcttatcttttatgaaaggagctacactatgaaagttacttatccaacctgttgtggcgtcgatgttcacaaatcttttctcgttgccacaattatcaaaaccactggtagtattgaaccttcctatcaaaagaagagattttctaccttcaacaattctattctagaattcaaatcatggctgcttgaaaatgactgccatgatgtctgcatggaatccacaggtaaatactgggttcctgtctttaatcttctcgaagatcaaatcaatgttaccatcgctaaccccaaatgggtgaaagcagtgaaaggtaacaaggatgataccaaagattctaaatggattggagatttgttccgtcttggacttgtgaaaggcagttacattccttgcaagccgatccgcattctcagagaatacacaagatatcgttacaagcttgtttcttgccgttcaagtgaaaagaatagatatcagaatgctcttactgtttgtaatgtcgcattagattctgttgtatccgatatctttgggaagtcatccacatccattattgattatctgcttgaacaatcaggtactacgattaaccatgaagaaatcgcttctaaacttcttaggagcctcaaatccaaagaagacactgtgattgaatccatcgaaggatatcagatgactgattcccagaaataccgtatgcgcctagtccgcgcacatatggattatatcacagctgaaatcaatgatgttgataaacagattgattttttgatttcttctgatcctaattatgataaagctatccagttactaactaccattccgggtgtcaaacgtgatagtgcgattactatcatctccgaaattggtatcgatatgtctcagttttgtaattcaaaacgcctatgttgttgggctggccttacgcctggcaacaatgaatctgctggtaagaagaaatctgttcgcattacacgtgccggtgtctacctcaaacctgcattagtacagtgtgctcatgcagccgtgaaatccgacaagtctccctactacaagaagaaatatgaatccctcgttaaacgccgtggcaagaaaagagctattattgccattgcccgtatgattcttactgccatctaccagatgctgtctactggagaggtgtggaatccaagcgatctttacaaaatcgatatgcccgcacctttagttgaaaaacaaaaggctaaggctatcaagcaagctaagaaacttttacagaaagaaggtttactacctccagatgcacctttagcttcttgattaatctactaaatctatattcttaaacaagttacctaattcagacagcttatttaagtgcgcccgtttgtggctttcctctactttct

SEQ ID NO: 546 - DNA, 1204 bp, unidentified
  source 1..1204: mol_type = unassigned DNA; note = element_054f327
  misc_feature 1..2: note = core
  misc_feature 3..186: note = LE
  misc_feature 187..1170: note = CDS
  misc_feature 1171..1204: note = RE
  misc_feature 12..195: note = bridgeRNA
cttgtatctctaagtagtaaatgactagctatcatttattactcgaaaactagtgagcctgtaccttcgccaagtaaagatgactgagatgtagataaagccctagttttcaactctcaacaaactgaatggtatccaagcacgcttattgaagtcgatgctgtatgtgcaaggggagtcgtagagatgatatttgcaggttttgatattagtaaagaaaaagtagatctatgttgcttattggactcaagcaatacgaaagtaaaaaccaaggtgtttcgaaataatcttcaatcttttcaggatattgctaactggttgttaaagacgacccaatcagttccagcgaatatcaccatcacgatggaaccaacaggggtttatcatgagccgctgatccattttctatataaacaaggctttactattttgcttgttaatccgggcaaggcaaaaaagtttgcagagtcaatgaatctagttcataaaaccgataaatccgatgccattatgcttgccaggtatggagaatcaaaacatgcgaatagcatgtattggcaaccagtaaacgctcaagttagggagctgcaagcccttattcgcagacttgacgcactagagtcgaatcgacaaagagaagtgaacagattggaagcatctgaatttagtgaaggctctgaatatgttacgcagtcgattaaaaatacaatccatttctttgacgaccaaattaaggcaactaaatcatttatagatgccttaatagctcagtatccggagttgaagcgaaaccaagcgctattagaaagcattccaggaatcggtcctgtgctatcgcgagagttgactagcctatttgccgcaaagcaatttaaaacagcaaaacaggtggctgcttactgtggtttaatcccgaagctaaaagaatcaggggctatgaaagggcgaactacgttaagcaaacttgggccgtctcgaataagatgtaaactctacatggctgctattgttgctggtcaacataatgcactgattaagaagcaaaaaggaaacttgaagaagaatggcaaaacatccatgcagattattggggcaaatatgcgaaagctaatacagatctgttttggtgtagtcaaaaatcaaactgagtttaagcatcaagaaagctaaaaatactcttgatgcttaaaaatagagatggtat

SEQ ID NO: 547 - DNA, 1224 bp, unidentified
  source 1..1224: mol_type = unassigned DNA; note = element_055a497
  misc_feature 1..3: note = core
  misc_feature 4..226: note = LE
  misc_feature 227..1189: note = CDS
  misc_feature 1190..1224: note = RE
  misc_feature 39..199: note = bridgeRNA
gttgtataattaaaatattttttgtatctttgcacccgatttacatctaaggtatggattaagaccgattcgcgggtggtgataaacaccgttattaacgttctgtccccatactttatacatcttaaaactggatagttcattgggcttttgaccccgtattcgcaacgatagtgttcagatgtacagatgtttaatcgcgcacaaatttttattattaatagttatgacctacattggaattgacgtaagcaaggattcgtttgtagcagcttatccgactaagagtggttataccaccaagacattccctaacaccactagtggtgtgcgaaagttcattaactcgctaccagcggattgccattgtgtattggaagcaaccggcaactacagcatgcttcttctctatctgcttcaacaggctaatattattgttagcatggagaacccgcagaagattaagcattttgcacgtgctatgctatccactactaagacagacgagattgatgcaaaattgattgctacgtatggcgagaagatgactcctgtaccctacaagattccctcggaaagtattattatgcttaagcagaaacgtactgttcttaggcaacttaagaagcaacttactgctacgatcaatcttcaacaatcgttagctgttttgccaaagcaagatcctgcaagtaaagtagccatagagcgcactgttaagttcttgcgcaaacagatctctaaaatggaagaggagattactaatctttccaataaagagtttggacgtcaagttaaactgctaacctctattaaaggtattagcgttactatcgcgtctgcgctcatcttagctaccggaggatttacctactttagcaatgccaagcaaatatcccgattcctcggtctttgccctacttaccaacaatccggtacgtcagtcaatttcaaaggtcacattaatcgcaatggtgatacacatttgcgcagtcaaatgtatgtcgctgctttcgcatctattagatgtaatactgcttgcagagaaacttacgaacgtctgcgtgcgagaggtaaatctggaaaactagccgttgtcgctgtcgctaacaaacttatccgtcaagcgttcgctgttgtcactaacaatcaaccctatatagatggatttgtatcatcttatgcgtaaaagttaatttttttactaaatttttattatagttc

SEQ ID NO: 548 - DNA, 1505 bp, unidentified
  source 1..1505: mol_type = unassigned DNA; note = element_056c365
  misc_feature 1..4: note = core
  misc_feature 5..238: note = LE
  misc_feature 239..1489: note = CDS
  misc_feature 1490..1505: note = RE
gtcactagggcaccatccttattgcgggtacctctacggtgctcgttgctgggactcggcgggagccggggtgacggcctgtgctggtcgcccgtgaagggcctgcatgacaccgccgcccccggtttctccggggacacggactggcaacagggagacgcgccgcagagcgccggttagtgaccgcccggcagctgtcctcctcgccgggtcgtcgctgccatcttgaggagccgggttgtcgcttgcgctgcctgaagcgctgttcttcgccgggatcgactgggccgctgagacccatgccgtgtgcgtgatggacgccgcggggaagatcgcagccgagttcacgatcgggcattccgcggacgggatcgccacgctgatccgccggctggcccgctacggagaccccggcgatctgccggtggccatcgagcgcccggatggccgcctggcggacctcctgctggaggccgggcacccggtggtgccggtcaggccgcacgcgatcaggacctggcgggacggcgaggtgctctcgggcgcgaaatccgacgcccgcgacgccgcggtgatcgccgggtacctgcggctgcgcgcgcacaagctgcgggtcgctgcgccctgctctgatgagacccgggcgctgcgcaccgtcgtgcgcacccgcggcgacctggtggagatgcgggtcgcggccaccagccagctgccggcgctgctggacgcgcactggcccggtgccagggccatcttcgccggcgtcgagtcgccggtcagcctggagttcctcacccgctacccggccccggccgctgccgcgcacccgggtgagaagcggatggccgcgttctgcgtcaagcacggctactctggctgccgcaccgccgccgggctgcccgcccggctgcgctccgcgccggcgggcaccggccgcgaggcgctcaccgaggcgctgcgtgacgccgtgctcgccgcggccggcgtgctcatagccttgaacgcctcggtgaagaacctcgaccgctccatcgccgcccacctcggggagcacccggacggcgcgatcttcacgtcgctgcccaggtcgggtcaggtcaacgctgcccgggtgctcgccgagcggggcgatgcccggcaagcctgcgggcaccccggctccgtcgccgccctcgccggctgcacccccgtcaccagggagtccggcaagcaccgggccgtgcacttccgctgggcctgcagcaagcggttccgtgtcgcgatcaccaccttcgccgacaacagccggcacgccagcccccgggccgcgaagatctgcaacgatgcccgcgccagcggcaaggaccatccgcacgccacccgcgtactcgcccgcgcccggatccgcgtcatctaccgctgctggctcgacggcgtaccctgcgaccccgccgcgcacggaaccgccgccgcgctcgccaggcaaactaccgagcgaatcgcggcctgaggttgacacagggagt

SEQ ID NO: 549 - DNA, 1499 bp, unidentified
  source 1..1499: mol_type = unassigned DNA; note = element_056e2db
  misc_feature 1..2: note = core
  misc_feature 3..243: note = LE
  misc_feature 244..1479: note = CDS
  misc_feature 1480..1499: note = RE
  misc_feature 35..225: note = bridgeRNA
ctaatgagtgttagcgggtccgctgttacggcagactcggatgtggtggccgccggcaggtgagcactctgggctcctgggctttgagccctggtgagagaccgtgcccctgccggtgaccgggagagctgatcgctgctgggatgtcgtgccctccggatggggtgagcacagtttcattaggtcgctgattgttctcccgcaggctgctgccatttttcgatatcttggacgggagagcggatgcggctgttcgcgggcgatgactgggctgaggaccatcacgacgtggagctggtggatcaggccgggaaggtgctggcgaagcgtcggctgcccgagggcgtggcggggatggcccggctgcacgagctggtcgggcagcagctgggcgaggacgccgaaggggcggaggtgatgatcgggatcgagaccgaccacggcccgtgggtcgcggcgctggtcgcggccgggtatgtggtgttcggggtgaacccgctgcaggcgtcgcggtaccgggagcggcacggcgtgtccggggccaagagcgacagcggcgacgcgcacatgctcgctgacatggtgcgcactgactcccaccagctgcgggcggtggcgggcgacagcgcggaggccggcggcgtccgggtgctggcgcgcacgcacaagacgctgatctgggagcggacccggcaggtgcagcggctgcggcaccagctgctggagtacttccccgccacgctggaggccttcggcgacctggacgccgccgacgccctggagctgctgggcaaggcccctgacccggcccgggccgccaggctgacccgcgcgcaggtcagcgcggcgctcaagcgcgcccgccgccggaacatcacggacaagacgacggcgatcctggccgcgctgcgcggcgggcacctgggccagccgccggccgtcaccgccgcctacgccgtcaccgtacggtccctgatcgcggtgatcaccaccctgaacgagcaggtcaggatcctgcagggtcaggtggaggaggattttggccggcacccggacgctgagatctaccggtcccagcccggcatgggcgcggttctcggcgcccgggtgctcggcgagttcggcgacgatcccggcaggtacgccgacggcaagtgcaggcggaactacgccgggaccagcccgctcacccgcgcgtcgggaaagaagaaggtcgtcgccgcccgcttcatccacaacgaccgcctcgtggacgcgctcaacgcccgggccttcgccgccctgaccgcctcgccgggcgcacgcaccctctacgacgagctccgcgcccgcggaatcgagcacaacgacgcactccgccggctcgccaaccgcctcgtcggcgtcctgcacggatgcctcaagacccgcaccctctacgacgaggcaaccgcctggtcccaccggcaaaacctccctcaatcttcggtagcggcttgacacctaagcccctgggatgt

SEQ ID NO: 550 - DNA, 1497 bp, unidentified
  source 1..1497: mol_type = unassigned DNA; note = element_056e914
  misc_feature 1: note = core
  misc_feature 2..246: note = LE
  misc_feature 247..1302: note = CDS
  misc_feature 1303..1497: note = RE
  misc_feature 32..241: note = bridgeRNA
cagtgaggatggtgtgggccgtcgtgttggatggccttgtgtgtgatccgtcgcggtcatgacccgtttccgacctgactgtggtgtcttgcattggatctgtctggcctcggcggtgcacgcaccggcggtcggcgtgacctaataggagcttgttgaaggcctcgtcactgtcttgtccgaccggccggcggtgggtgtcatctctaaccgtttcgggttgttggaagggtggcgagacttacgatgccaaacgcgcagacggaatccaagccgtcgtcaaggattgtggtgggcggggtcgatactcacgccgacacccatactgtcgcggttgttgatcaggtggggcgtcggctgggatgtgcggtgttcccggccagtcgggccggctaccgcgctttgaccggctggttggccgggcatggtgagatttatgcggtcggagtcgaaggcaccggcagctatggcgctgggctgacccgctggttgaccgcgcaccaggttcgggtggtggaggtgaaccggccgaaccgggccgaacggcgccgtcgcggcaagtctgatccggttgatgctgagcatgccgcggcagcggtgttggccaataccgcgaccaccatcccgaaggccagaaccgggctggtggaatcgttgcggctgattcatgccacccgggccggtgcggtgaaggcccgcaccgctgcccggaacagcttcatcaacacgctccggagcagccctgatgcggtccgggaggcgctgcagccgctcagccgggctcggcagcttaaggcggcggctggctaccggccgcagggcgacgatccggtcgctacggtgaaacggtgcctgcgccggctcgcggtccgcatcaccgagttgaccgccgagatcaccgccgccgaccgcgatttggaccggttgactcagctgctcgcccccagcatgcgcagccggccggggttcggccccgaaaccaccgcgcagcttttgatcaccgctggggacaatcccgagcggatcggctccgaagccgcgctcgccgggctgtgcggagtcagccctgtgcaggcttcctcgggtcggacccgttaccaccgcctcaaccgcggcggggaccggcaagccaatcgggcgctgcacatgatcatcctcaaccggctccggcatcatcaaccgacccgcgcttacctggccgtgcacagccgtgacggtcgagccaccccgcacctgcgtcgagtgctgaagcgctacctggtgcgcgaggtctaccagctacttagccagctgcagccctaaccacccgccgccgcgccggcaccaaggggcaggcaccgcgccctgcccctgccccggcctgcccggggccgccgaggctccgaggtcaagggcggcccgcggggccgtcgcgcagcgatcgcacagcgacccttgaggacggagaaagcggccccataccatcaacggcgcggctcttgacatacataggagcat

SEQ ID NO: 551 - DNA, 1592 bp, unidentified
  source 1..1592: mol_type = unassigned DNA; note = element_0570fec
  misc_feature 1..2: note = core
  misc_feature 3..238: note = LE
  misc_feature 239..1462: note = CDS
  misc_feature 1463..1592: note = RE
  misc_feature 11..258: note = bridgeRNA
ttagtaccataaatagtgtaagaaaggaagtaattcctatcttgcactatttttgtataatgaagaagtagtatgacgaggctgttttagggttgaaacatccgccacaaaaactgtcaactaccttttcattattcatattcggttaagcaggttgggcaaaacgcccgtgtcacaagctaaaaagagtgtaatggtgcaggtagaaactacaaaataaaaagaaagaggaaaaaacatgatatctgtaggaatagacatatcaaaagaaaaaatcacagtttgtgcattaggacaaggaagcaaaataatctggaaaccttttgatgtttctctaaaaaaaacagaagtagaaaaatttttagagaaactagaaaaaataaaagaagaagtaaaaataacaatggaagcaacaggaaaatatcatctcccaatactttatgaattaaaagataaagactactttgtaacagtaataaatccattaaaaatgaaacaattctgtagagcattaaactttagaaaagcaaaaaacgacaagatagatgcaaaacaaatagcagaatatggactaatgtattggaaagaattagaagaatacaaaatagatgaagtgaactacagaatcctaaaagaattaaatagaagctaccaacattacatggagctaagaatcgaccaaatgaactacatagatcaaacaatgcatcaaacatttccaggcataaaaaaactaataccacataattcaggagacttttcaaaagacaaactattggactttctagaaaaatggtggcacaaagacctagtattagaaaaaacagaagaagaatttgtagaagaatataaaacttgggcaaaggaaaagagataccatccaaatgcaaacaaagcaaaaaccatttacaaaatagcagaggatagtatctcaacacaaccttctaataactcaaaactagaaacgaatatcagagaaggaataaacctgataaaacaaataaatcagattctaaatagaattttatcacaaatgatagaaatatccgagcccttagaagaatataaagaagcaaaaaaattctcaggcatatcagaaaaattagcagtacaaatagtagcagaatttggagacctatcaaaatttaaaaacaaaaaaagcctaatatcctttataggaatagacgcaccaccatatgaatcaggaaactttaaagcagatcaaagaaaaataagtaaaagaggaaacgcaatactaagaaaagtaggctaccaggcaatgaaatgtatgatgagtgctaaaaaaccagaaaatgaaatatataattacatgataaaaaaagaaaaagaaggaaaagccaaaaaagtatgtaaatttgcaggattaaacaaattcttaagaatctactatgtaagagtcattaactcaaaagccgagaaaaaagaattaaaagtagcataagatttgaaataacactaaaaagcaagccgattgattacactcggcttgtttgccatacgctaatttaattactcaaataatcaaataacctgaaataaatttcaggttatacttgacttttgttagcagg

SEQ ID NO: 552 - DNA, 1591 bp, unidentified
  source 1..1591: mol_type = unassigned DNA; note = element_0573458
  misc_feature 1..2: note = core
  misc_feature 3..269: note = LE
  misc_feature 270..1451: note = CDS
  misc_feature 1452..1591: note = RE
  misc_feature 22..242: note = bridgeRNA
cttgtatattgtttatgtaatcaggtaaatgtcctgatcaacactatctgttattcccacaaaccatgtgggataatggtctcgtacagttgagggcgtcgtttgcctccctgagatcttgtctcgtaatttagagtgacgcctcagctttatgggttggattcgtatgagctggatgggagacaagtcccgtatgtccaacaaggtagaattcccgtaaagtctgtggaactcctcactgtaacttttattgaaaggttggtgcaactatgttttacattggtatagacatcgcgaagaaggctcatgaagtatgttttctggatgcaaatggggatgtgcttgacggaaactcattcaaaataccaaacactgcttccggtgttgaaaaactccaaaagatgttcgacaagtacggactgactccggacaactctgtcgccgggatggaggctacgggtcactattggatggtcctttattcctggataactgagaagggttttgatgtcaaggtcatcaatcccatagtaaccgacgcataccgcaacatgctcatccgcaaaacaaaaaacgatcgtatcgatgctcaggtagtcgcaagagttctaatgcttggtgaataccaggagtcccccatcactgatgaagacatcatttcattgcgtcagttctgtcgtttcaggctttggcagatccagacatgttctgacctcaagagaaaagtcattacgcttcttgaccaggttttccctgaatacgaagagctgttcagcgatgtttttggattgacttccaaagagatactcaaaagctacacctcaccggaagagatcgcttccatcaacacccgcaaacttactaatctactcgaaaaggcctcaagaggcagattcggcaaagagaaagcgatggagataaaggctgttgcagttaactctatcggcattcagtttgccgttgattccttctcttttcagatccggcagatcatcgagcaactcgagtttatcgaagagcagcttgcatcccttgatcaacagatcgaagcttacatggaaaaactggattctccgatcacttctatccccgggatcggacctgtatacggtgctgtcattcttgctgagataggaagcatcaatcgtttcccgggcggcaaacaactcgtttcttatgccggtattgatgcgtctgttcatgaatcaggtgagtttaccggaacccaatcacatatctcaaaacgtggttctccatatctcagaagggctatcttcggagcagcattcattgcttcatggtctgatcccgaactgtccgattactacaaacgcctaagagacagaggtaaacatcactatgttgctgtaggtgctgtcgccagaaaactctgttacataatttatgctgtcctgagtgagaacagacctttcgagaaacgatcggtatagcctaaataatccatttgtcattcccagcatccatcaatgcttattttttgttgcacttttcctattcaattttcaagtttcattgtgttccctatcttctatttttatctaaaaatgccacttgacattttatagctggt

SEQ ID NO: 553 - DNA, 1534 bp, unidentified
  source 1..1534: mol_type = unassigned DNA; note = element_0574cd6
  misc_feature 1..2: note = core
  misc_feature 3..239: note = LE
  misc_feature 240..1418: note = CDS
  misc_feature 1419..1534: note = RE
  misc_feature 3..218: note = bridgeRNA
cttgtattatagagtagtagtgtttatagaccctctccaaggtctgtgctacaatgcagaggatgctgtggattggtgtgtggctcctaccgcatagacggttccagaaaggctccaaccacagccctttgcaaaattgttaatcagttagataccgccagacggtttatatggaacaaggttacattgcaaagtgtcctgtggacgcagcatcataaatcatctttggaggtatcatcatggtttgcgttggaattgatgtggcaaaggacaagcatgactgcttcatcctcagttcagaaggtgaagtgctggccgacgtctttacaatcgagaacaaccgggaaggtttcgacacactgctgcaacaaattcgatcctgcaccggtccaacagacaaaataaaggtagggcttgaggctaccggacactacagctacaacatcctcgggtttcttctcgagaaagggatgccgccctatctcattaacccgctgcacaccaatctctaccgtaagagtctcagccttcgacaaaccaagacagaccgtatcgatgcgcgaacgattgcaactatgctcatgtctgatgtggacctcaagtcctacacagacacagcataccacaacgaagagctaaagtcactaacaagatatcgttttgacaaagtttctgagagagccaaactcaaacagtctgtctcccgcttggtcgttattctgtttccggaactcgaaaagctcgtgccgtcgctgcatttggcgtctgtttacgctatgctcagccagttccccagtgcaaagcagattgcacaggcgcatctgacacactttaaagctgttctgtctgaagcgtccaaaggccggtatgagcgagagaaagctgttgagattcgtgacgctgccagacgatctgtcggctccgtcatgcctgctaagtccctggaactccggcacaccatttgcctaattcaggaactggacaaggagattgaggaagtcgaagcagagatctttgctatccttgacacagtgcagtctcctattaccacgatccccggcatggggccgcgcatgggagcgatgattctggccgaggtcggtgacttctctcggttcgattcgccggacaagctcttggcctatgctggcctttctccatctacctaccaatccggcaagctcaacgctaccggcgcttacgcccacatggaaaagcgaggctcgcgttatcttcggtatgccatctttaacgccacaaagtacgtttgcatttgggacccgacattcaaggcttaccttgcccagaagcgagccgagggcaagcactacaacgtcgcaatctctcacgcagccaagaagctcgtgcgcttgatctacgccatgcagcgaaccggcaagccatacctgcctgcctaactctttgccccttaccgccctggcgtccggaaggacgtctgtttcgatgcgtcctgttgcaccattcaccaattcaaaacttttctgcgttttgggcttgacttttaatagttagt

SEQ ID NO: 554 - DNA, 1385 bp, unidentified
  source 1..1385: mol_type = unassigned DNA; note = element_0580567
  misc_feature 1: note = core
  misc_feature 2..87: note = LE
  misc_feature 88..1134: note = CDS
  misc_feature 1135..1385: note = RE
  misc_feature 1146..1383: note = bridgeRNA
taatgggatggtccgccccgcacctttgacggcatcgcaatgtgccagaatggattgattccatacgaagaaggagcgggacgaaccatgaatcagcatagcaaagcaggcgacatcagaacaatcgggattgatctggcgaagaacgtatttcatttgcacggtgtggatggagaggggcatgttgtgatgcgcaagaagttaagccgcagcaagcttctggagttaatggccaaccttccggccgcacatgtcggcatggaggcgtgtggtggtgctcacgactgggcgcgcagactgatggcgatggggcatgatgttcgcctgatcagtcctcagtttgtgaagccatatgtgaagagcaacaagaacgacagcgccgatgccgaggccatctgcgaggctgtacagaggccgggtatgcgctttgtgccgatcaagagcatctcgcagcaggatattcagagcctgcaccgggcgcgtagcctggcagtgtcgcatcgtacggctcaagtgaatcagatacgtggtttgctgcatgagtatggaatagttactgccaaaagcgtcgctgcgctgcgcaagacagtgccggagattctggaggatgcggacaacgccctgacgccgatgttcagggatcttctctgcggtctttgggatgagatgaagcggttggatatgcgcatccaggcctacgatgccgagatcaaacgactgagcgagcagagcgatatctgccgacgactgatgacgattccgggcatcggcccgatgacggccacggcaatggaggcagcggtatcggatggcaaggcgttcaaaagcgggcgtgagatggcggcatggctcgggcttgttccaaggcagcactccacaggtggcaagccaaggcttctgggcatcagcaaacgtggcgacacctatttgcgcatgctgctgattcacggagcgcgggcggcacttcgatggacagacaaaaagccggatacgcgcagtcgctgggccagcgagctgaaggaacgaagaggtcaaaatatcgcggcagtggcccttgccaacaagatggtgcgcactgcctgggcattgataagaagaaatgaaacttaccgaacaactccggtaactgcataacagaaaaaaggatttcgacgaattgcgcggattgagtgagatgatggcaacaaaggcggacagctgcatttccgcaagcctgtcggggacaggggccggaagaggccgataaactgatgaggccggaaatgcgcagcggattccatcagggccagaagcaaacccgcttcaactaaaggccggatatatgtacgcaactttcctttgtcgctcagtcaaatcgatccttgcaacgcggggcggaccatata

SEQ ID NO: 555 - DNA, 1397 bp, unidentified
  source 1..1397: mol_type = unassigned DNA; note = element_058f057
  misc_feature 1: note = core
  misc_feature 2..100: note = LE
  misc_feature 101..1132: note = CDS
  misc_feature 1133..1397: note = RE
  misc_feature 1169..1395: note = bridgeRNA
taatgtaatgagccatccccacccctaggttgccagagatttgcattctggcagtttaacattcaagttgaatgttctttaaaagcgacgggagatgaacatgagtataaacgtattaggtatcgacatagcaaagaatgtattccaacttcacggtgttgatgcccttggtaaggcggttctgaaaaagcgcctatcgagaaatcaattggctatctatgctgctaacttacctcgatgtaccattgtaatggagtcctgtggaggtgctaattattgggccagagttttccagagagccggtcatagtgtgaagttgattagtccacaattcgtgaagccttttgttaagacgaacaaaaatgatgcaaatgatgctgaggcgatagtcgaagcagcgagcaggccctcgatgaacttcgtgccgatcaaacagcttgagcagcaggatattcaatcaatccaaagagttcgcagcagagtcgtcaaaaatagaacggcattgatcaatgaaattagaggtctaattttagagtatggaatcatagtgactccaggtgcaacccgagtcaaacgatcactgtgcggaattattgctgatcgcacaaacgaactcacgccgttatcacgcgattgtatgcaagatctctacgacgaacttgtcgaggttgaagcccggttgaaacagttggataagagagttcggcaaatctgtcaacagaatgaaacgtgctgtcgcatactgaaagtacctggggtcggcgaattaacagcaacggctatggtagccgctgtacccaacgccagtgagtttagcaatggccgtcatatgtcagcgtggttagggctagtaccgaggcagtcctctagtggtaataaacaaaaattgttgggtattagtaaacggggtgaccggtatttgcgaaccctgctgatacatggtgcgagatcagctcttagtcactataaaaatacggataacgactatggtcgttggctaacctgcaaaagagcaaggctcagctttaataaagcagcagtcgccttggccaacaagaatgcgcggataatatggtcgttgcttaacacaggggaggaatttaactgcaatgcacaaatggctgctacctgatactcaatattgggtggcttctttaaataaactggaaaatatcacaagtttgctcatgttgattttagatgatggctaataggttgaaccaactcttttaaaccctgaaacttgacaaggctcttagaggccatggtactgatgaggaaaaagagcgcggatttacatcagggcacaagctttgcttgcaggccgaatatatgaccgcaacttaaactaatggcatgaatcaaaaatcagcttgcaatcggggatggctcatata

SEQ ID NO: 556 - DNA, 1519 bp, unidentified
  source 1..1519: mol_type = unassigned DNA; note = element_05956ee
  misc_feature 1..2: note = core
  misc_feature 3..218: note = LE
  misc_feature 219..1499: note = CDS
  misc_feature 1500..1519: note = RE
  misc_feature 7..238: note = bridgeRNA
ctaatgggttgtgttcgggtctggtttggcaggcttggatgtggtggctgctggcggggtgagcactcgtggagcctggatcgcgggagtccttcgtgaagaccgtgccccttgccggtggcggaagaggttgatcactgaagggatgtcgtgcccgcccgtgcggtgtgagcactcgaccattaggccgttgatcttcttccgcgtggctgccggtcgtggtccagaccgagaatcagggcgggagcgtgtgcggcgtggtgttgttcgcgggtgacgactgggcgtctgatcatcatgatgtggaggtccaggaccaggcggggcggcggctgggcagggcccggctgccggaaggggtcgagggcatcgcccggctgcacgggctgctcgcgcggttcctgcccgaggacgccgggcccgatcaggtgctgatcgggatcgagaccgaccgcggcccgtgggtggcggcgctggtcgcggcggggtatcgggtgttcgcggtcaacccgcggcagtcggcgcgggcccgggaccggctgggcgtgtcgggcgcgaagagcgacgccggggacgcgcatgtgctggccgacctggtccgcactgacgcgcatcagttgcgcgaggtcgccggggacagcgacctcgccgacggggtgcaggcgctggcccgggcgcatcaggcgctgatccgggacaggacacggcatgtgctgcggctgcgggccgcgctgcgggactatttccccgccgcgctcgaggcgttcggggacctgaccgcgcccgaggcgctggaactgctcgcgaaagcccccgaccccggccgcgcggcccggttgtcccggacgcagatcgccgccgcgctccggcgggcccgccggcgcgatgccgagggcaagaccgccgggatccaggccgcgctgcgcgccccggcgctgggccgcggcccggccctgaccgcggcccaggcagcggtcgcccggtcgctgatcgccgtgatcactgccctgaccggcgagatcgacaccctggaaaccgaggtgaaagcccattttggccggcaccctgacgccgggatctacgcgtcccttcccgggctcgggcagatcctcgccgccagggtgctcgccgaattcggggacgaccccggccgctacgccagcgcgaaagcccgcaaaaactacgccggaaccagtccgctgaccatcgcttcaggccgcaaaaccaccgtccgggcccggttcgtgcacaacgaacgcctcctcgacgccctgacccggcaagcgcaatcggccctgcgggcctcgcccggagcacgcgcctgctacgacgcgctccgggcccgcggcaccggccaccaagccgcgctgcgccaactcgccaaccgcctcgtcggcatcctccacggatgcctcaaaacccacacccgctacgacgaggcaaccgcctggccccaccacaacaccgaccacaccagacaaaaccacaccgccgcttgacaaacaaaacccagggatgt

SEQ ID NO: 557 - DNA, 1505 bp, unidentified
  source 1..1505: mol_type = unassigned DNA; note = element_059f257
  misc_feature 1..2: note = core
  misc_feature 3..248: note = LE
  misc_feature 249..1484: note = CDS
  misc_feature 1485..1505: note = RE
  misc_feature 7..236: note = bridgeRNA
ctaatggggatcgaccagttgatctgagcgatcggggaggctggtgccgagctgctggccggtgagcacttcctactcttggagccttcgggattcctagtgacagatcgtgccctggttggctggttcgggttgcctgttaagcgctcatggggtgtcgtgccatcgagcactgatccattaggtcgccgctgggaagcccgctagctcaacgaaacgatccgatcctcgatgtatgggagaacatgatgacagtgtttgtgggcgatgattgggctgaggcccatcacgatgtccatctgatgaacaatgccggtgtacggctagccgctcgacgattgcccgagggccttgacgggatcgcagcgctgcacgcgatgctcgctgagcacgcttcggatcctggcgaggtggtgatcgggatcgaaaccgaaaggggcctgtgggtccaggcgttgctcgcatcgggctatcaggtgtatgcgatcaatccgctgtcggtgtcgcgttatcgggaccgccacaacgtggccggcgccaagtccgatcccggcgacgcgaaggtgttggctgatctggtccgtaccgaccgccacaatcatcgccctatcgccggtgacagcgacgatgtcactggggtgaaggttctggctcgggcccatcagaacctgatctgggaccggacccgtcacaccaaccggttacgtaacgacctccgagagttcttccctgccgccctcgtggcctttgaggacctggcccatcgcgacgctgtcgcagtgttggccaaggccccgagccctgatcaggccgcccgcctgtcgatcacccagatccgctcagcgctcaagcgaggaggacgccaacgcaaccttgacacccgagccgctgacatcggaaccgcgttacgggcccctcagctcgccgcgccgccagcggtcgcagccgctttcgctgcgaccacccgggcactggtcaatgtgatcgtcggtctcaacacccaaatcgctggcctcgagaccgaactcgccaaccattttgagcaacaccccgacgccgacatctacctctccctaccaggactcggtgatgtgctcggcgcccgggtgctcgcagagttcggagatgaccccgaacgctacaactcggccaagtctcgcagaaactacgccggcacatcgccactcaccatcgcctcgggaaccaaacgggcagtgttagcccgctacgtccgcaaccggcgcctctacgacgcctgcgaccaatgggcgttctgctcactacaagccagccccggctgccgcgacttctacgaccaacgccgagccaaaggagacctccaccaccaagcactccgagccctcgccaaccgcctcgtcgcatacctccacggctgcctacgcacccgaacccactacaacgaacacaccgcctgggcccaccgccaaccaccacaaaaccaacaatcccagatcgcctcttgacaagttacaaccctggggtgt

SEQ ID NO: 558 - DNA, 1189 bp, unidentified
  source 1..1189: mol_type = unassigned DNA; note = element_05aa055
  misc_feature 1..2: note = core
  misc_feature 3..220: note = LE
  misc_feature 221..1174: note = CDS
  misc_feature 1175..1189: note = RE
  misc_feature 24..194: note = bridgeRNA
cttgtatattcaatttaacgtgtgtctatgaaaaaatgtttatacgaaaaggacgggacaggccgcacgcccctcggtcgttggagaccgttgcgtagcaagggtcgtcccgtctttgctccccagaagctcgaacagttgcctgggttatccaagcccgcatgacttgcaaggccgagctaggttggagctgatcacaatcagttaggaggattacattttgaaagctcccctcatctttgtcggcatcgatgtctctaaagcccaactcgatatcgctatccgccccaccgcacagatcgtgtcggtgcctaacgataaagctggcatcaagaccttggtcaagcacctcgagaagcttcggccaaccctggttgtcttggaatctaccggaggacttgaacgtcaggtcatgcacggcttggtcggcgccgagatctcggtggtcatggctaacccacgccaagtcagagacttcgccaagtccactggacaattggctaaaaccgatcgcattgatgcggcggtcttggctcactacgctgaagcgattcgtccccagccgcgccctttgcccgacgagcttaccttgaaactcagagctttgactgtgcgcagacgacaactcatcgacatgatcgtcgctgagaaaaaccacctggccacggcctctaaagcgatcaaaaaacgtatcaccgctcatatctcttatctcgaacaggaactcgatgacgccgatcaagacctcgaccgtttcatcgagaaaaaccctctgtggaaacagaaccaagaaattctctgctccacccccagcattgggccggtcagcagccgtacgatgctcgctgaactcccagagcttggcaccctgggccgcaaacaaatatcggctctggtcggcgtggctcccttcccccgtgacagcggaactctcaaaggccgtcgcaccatctggggaggacgagcctcggtacgcaatgctttgttcatggccgccttggttgccacccgttttaaccccgtcattcgggacttctacaaacgactcaaagccaaggggaagcctaccaaagttgctctggtcgcttgcatgcacaaattactcacgattcttaacgctatgattaaaaaccaaactcgttggtctgaaactttctctcttaaggccacttgacattaaagacagttg

SEQ ID NO: 559 - DNA, 1212 bp, unidentified
  source 1..1212: mol_type = unassigned DNA; note = element_05ae041
  misc_feature 1..2: note = core
  misc_feature 3..191: note = LE
  misc_feature 192..1178: note = CDS
  misc_feature 1179..1212: note = RE
  misc_feature 12..200: note = bridgeRNA
cttgtatctcttcttgatgggtgtttagctagcacctatcgcatcgggaaatcggtgagctcgtgcgcgaccttagcacaaaaatgctgttttgtagattgagccctgatttcctaacctccattaaactgaatggtatcctagcaccccaagtaagggtgatgctgcatgtacaaggggagtagatagagatgaaggcttttattggcattgatgtaggtaaagaaaagttagatgttagctggttacgcgacgtagtcaaaaataagcagaaaaccaaggtcttaaagaacacaatacaaggctatcaagaattagttgattgggtgctaaagaatacagggttagaagctcagaatattgttattacgacagagcctactggtatttatagcgaacctttgatgtattttttatatgaacaaggatttactcttttacatgtaaacccaggaaaagcaaaacaatatgcaaactcattagggctagttcataagactgataaatcagacgccacaatgctggctcgctatggtcatgaccaacaacattcactttcaagctggcagccagagcctatagaagcaagagagctaaaggcaatggtgcgtagacttgaagcgttagagcaagatttacagcgtgaaaaaaaccgttatgaagcggcaggtttttcaggcgcatccgctcgggtcactcaatctctcaaagatatgatagcagtgttaaaggctgaaattgataaactcaaaaatgaaatcgatgagcatattaacaggcatcctcaattgaagaagaaccgccaattacttgaaagtataaatggtgttggtgaagtaacatcccgaataatggtttgtttactggcgtgtaagcggtttaagagcgcgaaacagctaacttcttatttaggcttgatccccaagcacaacgaatctggcaaacggacaggaaaaacaaccttgagtaaggaagggccaggttatatcagagcaaaattgtatatggccgcaatcgtagctgggcaacataataccgatataaaagcgcagaaaacgagattactaaaacaaggcaaaacaaaaatgcaggcgctaggtgcagcgatgagaaagttgtcacaaatatgttttggtgttgttaagaatcaaacagaatatcagcctcaagttagttaaataaaaacttgaggctgattaggagagatggtat

SEQ ID NO: 560 - DNA, 1330 bp, unidentified
  source 1..1330: mol_type = unassigned DNA; note = element_05b4329
  misc_feature 1..2: note = core
  misc_feature 3..82: note = LE
  misc_feature 83..1117: note = CDS
  misc_feature 1118..1330: note = RE
  misc_feature 1092..1315: note = bridgeRNA
agataattggactccctcacacccaaagatgtgaggtaatatatttgttaccacacaaaacatattaaaaagagtccataacatgaataatactatcattggtgtagatttagcaaaagaagttatccaagtttgtatatatacaaacaaaagcgtgcgttctaatacagaaatgacaacgagggagtttttaatcttcttagccaaccttaaatcagcgacagttattttcgaagcctgtagtacctcgaactattggaaacaaaaagccactagtttagggcatgatgctcgtctcatttgccctaaacttgtccattcagtgcgccaaaaccaaaagacagataaaaacgatgcgttagcggttgtgcaagcagctttactaccggatgttaattttatctcaggtaaaaatattgaacagcaacaattgcaatccatcatgcgttttagagaattagcaattaaacagaaaacagctttaggcaaccaactaaaaagtttgttattggaattgaatattcgggtgtccaaccgtgatggtgggttaaaaggtgtcattcaagcaacattagaagatggtgaaaatgacctatcttttgaatttagaagcgcattacaaatggcctggacacaatatcgcggtttaataaaatcgatagtgcattatgaagaggtgttggctaacatatcgacacaacatactgaatgtaaaaggttactacagttagaaggagtaagcaccatcaatgcggtgaatttatatattgctttgggttgtcaacccgagctgtttcacaaaggcaaagaggcttctgcttgtatagggttaaccccagttcagcattcaacgggtggaaaagtaaaactgggcagtattggtaaatacgtgaaaaacagtatgttacgcagtaaccttatcgtaggagcaatgtcagcgattaaccggataatgacacgagaagccgtcacccaaaaagaggcatggatacaagcattggttgctcgcagaggaaaacgttgtgcagcggtagccttagcgaacaaaacagtaagaacagcctttgcaatgttgacccaaggcacagaatacaaagcggtattaattacagcttaagaggttcatacaataaaaacgcccaattgaagataaaaaccagcaggtaaaaccagtgaataactaagagcctagagctcgctttatagatttggttacctgttcgcgaaaatatcaatgagccagagttagctactcaattagagctcgaacataagtatgcgtttaattcttcaaagaagtttttattgttgacaagagggagtccacata

SEQ ID NO: 561 - DNA, 1534 bp, unidentified
  source 1..1534: mol_type = unassigned DNA; note = element_05bdaec
  misc_feature 1..2: note = core
  misc_feature 3..242: note = LE
  misc_feature 243..1373: note = CDS
  misc_feature 1374..1534: note = RE
  misc_feature 3..219: note = bridgeRNA
cttgtataatagagtagtagtttattagagcccctcttcaagggctgtgctacactgaaagggatgctgtggattggtgaacgtctcctaccacaagatggttcttaaaaggttccaaccacagccccttacacttttgttaatcagttaaataccgccagacggttgatgtggaacaaggctacaaaagtaaggtgtcctgtggatgcagcatcacaaatctaaccctggaggtttttgctatggtagtttctgttggtatcgatgtttcaaaggataagcacgattgcttcatcgtcaactccgagggtgaagttctggccgatgtatttaccattccaaacaccatggatggattccactgcctgttgcagagaatccgggattgcaccacaccacaggacaaaataaaggtagggcttgaggcgaccggacattacagctacaacctgctggggtttcttcttgacaatggtctgctcacctatgtcttgaatcccctgcgcacaaacctttatcggaaaagcctcagccttagaaagaccaaaactgaccgagtggatgcacgaacgattgcgcatatgctgttgtccgatgcgggcctcaaaccctacacagatacagcataccacaacgaagaactaaagtcactgaccagataccgttttgacaaggtgaaagaacgggcgaagttgaagagttctgtctctcgactggtctgtatcctgttcccggagctggaaaagttggttcccactcttcacatggcctctgtctacgccctgctggaggagttccccggagccaagcagatcgctgcagcccatttgacaaggctgaaagcacttcttgaaaccgcctccaaaggccgctacaaacgggatatggctctggaaatccgtaacgccgccagaaattccgttggctccagaatgcccgccaagtcccttgaattacagcacaccatccgcctcatccgtgaactgaatgccgaaatcacggaaatcgaagaacaaatccaatctattatggatgagctccattctcccattcccacgatcccgggattgggtttccgcatggccgccatgatcctggccgaggtcggcgacttcactcggtttgactccccggacaagctgttggcttatgccggcatgtcgccatccacttaccagtctgggcaactcaagaactgttactctcacatggaaaagcgtggctcgcgatacttacgctatgccctttacaacgcgaccaaatatgtctgccactgggatccggcctttgccacttatctcgccaaaaaacgggctgagggcaagcattacaatgtcgcacttccccatgctgcaagaaattggttcggctgatatttgctatggaaaaatccggtatgccgtaccatttggccgcctgacttctttttgatagctaactggggccttccggggcctctgctttgctataccctttttgaatcatctttttcgccactgccatccttttttggggttgacttctaatagttaat

SEQ ID NO: 562 - DNA, 1419 bp, unidentified
  source 1..1419: mol_type = unassigned DNA; note = element_05bdcc1
  misc_feature 1: note = core
  misc_feature 2..63: note = LE
  misc_feature 64..1101: note = CDS
  misc_feature 1102..1419: note = RE
  misc_feature 1185..1410: note = bridgeRNA
taatgagatggtccgccgccgagtagcatagcggctcggcagtttagatgaggaggatcatctatgcacatcgcatcgatcggcatcgacctcggcaagaccacctttcacctagttgcattaggagagcggaacaagattctgctccgcaagaaattctcacgctcgcagttgctggcttacactgccaacctgccttcgtctttggtcggtctggaggcctgcgcgggatcgcatttcttgggcactgtgctgcgcgagcagggacaccaggtgcgccttattcctgcgcaatttgtgaagccttaccggaagacaaataagaacgacttcatcgatgccgaagcaatcgctgaggccgtgaccaagcagaacatgcgatttgtgcaggtcaaaacccaggatcaactcgatatacaggccatgcaccgcgtgcgcgaccgactggtgcagcgtcgcaccgccctgatcaacgagattcgcggattcctgctggaacgcggcatcacctttgccgctcagcccatccacctgcgcaagaacctccccaccgtgattgaagatgccgagcaaaaccttagtccgcgcctgcgctggcttctggatcgcctctggcaggagtggaagcagatcgagatcgacgttgaggtgatcacggaggagatcgagcgcatcagcaacgaggatgcacgctgccggcaactccgtcagatccccggcttcggtccgctggtctccaccgcgaccgtggccgccatcggcaacggcgccgcctttcgtcgcgggcgcgacttcgccgcttggctgggagtcgtgccacggcagtactccaccgggggcaagcagaagctgttcggcatcagcaagcgcggcaacatctatctgcgtcgcatgctgatccacggtgcccgcgcggttctgtttcgcgtgaagtacgacaccggaggattcggacagtgggtgcagcgactggcccagcgtgcgccgcgcaataaggtcgtggtggcaattgccaacaaactggcgcgcatcgcctgggccgtgctgtccagcggcaaagactatcgacatcagccgctgctgcagctggcggcggcctgatggccgtggaaaagacgctacgcttggaaagcacaaaacgctttccacttttccaccgccacgacgacgaagcttgaataacgttctacccgggtctgcggaggcgagaaggagacgaaagcacagtccaacggcgtgtcggaaaacctggtggcgaaaatgcgtccctagtgaccgagggatttataaggaccgacgcgtgcgcatcatcatcgagtgcccggagaagcgattctccactcagaggccggatacatttacgcggactatcctttcgcccaacttcaaacctcttgcagttcggcggcggaccataca

SEQ ID NO: 563 - DNA, 1539 bp, unidentified
  source 1..1539: mol_type = unassigned DNA; note = element_05bf0cc
  misc_feature 1..2: note = core
  misc_feature 3..240: note = LE
  misc_feature 241..1419: note = CDS
  misc_feature 1420..1539: note = RE
  misc_feature 3..217: note = bridgeRNA
cttgtattatagagtagtagtttttagtgaccctctccaaggtcatgtgctacactgcaagggatgctgtggattggttagttttcctaccgcacgacggttcacgaaaggctccgaccacagccctttgcagttttgttaatcagttagataccgccagacggtttatgtggaacaaggttacaaggcaaagtgctctgtggatgcagcatcataaatctttactctggaggtatcattatggtttgcgttggaattgacgtggcaaaggacaaacacgattgctttattctcagctcggaaggcgaagtgctggccgacgtattcaccattgccaacaatcgggaaggcttcgagaccttgctacagcagattcattcctgtacccgtccttcagacaaaataaaagtagggcttgaggctaccggacattacagctacaacatcctcgggtttcttcttgagaaaggtctggccacctttctcattaaccctctgcacaccaatctctaccgaaaaagcctcagccttcgtcaaactaagaccgaccggatcgacgcacggacgattgcagctatgctcatgtctgatgtggacctcaagtcctacacagacacagcataccacaacgaggaactaaagtcactaacaagatacagattcgacaaggtcaaggaaagagcgaagctcaagcagtctgtttcacgtctggtcaacatcctgttcccagagctggaaacgctggtgccaatgctccacatgtcgtctatttatgccatactcagtgagtttcccggtgcaaagcagatcgccggcgcccacctgacgcatttcaaaaccgtgctctcggacgcctcaaaaggtcgctatgatcgagataaagctgtcgagatccgtgaggccgccaagcgttctattggttctgccatgcccgccaagtctcttgagcttcagcacaccatccgcctcatccatgagctggacaaggagattgatgagatcgaagccgccatcaaggcgatcattgacgagatggctccgccgatcctcaccatccctggcatcagttaccgcatgggcgccatgatcctggccgagatcggcgacttctcccgtttcgactcgccggataagcttctggcctacgctggcctttcaccgtctacttacgagtctgggaagctaaaggctactggcgcttacgctcacatggagaagcgaggttcgcgctacctgcgatacgccctttttaacgcaacaaaattcgtctgtcactgggagccgtccttcgccgcttatctcgccaaaaagcgagctgagggcaagcattacaacgtcgctatttctcacgctgcaaagaaacttgtgcgtcttatttttgccctacagacttccggcaaagctttccagccggcttgatttcacacagtccataccgctcagagcgccctgccggacgctcagctttctataccctttttactacctacgccaattcacaactccttgcattttggggcttgacttttaatagttagt

SEQ ID NO: 564 - DNA, 1234 bp, unidentified
  source 1..1234: mol_type = unassigned DNA; note = element_05c2ae9
  misc_feature 1: note = core
  misc_feature 2..226: note = LE
  misc_feature 227..1207: note = CDS
  misc_feature 1208..1234: note = RE
  misc_feature 46..213: note = bridgeRNA
tcttaagttagccttatcaaatataagttataaattaagaatcaaatcagaaagaataaaaagagaggattaaggttattttgtgtattgagactgcgatctcgtttttcatgacaatcccctctctttcctactattatttcgaacagttctgtgagactttagatctcgtttttaagatgcagaaaagctagtagatcagttctttcgtaaacttcatatatatatgattaaaaatacaaattatttcggaatagacataagtaaggatgtctttgatgtgacgggatcagatggtaagcattatcagttcaagaatgacatatcaggctttaaaaaaatgttgagtttaactaatgaattttctcattgtgttatggaatctaccggggtttatcatttgcgtttagcgtattatttatatgagaaagcaatagctgtaagtgttgaaaatccattgtctattaaacgttttattcaaatgcgattaacaaaaattaaaacagacaaaagagattcccaaatgatttatgagtatgcagtaaactctagtaatgaattacgtttatggaaaggccagagtacaactcaaatagcttgttcacaaataataagtctaaccaatctctatactaaacaaaccacagcacttaaaaacaagttgcaaacagaagagtctatggggtctccttgtccccaagtaatacggtcattgaaaagaagtttaaaacacttgaaaaaggaaatggataagttagaagattcattactaaagttagtaaaacaagataatcaagacttgcttactagagtagaaagtattccaggaataggtaggagatcaagtatgttactgattgttttgacaggtgggtttgaacgttttaataaggcttcagagctttgttcttttgctggtctaactcctataataagacagtcaggaagtagcataaggtctaggtcaagaataagtaaaatgggtaataggcgattaaggaaaacgttatttatgtgtagtctttctgctaaaaaatataataaagcatgcaaagaaatcttcgatagaattgtagcaaaagggaagagtaaaaaagtagcattaatagctgtatgtaacaagcttttaaaacaggcgtttgccttagctaaatcggggttgaaatatgacaggaactatagaagtgttttacataatttaaattaataattacttgttttttaacacagttct

SEQ ID NO: 565 - DNA, 1468 bp, unidentified
  source 1..1468: mol_type = unassigned DNA; note = element_05ddd62
  misc_feature 1..3: note = core
  misc_feature 4..132: note = LE
  misc_feature 133..1164: note = CDS
  misc_feature 1165..1468: note = RE
  misc_feature 1199..1383: note = bridgeRNA
aacatggagtaatcgcggacggtttccccaaaggcattgcctcagcaatatctgacatgggtggttgcccccggtaggatggaaatacgggctcacgattggaaccgggcccaacatcaaatggaggcaaccatggaccaatatatcgggctcgatgtttcgttgaaagatactgcggtgtcgatccgagagaataggaaacggatctggcgagggaaatgcccttctgatccgaaagttctatcgcagatcatccgcaagcacgctccgcacgcgaagctcgttgtcttcgagacaggtccactgtcgacgtggttctatcatgcgctgacggccgaagggattcctgcgatttgcattgaagctcggcacgcgcaaaaggttctgagcgagacgcttaacaagactgacgccaatgatgcggatggtctagagcagttggccgaagcaggattttacaaggtcgtgcgagtaaagactttcgacaacatgctgacgcgcacactggtggcggcgcgtagccagctcgtaagcatttccaagcagctcagcaaccaaatacgcggtctcctgaaaacgtttggtcttatcgtgcccaaaggggaaggtcgggtatttgatgccaatgtgagagaactgctgaatggaaatagcggcctggcagttgtgatattgcccctgctcgaggcgtggcgcgacatacgtaagcgcgcagccaatcttgatcaccagttgctcgcagcttccagacagagccgggctacgaagctcctgatgacgattccaggcgttggcgccgtcacggccgtctcttacattgctgcgatcgaagatcctgaaaacttccccacatcgcgctccgttggcgcttggctcgggctgacgacgcggcgctaccagtcaggcgaaatcgattatgatggccatatctcgcgacgcggtgacggtcggctgcggggattactctacgaggcggcaaccgtcctcttaacaagaaccggtgccaggaccgaatgcagtctcaaaacgtgggggctgaagctgcgtgagcgactgggcttcaaacgtgccgcggttgctgtcgcgccaaaacttgctgtcatcatgcatagcatgctcaaaaccggggaagcgttcaacccattggccggcgctaccgcataggcgaaaaagccggcctacctgcctcagcgcctcaacccgattgagatgctgggcgtccctgctgtggacgtgggttgggtcattccgtcgattccgtcgcagctcgtcgagactgcgtcttgaacaaaggaagatccgccctgcgaaaacccatcatgcggcgactatgtgtcgaccgcggagacaaccgtgctccccggcgccggacgaattggcaggaacaaagatgcagaccccatccaaaacagaaagatgtcgcgatccacgagccacaagccgcttgaccccgagcacgcgattagac

SEQ ID NO: 566 - DNA, 1302 bp, unidentified
  source 1..1302: mol_type = unassigned DNA; note = element_05e98d4
  misc_feature 1..2: note = core
  misc_feature 3..226: note = LE
  misc_feature 227..1216: note = CDS
  misc_feature 1217..1302: note = RE
  misc_feature 7..212: note = bridgeRNA
tcctttagattcacaaaatgaaaagatggttagttttgttaaaacaagacaaaccgaaaaagagtttgggtgaactaaccgaggcttcaaattagagatttttaccccgaattagtcccatactcttttaagttgaagtgagccagttagaataataagagcagtgtcttattaaaggatttagcaaattcaacaatttcggtttgtccaaactaataacaaaattatgaaaagaaattggtttatcggaattgacatctcaaagaagactcttgatgtcgtgatttatgatcaggaaaagaaaagagcaagaaagcattttaaagtgaacaatgaattaaaaggctttaaagaaattattaagactctaaaagcagaaggcgttatacttgacaatgcttttatctgtcttgagtattgtggaatctacggattagaattaggtttctttctagaaggaaaaattagtttctgtttttgtgcccctttgcatataaaacggagcttaggattaaccaggggtaagaatgacaaacttgatgcttataaaattgcatggtttagttatttgtttagagatgaattatcaccatctacaatgcctacaaagactatgcttaagctgaaaagcctaatgggcgaaagatatagggtcgtaaaggcggctacaatagaaaagcaggtattgagggaattatccagccagctagataacaaagcaattataagggtgaaacacagattgaaaatattaacagctgatgtaaaagcaatagaaaatgaaataaaggagttgatcatgagtagtcctgaattaaaaaagagttataaattattgcaaagcataacaggtatagccttggttaatgctacaatgatgatactgtgcactaataatttcaaaggaattaccaatgccaggtcatttgcttgctattgtggtgtggctccatttgaatatagctcaggaaccagtattcggggaaaaaccaaagtgagcaacctggctaataaacgtatgaaggccgacttgacgaacgctgctcgttctgctatagttcatgatccggaaatgcgtatttactataaacggaaaagagccgaaggtaaggagcatggaacagtaataaatgcagtaaaatttaaaattattacacgcgcttttgctgtaataaaaagaggaactccttttgtgaaattgaggcaagctggatgaaaatatcagttgatggagctagaaaagtaaaattttgaaataatgagtgtaaataatatccgaattgtttgttttagtcttagaat

SEQ ID NO: 567 - DNA, 1543 bp, unidentified
  source 1..1543: mol_type = unassigned DNA; note = element_05ecb7e
  misc_feature 1..4: note = core
  misc_feature 5..277: note = LE
  misc_feature 278..1441: note = CDS
  misc_feature 1442..1543: note = RE
  misc_feature 44..261: note = bridgeRNA
tcacgtataatgaaaccatctcgaaaggggtggtttcattaattctcctttcattaaatttgttatatggcgggagtagctacccgcggtataatcagaacaagcactgtggatttgtacaaataatttacagcttgactgttcggaggtgactcaaaacacagcggcttgtctgaattggtaattagttggttaacgctggacgtttctattttcgtgagtacatagatgagtcaactgtggaaaacagcagtgcaattttgaaagggaggacaccatgtactttgttggaatcgacatctcaaaattcaaacacgactgcgccgtcattgatgagcttggtgatgtagtcacaccctcgtggtcgttcagtaacgattgcgagggcttttctttgctcaaagagctgcttgcaaatctgaattcggacataaagatagggtttgaatctaccggccattatgggcagaacttaaagctgttccttgaatccaacagctttacattcatggaattcaatccgcttctgatctcgcggtttgttcacagcaaatcgctcagaaaaacaaagaccgactccattgacgcactaatcatcgcccaatatttgatgacggtagagtacaaaccctatccggcatcattttaccacatggacaagctcaaatcactgacaaggtttcgggacagcttgattcggcagcgaagccgccagttagtggagcttaccaacgttctcgacaagatttttcctgaattcaagtctttcttcaagggcagattttctgtcactgcaatgtatattcttgcgaactatagtactccggaaaaaatcagcaatatgaacagtcgctcttacgacgcccttcgcagactctcgcgaggaaagtttacgatgagttctttcgtccagcttaagatgcttgccagggactctgttggacattgcaatgactatctccttcacgaaatgggggttcttctggatatctacaaccagatggattccagaattcaagaacttgacgaacaaatcacggcttgcatcaaaggaatcgatccgccgatcctctcaattccgggcattggagctttgtctgccgctgtcatcctatccgaatacggagacatgaacacctttgacagcccggccaaactgctctcttttgcgggattggagcctggctattatcaatccggccaatcagaacatacaggccggatggtcaaacatggctcttcgcatcttcgctgtgcgctcatgaactgttgtctgcccctcgtcaagaatgagccggtctttgccgaatactatgccaaaaagcgtaccgaaggtaaaccccaccgtgttgctattactcatgttgctaaaaagctgctgcgcgttatttacacgctgcaaaccaagggtatcccttacaacgctgacctgatccgctaaaggtttctctgtattttaagtcctcgtacgagggcttgcgttgctataccctttttgctcatttgagttttttcttttggggacttgactttttatagttgg

SEQ ID NO: 568 - DNA, 1518 bp, unidentified
  source 1..1518: mol_type = unassigned DNA; note = element_05ed742
  misc_feature 1..2: note = core
  misc_feature 3..251: note = LE
  misc_feature 252..1478: note = CDS
  misc_feature 1479..1518: note = RE
  misc_feature 47..228: note = bridgeRNA
cttatattgggtttgttgcatggaagtcatagaccggtgatgtaaggtgatggcgattccacggcttgctggaatgaggacccacaccgcccaatccgcccggcagaggatcaaggagagactgtcccggccagcaaaagaacggagcaaggttctatagaaagttgtcccgtagaggaccgatataaggcgaacttccgttcatcggtagtggaattggccataaagcatagccataggaggaaaagagattgcaacgatactatttgggagtggattgggccgacaaaagccatcagctgtatgcggctgatgaaagcggcaagaaaataaaagagctcgaggtccaacaaaccgccgaagggctggcggagttcgggcgctggctcgatgagaggcgcagcgctggcactgagctttgggcagccatcgagaagcctcaggggcgaatagtggattttcttttggatcacggtgtggtggtgtacccggtcaaccccaaggcgctggatcgggcgcgggaccggtttcgtatgagtcagtccaagagcgatggttttgatgcttacgtactagcggagtttttgagaaccgatcacactcatttgcgagctttggagcccgactcagctcagggccaagagctcaagatgctgacgcgcgaccaccagcgactgctgcggcagaaaacccggctgcttaatcagatgacgataaccctaaaagaatattatcctcgggcgttggaagtgtttgacgatttggagacccagatcgcgcgggattttcttcatgcgtatccgactccacaggggctctcgaggatgacgcgcccacaatggaagcgctttgctaaaggcgagcaccacctgagcgaagcccgttggcaggagctttgggagaaaatcaataagcctcagatcacgattcctgaccatgtcgttagagcgaaggcaaaactgctgctggcgcttgtggctcagctggaagtcggcgtcaaagcagttcatgactacagccaagaagttgaacgttttttcgccgctctgccggcggctaaaatcgccaggacgctgcccggcgcaaaaagcggcacgacgatgcccacgctttgggctgagctgggtgatgctaaaaatcgatggaactccttcaggcatcttcaggctgaggcgggaacggtgccggtcaccaaggcgagcggtaagagtcgtatggtccagtttcgattcgcctgcaagaagcgtttgcgcaccgccatgtattggttcgcgtttaactctctgatgcgatgtgaatgggcgaacaagtattaccgagatcaacgggccaaaggccatagtaaacatcaggcactcagagcgctcggagcaaagtggctcaaaattattttcgtgatgtggcgagaccataagccttacgacgaaaattaccacttggcgaatatcgcccgacatgcgatgcgccaggcggcctgagtatttttcggttgcctgcttgacaagggtcatagaaagt

SEQ ID NO: 569 - DNA, 1463 bp, unidentified
  source 1..1463: mol_type = unassigned DNA; note = element_05ee89a
  misc_feature 1..3: note = core
  misc_feature 4..239: note = LE
  misc_feature 240..1448: note = CDS
  misc_feature 1449..1463: note = RE
  misc_feature 23..234: note = bridgeRNA
tccttaagttcgtaggtgcagttacttcgtgttgttacgttgtgctgtgacccgggcgggtcgggtgaggttgttggtgtgttgccggcttgatggtgcggcttgagaggactggccgcccgacccgcttggacttctctggccgctgattgagatctgcgatgtgatcgcttgtttaaggaaatgctggcggggtggtccgtggggaacatgttggcagacaagcgaatagaggcgagatgactgcggtccagttgtgggctggtgtggacgtcggcaaggagcatcactgggtgtgcgtggtcgatgaccacggtgcggtggtgctttcccgaaagttcgtcaacgacgagcaacagatccgtggacttgtttccgatgtggacaagctcggtgggcaggtgtcttggacagtggatctgaccaccgtctacgccaccctgttgttgacggtgctcgccgatgccggcaagtcggtgcgctatctggcgggccgccaggtgtggcaggcctcggcgacctaccgcggcggggaggccaagaccgacgccaaggacgcgcgggtgatcgccgatcaatcccggatgcgcggtgccgatctgccggtgctgcaccccggcgatgacgtgatcaccgaactgcggatgctgaccgcccatcggactgatctggtggctgatcgcacccgcaccatcaaccggctgcgtcaacagctggtagcggtctgcccggccctggagcgagcagctcagctgacccaggatcgtggttgggtggtgctgctggcgcgctaccagcgtccgaaagccattcggcagagcggcctttcgcggctgacgcgggtgctggccgatgccggggtgcgtaacgccgctgcaatcgcagcggcggccgtggctgcggcgaagacccagacggtgcgcctgccgggcgaagaagtcgccgctgggctggtcgcacaactggcccaggaggtgatctccctcgatgaacgcatcaagaccaccgacgccgacatcgagggccgatttcgccgccatccacttgctgaagtaatcaccagcatgcccggcatgggatttcggctcggcgccgaattcctggccgctgttggtgaccccgccctgatcgagtcggctgaccaactcgcggcgtgggccgggctggccccggtctctcgcgactcggggaaacgcactggacgcctgcacactccgaagcgctacagccgacgactgcgccgggtcatgtacatgtccgcgctcaccgccatccgctgcgacccgctttccaaggcctattaccagcgcaaacggaacgaaggaaaacgaccgatcgcggccaccatctgcctggcgcgacgccgcaccaacgtcctctacgcgctcatccgtgacaaccgcacctggcaacccgactcacccccaatcacacagtcggcggcttgacatcttcattgagag

SEQ ID NO: 570 - DNA, 1178 bp, unidentified
  source 1..1178: mol_type = unassigned DNA; note = element_05fd7d2
  misc_feature 1..3: note = core
  misc_feature 4..201: note = LE
  misc_feature 202..1167: note = CDS
  misc_feature 1168..1178: note = RE
  misc_feature 36..207: note = bridgeRNA
acttgtcttatgaaatccgggtcgctgtatgcgacaaaggcagcagtcaggaggtggccacctcgtgactgctggagagagcgggtcgagtcaggataggccatgatgggccgcgaatgagtatgaccgcctcttcttttcctcgggcctgaacggatacctgggagaaaatcccggatgacaagcataggacaatgggaaatggcacagacatgctcaaagctggagagtcatgacgttgttgttggcattgacgtttccaaggatcaccttgatgccgctcaatatccatctggtgacctgatccagacttccaacgatacgaaaggcctcagaacgcttctacgatggattggcaggcaacatgctgtgcatgttgtcttcgaggcgaccggccctttccatcgtcaactggagagtcatctggccaaggccggcatcccattttcacggatcaatccgcggcacgcaagaaagtttgctgaagcaacagggaagcttgcaaaaacggatcgggtagatgccatgatgctggccaggatgggagcacttcttgaacccaggacgtctacgatctgcaacgagctgcagtctgcgctccaggaactggcagctggacgacgaaatctgacccgtgacaggacagccctgctcaatcgccagcaaaacctgcagctcagtctcctaaaacgtctgacacgctatagacttcgtcagatagaggctcagatcgcagccatcgatcaggcaatcagcgaactgatctcgacagacgagagcctctctcgaaaacgcaccattctggtcagtattccaggtattggagaggccacggctgcgatgctgatcgctgatatccccgagctgggcacactggaaaatgggcaggttgctgcgctcgcaggtctggctcctgtcaccaggcaatcaggaaagtggcagggtaaaagctttattcggggtggtcggattcatgtcagaaacgccctgtacatgcctgctctggttgccatgcggcataaccctgaccttcgaagcatttatcttagtctgacggataagggaaagcacgcaaaagtggctctgaccgctctcatgcggcgtctcgtcattctggcgaatgtcctgttacgcaatgacaggttatgggaaccacgccacacttgaccaagacggat

SEQ ID NO: 571 - DNA, 1626 bp, unidentified
  source 1..1626: mol_type = unassigned DNA; note = element_06111a6
  misc_feature 1..2: note = core
  misc_feature 3..256: note = LE
  misc_feature 257..1519: note = CDS
  misc_feature 1520..1626: note = RE
ctggtacaataacctcgtaaacggcggggttgcagctatttaatccgcatgatacgcttcagacaaaaggcggggcgaaagtggcagaattgcttgctgggttttagcttaaattaccctcagtgtagacagtccgttcatcccgcgggagtcttttcttttaggctggatgggtgcggccctgccgcttacccgcgtatttcacgcgcatgtcaattcccgcatcaggatgctgtcccgcataggaggttgtttcatgaaaagcttcgttccagtagcaggtgttgacgtcagcaagcgtttcagcgacctgtgcgtcctcagtccggacaacaatgtgctgctcaggcagaaaatctaccatgacatggtcagcatgaaacttgcagagaaaaagctgcatgagatcgagttggaatgcggagcaaggccagtagttgtcatggaatctacgtcgcattaccatctcatcctgttccagttcttcacggatgcaggctttgaagtcgttgtggtcaaccccatacaaagcggagcattgaagaacataaatgtgcgcaaggtcaagaatgaccgcgtagatgcgtatcgtatagccatgctccacaggcttaaggttttgcggccgtcgcaaatacctacgagctccttgcgcggccttcgtctgctcacgcgccagcgcagcgagctcaaaggcgacgttgcgcgcttcaaaaacaggctgacggcatatctggatcagatcttccctggatatggcgaggtgttctctgacgttggaggaagtgcatcgcgcgcagttttgcatatgagcccgacgcctgaaaagctgctgaatgcaaatgagagcctgttggccaaagcaatctgtgaagccggcaacaaggggcctaagtttggagctgaaaaggctgcgaaactaagagaagcagccggatctgcccaagtaattggcgtcaggtctgcgagcaacgccagcctgatcaaaaatgtgctggacatcattgaggggctgctcgccgccatacagcgcattgagggagaaataaaggagttggtaacgcaggacacacgccttgacgaggacgtaaaactgctttgcagcattcccggcatcggtttcagctcagcggtggtcatagtggctgagatgggagacatatctctgttcagaaagcctaagcagctagcggcatacttcggccttgacccgggcgagagacagtcaggaacgttcaagggccgcaagaacaagctgtccaagcgcgggtcgccacaggttcgcgccgcactgcacatggcggcggtgagcagcgtttcacgaaacagagacggtacatacagaaaccctgtcctggctgaatactacgagaggaagtgcgctgagaaaccgtgcaaggtggcacgtgtagcagtcatgcgtaagctctcgaacatcatctatgcagtactgcgtgaccgcagaccgtttgaactacgcacgccacaggagcatatggcgcttctcgctgcggcgtaaggcgacaatatgcgttcaggctcacagccttcgccgtgagcctggttgtagtgcgctttttgcaggttagcaaagttatattctgtccttgactttgcttaactggt

SEQ ID NO: 572 - DNA, 1249 bp, unidentified
  source 1..1249: mol_type = unassigned DNA; note = element_061b5ed
  misc_feature 1: note = core
  misc_feature 2..223: note = LE
  misc_feature 224..1243: note = CDS
  misc_feature 1244..1249: note = RE
  misc_feature 16..203: note = bridgeRNA
ctgtgtagcttcgtcgcgctaggccggctatccgtccggctgagagaggaaagtgcgggcggcggcgggatgacccacggcaaagctggcgaaatgcctttcgcgggacctgtctcccgccgccgtccgtgtgactggccggtgacctgatagaagcctgcgtccttgcccgacacagccctgtccaaggccagtcgttcttcaacgagaaggaggctaagcgatggcttggacggtggcaatcggggtcgatacgcacaaggacgtccatgtcgcggtcgcctgcgatcggctgggcgggcagcttgatgcctgcgaggttcctgccagcgccgctggctacacacacctgctcgcctgggcggaggcgctggggcgtccggccttcgcgatcgagggctgcggcagctacggatccggtctggctcgcttcctgcaggcgagcggcgccacggtcttcgaatgcgagcggccaaggcggcgggagcgccggcggggcaagagcgatctgatcgacgcggccctggcggcgcggcgactggtcgtcggcgaaggtctcggcagcccgcgcggcggcggtcggcgagaagagctgcggctgcttctgctcgagcggcgcgggctcgtgggtgcgaggacggcgacgctcaaccagctccaggcggtgctcgtctcggcgcccgagcggctgcgggtgcggctgggggcgctgcgcggcgcccgcctggcgcaggcggcccgggccttgcgctgcggcagcggtgaggagcgcgtcctcgtcggcgtcctgcgccgcctcggtcgacgcgtccagcagctcgaggccgagctggcggagctggaagccgagctggaggcgatcgtcagcgagctcgtccccgagctgctcgaggagtgcggggttggtcccgtctgcgcggcgcagctcgtcgcctccagcggtgatcccgcccgcatgcggagcgaggccgccttcgccgcgctcgccggcaccagcccggtcgacgcctcgagcgggcggcagcggcgacatcgcctcaatcgcggcggcgaccggcagctgaaccgcaccctgcacgtgatcgcactcgcccgcgtccgccacgatcgcgacacggccgcctaccacgagcgactgctcggctccggcaagaccgcccgcgaagcgaggcgctgcgtcaaacgcgcgctcgcccgccacttctaccgccgtctctgcgcgaacccggccttgacaacatagaagcgt

SEQ ID NO: 573 - DNA, 1135 bp, unidentified
  source 1..1135: mol_type = unassigned DNA; note = element_0620c2e
  misc_feature 1..2: note = core
  misc_feature 3..209: note = LE
  misc_feature 210..1124: note = CDS
  misc_feature 1125..1135: note = RE
  misc_feature 12..192: note = bridgeRNA
cttatctcttgccgatctggcactttaggtgccgagagcccggcgtgggcgaccgtgtggatccaggttttgcgaccgtgaagtagcttgggtccccacgccggattctccctgaatcgcccgaacagttggttgagttggcgctcgaactgataagactgggcaagcagggagagctctcgaccctgtcagcctagcggagttctgtcatgtttgggatcgggatcgatgtgagcaaaggtacgctggatgtggccgtccatgaggaccagttccgccaattcagcaacgacaagcgtggcttttccagcttgatccggtggctgaagaagtggcccatcaagcagattgttctcgaggccagcgggggttacgagcgggccgcgctggatgccttgcacgctgccggcctgcccatggtgcgcatcaatccggcgcgttcccgacggtttgcccaaggcaccggtcaggctgcgaaaaccgataggctcgatgccaaggtgttggcggagatggcccatctgctgaaactgacccgctacgtcccgccggctccctggcaacaacggctggctgaattttcacagtgccgcaggcaactggtgcagatgcgggtcagtgagacgcagcgcttgcggcgtttggctgacccggatctgattgcgatgaagcaacgccatatagctcagctatctgaagacctgaaaaaattggatagagctatcgccgagcaggttgaaggacagccttcctggaaagacatcggctccctcaaaggggtgggtcccgtcttggtcagcacgctggcctgtgagctccccgagctgggcagcctcgggagcaaagccattgcatccctggtgggcgtggcgccgatgaaccgcgaaagtgggacgtggcacggccagcggcgcataagtggtgggcgcgcggtggtgcgtgaagccctctacatggcggcccttacagccatccggtacgaaccacggctgcgcgatttttacgctggcctgaaggccaaaggcaaagtgagcaaggtcgccttggtggctgtcatgcgcaaaatgcttgtgatcctcaatgcccgcaagcgggacgccgagttggccctcggcagaccctgacaagacagttg

SEQ ID NO: 574 - DNA, 1700 bp, unidentified
  source 1..1700: mol_type = unassigned DNA; note = element_0623a79
  misc_feature 1: note = core
  misc_feature 2..381: note = LE
  misc_feature 382..1569: note = CDS
  misc_feature 1570..1700: note = RE
  misc_feature 122..291: note = bridgeRNA
tagtataataatggtgtagtcaacaaggactacttggttaatagttataaagtctaatctaatgaataaccgaaggagaggaatccccttcatcagaggttataaaaaatttaccatgtctgaggcttccttaatgcaccagaccagatatagaggtataatcactgaggcaggatcattgacggtttgtccttgggaaccagccacggctggccaaaccccttagaaagtctgtcagtccattcggtggtgatttatgttttggctggttgggaagccccaggctatacctgtataagccgctaggctgtgtatccgccttttggaaatggatgcttgccaaaaaggatgacctacatgaaatatcaagaagttctccggatgcccgaaagcatcccttacctatccgttggacttgatgtcggggctgacctgatctggatgtccatcatgctccccaacggcaccctcactggcaagccgttcaaaatcctgcactctgaccctcagtccagagagcttgcagtgacaaaaataaaggaagcacaagagatgtgttcccttgaaagccgatgcttccttgagtccaccgggatctatcatatcccgctactgtacttccttcgtgataagaggtttgactgttccgtcattaatcctatcatcactaagaataccacaaatatgaacgtaaggaaactgcataatgacaaatttgactccaaaaaggcagcgaaggtggggcttgatgcttccctcaagacttccacataccttggggtcttcagcaaggtcactacacagacatccctcaagcttctggaaagctatcccctggccgctgacatgctcgctgcgcccaaggatgagattgtggaaaccatccgctccacgatctgctttggggagaagtacgcccttgcgaaatatgatgccatatgtcaggctgcaaaggatgttgctgtcttcggtcgcgccctgccaagcaatgctgtcaggataaagctttacatagacagctgcaaggaataccagaagcacctggatgccattctggataccctccacgaatctgtggataagctgcggggcacaccggtttatgaccgcatctgcctcctccagtcgctgcacggggtaggtttcctgagttccgtcgtcttgattgcggagatgggcttctttgaccttttctcatcaacaaagatttacgcctactttggcttagatcctgccgtgaaacagtccggcaagtttaagggggacaaagcgcatatgtccaagaggggttccagcctcgccaggcgcatccttcatatgatagccctcaataacctcaaagtgggcgagacaacaaaggaaccggtaaacccggtcatccacagctactatgccgacaaatgcaaaagcaagaagaaaaacgtggctgtgggcgcggtcatgcataagatatgcaacatcatcttcgccatgctccgggacaataagccctttgaacggatcacaccacaggagcactgtgaacgctatgcgtccgaacatcctgacaaggtaagcaaagccgcctaatggattcttatgaaattttaaaatttcccatatatgggggttattaaagttaccctttttcagggaactggttccaacaaatttttttgcataattttcaaatcacccccttgacatttcttagctggact

SEQ ID NO: 575 - DNA, 1366 bp, unidentified
  source 1..1366: mol_type = unassigned DNA; note = element_06303cf
  misc_feature 1..2: note = core
  misc_feature 3..76: note = LE
  misc_feature 77..1102: note = CDS
  misc_feature 1103..1366: note = RE
  misc_feature 1078..1354: note = bridgeRNA
tgatggagtggacgccccctacggcatctatgtgccaagatggtggtgttgaccaaccatctgagaggaggcgtccgtgtcagaagttagcatgatcggtctggatctcgcaaagcaggttttccatgtgcatgggtctgacgtcacgggtgcgacggtgttcagtcggcgcatcacgcgtcagaagctgctggagtttttcgcgtcgcagcctcggtgcgtggttgcgatggaggcgtgcggcggcgcgcaccactggggccgcgagctgatcaagctgggttacgaggtgcggctgattgcgccggcgtacgtcaagccgttcgtcaaacggcagaagaacgatgcggcggatgccgaggcgatctgcgaggcggcgcagcggccgacgatgcgcttcgtgccggtcaagagcgagcagcagcaggcgagcgcggcggtgttccgggcgcgcgacctgttcgtgcgtcagcgcacccagttcatcaacgcgctgcggggcctggctgccgagcacggctgggtcgtgcccaaggggctgttccatgcgcggttgttgatggcgaagatcgaggattcgtcctgtccgctgccgcaaggcgcacgccaggcgttcctggcgatgatcgcaagcatcagggcgctcgatgagcagatcgtcaccctcgaccgcgagatcacgacgcgggcgcgcgaggttgccgatgcccgccggctgatgaccatccccggcatcggtccgattacggcaacggcgatcctcgcgctggcaccgccggcggagaacttccgcaagggccgcgacttcgccgcctggcttggcctgacaccacggcagcgctcgaccggcggcaagcagaagctcggtcagatctcgaagatgggcgagcggacgctaaggcgtctgctgatcatcggcagcagtgcagtcgtgcttcaggcggccaggcgcggtgcgccgcggggatcctggctcgagcagatgatggcgaggaagccacgcatgctggtcaccgtcgcgcttgccaacaagacggcgcggatcgtctgggcggtgctcgccagccacgagaattacaaagctccagtcgcggcagcttgaggctgtcgggacgtgtgagggtaccacggcacaagtgatcgaaggagagtatggcacaacagtcggtgagacggggccggaagaaccagggctttccaccgtgcttcgcaagcacgctcagggtgatttggatccggtccgcgaactcccatacaggctcgcagcactcatcaaccgctgcatcaaaagccggacagatggcagcatccgaccaccgtgcactgcactccagaaattacttgcgccgaagggggcgtccacaga

SEQ ID NO: 576 - DNA, 1502 bp, unidentified
  source 1..1502: mol_type = unassigned DNA; note = element_0631794
  misc_feature 1..2: note = core
  misc_feature 3..125: note = LE
  misc_feature 126..1217: note = CDS
  misc_feature 1218..1502: note = RE
  misc_feature 1224..1474: note = bridgeRNA
agacggtatgtagtgaccgctccggcgtggaggggttgcgggccggggcctcactcacagaggttcgtgggttaccggacacgacgccccgtgcccggccttgccgacagttgtgggaggccccggtgtttaccgagcgtacgagtgtcgggctcgatgtgcacgcacgatccgtcgcggcagcggcgatcgatggcgtcacgggagagctcgtccaatccagactgaccccatcgcacgagcacatcctctcctggctgcaggatctgcccggtccggtggccgtggcctacgaggccgggccgaccggctttggtctctgccggacgctgagagaagcggggatccggtgtgaggtggtggccccgtcgaagctgcaacgcccggccggcgaccgggtgaaaaccgatgccaaggacgcggtgcacctggcccggttgctgagattggatgagatcacgcccgtggcggtgccttccgtcgaccaggaggccgcccgcgacttagtccgagccagggaggactgccgaggagatctgatgcgggcccgacaccggctctcgaagctcttgctgcgccagggcctggtctattccggcggccaggcgtggaccggcgcccaccacacctggctggtgcaccaggcccagccgcagctgctccagcgtgcgactcggttagccttcgatgccgactatgaaacggtcatggttactctgatccgccgcaaccggttggacaaggacatcgcggcgatggccgcggaatctgagttcaccccggtggtgcgacggctcggttgcctgcgtggggtctccaccctgaccggattcgccctggccgtggagatcggggactggcaccggttcaccggaaacagcattggatccttcgtcgggctggttccctccgagcattcctccggccagacccggtctcaggggccgatcaccaaagctggcaacacccatgtgcgccggcttttggtcgaggccgcctggcaccaccgggcccggtacaccatcggcaagaccatgcgggatcggtgggacctggccccggggccggcccgggcccgcggcgatgccggcaaccggcgcctgcacgagaggtgggtgcggttccttgcccgcgacaaacggggcacggtggccaacgtcgccgtggcccgggaactggccggttggtgctggtcgctggccgtgatgggcgactgaacccacagactgcttcgtctctcgtggtgccggtggcagcgcctggagcgacccgcgattcgactatgagcaaccgggccaggcccggcgacgctcgactctagacacgcgatcccgctcctgccgaacaccccgtcctgcggtatccaacccgcgcatatcagtctgaccgcgcgtcgatcattgacacgctcaccggactcggaaggcgaagcaagaggcgcccgccccacgatcggggacgggcgcctcaccctgccacttgacagacgtccactacatatc

SEQ ID NO: 577 - DNA, 1355 bp, unidentified
  source 1..1355: mol_type = unassigned DNA; note = element_064629c
  misc_feature 1..5: note = core
  misc_feature 6..241: note = LE
  misc_feature 242..1306: note = CDS
  misc_feature 1307..1355: note = RE
  misc_feature 29..224: note = bridgeRNA
cttttatttttactgagaattttaaaaaggtcaatatattgttgttatgcaaaatgtgttgactgttcgtgtcaggtcattgggggctaggtaagctttatgctataccgtaaaaaaggtttggccggcacgattttattctcaggagtctgaacagtacttaaggccatgaatatgagcctggataaaataaaaggatagacgaaggggaattaagtcgatacgatttaaattcttgattatggctattacaaaacaatcagttgggatagatatctcacaagctacatttacggtatgtctatgtcagcgttcagaggatggtaaattaacattctcaaagatcttaacctttggcaatgattctaaaggtttcaatcagttgcttcgctgggcgaagggagttattgccagcggaccagaacttgtatttctgatggaagctacgggtgtgtattacgaaaacctggcgcaccatcttcacaaaataaagaaagcagtacatgttgtgcttcccaatacctccaaacactatttttcaagtttaaatgttaagaccaagacagatgccgttgatgcaagagtactaagccaattcggcgtagagcggacccacaagctgtggaatccacctcctgcagccttgttacagcttaggaatctaaccaggtattatgttcagttgcaggaacaaaaaactgcccttggtaacatcaagcaaagtaaggacgcttcacacgaagtccagtctttcattctcaaaagcaataaaaagttaattgcggagatcgacaaagaaattgcaaaaacgctaaaggagatcaaaaggcttgtagaaaccgataacagcctgaaagaaaaaataagaaagctgtcaacaataaagggtgtagggctgattaccatagccactattctggccgaaacaatgggattcgagcaatttaaaagcgccaaacaacttgtaagctatgcgggctatgatgtagtgcaaagagaatcaggcacctccataaaaggaaagaccagaatctctaaaaaaggcaatcggtacataagaaacgccttgtacttcccagcaatggtcgcttgcaggtttaatcctaccctaaaagaaatatatacaagaataaatcaacaaaaaccatcgaagatgattgggcaggttgccatccaaagaaagctattgatactgatctatactttatggaagaataatactgagttcattgaggcctataaagaaagtagtcccaacccgaaagctgagactacgctagatagttcaatagtggaacttctttgaaatacaaaaatacttttttgtcttaaatgtttggaatttaaaacagtac

SEQ ID NO: 578 - DNA, 1365 bp, unidentified
  source 1..1365: mol_type = unassigned DNA; note = element_0658f5c
  misc_feature 1..2: note = core
  misc_feature 3..297: note = LE
  misc_feature 298..1104: note = CDS
  misc_feature 1105..1365: note = RE
  misc_feature 1130..1353: note = bridgeRNA
tgatgctatggacggctcccacccagcggtgaggtagcatggctgcttcgagcagccaggagcccaggagcagcccataagcacggtcactaccattggtctggacatcgccaaatccgtcttccaggtgcacggcatcagcgccacgggcgaggtgctgatccggcgtcaggtcaggcgaggacaggtgctcaagttctttacctccctgcaccctgcctgatcggcatcgaggcctgtgcctcggcccattactggtcgcgggagctccagagcctcggccatcaggtgaagctcatgccgccggcctacgtcaaaccgtatgtaaaacgacagaagaacgacatggccgatgccgaggcaatctgcgaagcggtgacccggccgaccatgcgctttgtcgagacgaagacgtgtgagcagcagagcatcctgatgttgcaccgggtgcggctgatgcaaatgcgccagagaaccatgctcacgaacgccatccgggcccacctggcggagtccggcgtggtggcgaagataggccgtgaaggtgtcgacgagttgctgctgatggtccgtgatggagacgaacgcgtgcctgagctggcccgtgcctgcatcctggcgttggccgagcaactggtgctgttcaagcgccagatcctggagatggaccggcgcatcaccgcctgccaccgcgccagcgaggtcagccgccggctggccgagatccctggcgtgggtccgctgctcgcctccgctctggtggcgcatgtccctaatccgaaggctttctcctcaggccgtaatctggcggcttggatcggtctggtgccaaagcagaactccagtggtggcaaggagcggctcggcggggtgaccaagcagggcaaccgctacctgcgatccatgctgacggtgggcgcgctcgcagtgatccgctttgcccagcggcatggaaccaagcggccgtggatcgtgcaattgctggcgcggcgggccaccaaggtggcggcggtggctctggccaacaagatggcccggatggtgtgggcgatcatggccaagggtgaacgctatcgtgagccggtcgtcgggcaggcagcgtaacatctcgtcggaacacctgacgagaccgaggttggaaagggcgaaaggacgttaatgcaggatccggtcgaaccgggaagcgggacaccccattcgtgccagagcatcgtggaatgccaggaattggtcgggaccccttcgcggagggcattatggccagcggtcatgagcaccgcagcaacaggtcgaacacatggccgcgccgaccagccttgcaaaagcgtcaaacaaatcccttgccaacggagagccgtccacaca

SEQ ID NO: 579 - DNA, 1851 bp, unidentified
  source 1..1851: mol_type = unassigned DNA; note = element_065a83e
  misc_feature 1..3: note = core
  misc_feature 4..238: note = LE
  misc_feature 239..1453: note = CDS
  misc_feature 1454..1851: note = RE
cttatatgttactatttttacaagcccttacgaccaagggctggcaggggtctccctgctggatacgcactgccggggaaaggctttgttctccacacggctcgaccgatacagaaagatcgtccttccctgggcagccttcctgggccaatcgatgattggagggacgttgcttcgagcacccggtatataaggacccgatcctcccaggaattgcgctagcaaaggaaagacgaacatgtggtacgttggactggactgggccgacacccatcatgacgtagaggtgcaagatgaaactggcaagcgtgtgggagcacgacgctttgcccacagccacgacggcttgaacgaattgaaagcgtttctgctcggcattgcggcttcgcccgaggagctggcctgcattgtcgaaacgaaccacggcttgctcatcaccttcctgctggaagccggcatccccgtgtacccggtgaaccccaagagcgccaatcagttgcgcaaagccgccggagccaagactgaccgcattgatgcgcatctgctggccaagttgggtcgctttgacctggcggaactgcgccgcttggagccggatagcctcagcgtggctgagttgaaaacgctcacccgcgatcaggatgcgctgatccagacgcaaacgcgcctggtgaaccagttgacggcctgcctcaaggagtactacccggcggccttgcagctgtttgccaaggtgcagcagcgctccacgctgctgtttttgcaggcctatcccacaccccaagccgccctggccgcctcggtggaagagatcacggctaccttgcgcaccggcaagcataccaacccaaccaaggctgctcccaagatcgttgcggaactgcaccgtccccagttgctggcaagcgaggtcatcgtgcgcgccaagtcgcgcttgatgctcgcgttggtcaagcaactgctggtcgtgatcgaggagatcgccagctatgacaaggccatccgccccctttttttgagccatcctgaccaggagctgtggagttcgctgccgcgtgctggtaagcgcctggctccacgtctgctggccgaatggggcgatgatcgcagccgctatgccgatggaacctccgtccagaccctggccggaaccgcgcccgtgccctatgaaagcggcaattacgccaaagcgcacaaacgcttcgcctgctccaagccgctgcgcaacgccttgcagcagtttgcctggcaatcgacgttgtccgaaccttgggcgttggcctactatcagcgcaaacgggcgcagggcaagacccatagtatggctctgcgcgccctggccaacgtctgggtgcgcatcatctaccgcatgtgggtgaacaagaccagctatcagaccgcgacgtttgaagcggcgcagcggactcatgcgccccggcaacgcatcgcctgagtcgaagcggcgcctttccttcacgccccgttggcgacgctcagcgctgcgaagtccttcgccagtgcagcgagcctgtgctccaacggagtcgcccaaacggttcccgtcgcgtcctttctgccgaccgtgagccgcgcccgctgcaggtcctgtcgctccaacgtctgccgcagcccgccaccgcgttcccgactcccggtgtgggttgctggcacaagaccacgccgagtcaaggccggaccgaggccagggggtgtgcaaaccggggtggctggcctcggtccgctcgtcttggccttgaccggtgtggtacacttgcttccccacacgggaggcagcttcactcacactcaccttgttttcctttcacgtttttggctcttgacatagagggt

SEQ ID NO: 580 - DNA, 1311 bp, unidentified
  source 1..1311: mol_type = unassigned DNA; note = element_065de92
  misc_feature 1: note = core
  misc_feature 2..67: note = LE
  misc_feature 68..1090: note = CDS
  misc_feature 1091..1311: note = RE
  misc_feature 1102..1297: note = bridgeRNA
taatgggatggactacctcctccctctgcggttaactgttctaaatatgcgcaccaggagaatcaccatgagtatcgtatttctgggtattgatctggctaaaaatatctttcagctctgcggattaaatcaggctggtaagccggtttatacaaaacgcactggacgaaaagaattactccggactgtggcgaatattccggcatgtctgattggtgtcgaggcatccactggggcattttactggcaacgtgagtttgaaaaactgggacataaagtaaaagttattagtcctcagtatgtgaaaccttttgtccgcggccaaaaaaatgacggcaatgatgcgcaggcgatagctgtggctctgatgcaacctacgatgcagtttgttccaccgaaaagccctgaacagcaggatattcaggctctgcaccgcgcaagacagcgtattgtcaatcatcgtactgcgacagtctgccaaatccgaggactgctgcttgaccggggaataacaatcggcgcggcagtttcaagagtccgtcgtgccgttccgcttatccttgaagatgctgaaaatggtctcagcgtcagaatgcggaggacgattgcagaactctatgatctctttaacgatcttggtcgtcgtataaacttttttgataaagaaattgatgttgtgttcaggcaatcagaagcctgtcagcgcattgccaaagttaaaggcattggccctaaaacagccacggctgttgttgccgcgattggcagaggaaccgaatttaaaaatggtcgtcactttgccgcatggcttggtctggttccacgacaacactcgagtggcgacaagcaggtgttgatgaatatgacgaaaaaaggcgacaagcatttgcggacgctttttattcatggtgcccgcgctatcgtcagagttgccacgaataacaatgatggctgtctgcatcagtgggttaaccagttgaaggaacggcgcgggtttaataaaacgaccgtggcggtcgctaacaagaacgcgagaataatttggtcgatgctgagaaatgataccgagtatcaggcagttggaagttagtacccagccaaaagagttgcagtgtactgaaaaatggtgacaggttgcacctgcacaatcggaacctgactattatattggcctcagaggccgtccagttgttgaggcgattgtgtgcggattacccatttgggcacaggttagtattcctgatgccggatagatgcaagcaacaacccaaaaccagattcagtacttgcaaaacggaggtagtccataga

SEQ ID NO: 581 - DNA, 1494 bp, unidentified
  source 1..1494: mol_type = unassigned DNA; note = element_0660fbf
  misc_feature 1..2: note = core
  misc_feature 3..298: note = LE
  misc_feature 299..1474: note = CDS
  misc_feature 1475..1494: note = RE
  misc_feature 14..246: note = bridgeRNA
ctaatgagttctgggagccagccatccggcagactcctggtggataggtagccgctggcgggtgagcactcgttcctcctggacgttgagtcctgacgaaagatcgtgcccccgccggtcggttgggagagttgatcgctgatgggatgtcgtgcccgcccgaggagggcgtgagcactgcttcattaggtcgctgatggttctcccgctggctaccgtgcgtggaactcgaggacgggagctgcggtgctgttcgtgggagacgactgggcggaggggccatcacgacgttgagctgatggacgccacgggtcgcacccttgccagggcgaggctgcccgagggcgtggcggggatcgcgcggctgcacgcgatgatcggcgcgcagctcggtgacgacgtcgaggacgccgccgggctggtcaaggtcggtatcgagaccgaccggggcctgtgggtggccgcgctggtcgccgccgggtacgaggtgttcgcagtcaacccgttgcaggccgcccgctaccgcgatcggctgggggtgtcgggggccaagagcgatgccgctgacgcgcacatgcttgccgacatggtgcgcaccgacgcccaccagctgcggccggtggctgccgacagcgctgaggccgaggcggtcaaggtggtggcgcggatgcacaagaccctgatctgggaacgcacccgcgccacccagcggccgcggcatgcgctgcgcgactacttcccggccgcgctggtcgccttcgacgacctcgacgccgccgatgccctggagctgctggccaaggcccccgacccggatcatgcggcgcggttgagccttgctcagatcagcgcggcgctcaagcgcgcccgccgccgggacatcccgaccaaggccgcggcgatccaggccgcgttgcgcagcgaacagctgcggcagccggccgtggtcactacggcgtacgcggcgtcggtccgcgccctgatcgcggtgctgagcaccctcaacgagcaggtcagtgccctgcaggggcaggtggaggcccattttggccagcacccggacgctgagatcatcctgtcccagccgggactgggcgccgtcctcggcgcccgggtgctcgcggagttcggcgacgccaagcagcgctacgcctcggccaaggcccgcaagaactacgccgccaccagcccggtcacccgcgcctcgggcaagcggaaggtggtcgcggcccggttcgtgcacaacgaccggctcatcgacgcgctgatgacccaggcgttcgccgcgctgcgcgtctcgcccggggccagggcctactacgaccggcaacgcgcccgaggagccacttacaacgccgcgctgcgtcaactggccaaccggctcgtcggcatcctgcacggatgcctgaggaccggccgcctctacgacgaggcgaccgcctggtcgcatcacctcaccgaggctgctgcttgacattcaagctcctgggatgt

SEQ ID NO: 582 - DNA, 1140 bp, unidentified
  source 1..1140: mol_type = unassigned DNA; note = element_067a758
  misc_feature 1..2: note = core
  misc_feature 3..168: note = LE
  misc_feature 169..1125: note = CDS
  misc_feature 1126..1140: note = RE
  misc_feature 10..183: note = bridgeRNA
cttgtatcttctgggctcggaccggcccaggtagcccgacgcgcctctgggttgatcgttgaagcccgtgcctgagctacgggcgcctgggctggaccgtcctactctgcaacccgaacggttgtaggaacgcgaagttcgcatagacaaggatgggagcgagaggacatgtccgagcccgttttcgtgggaatcgacgtctcgagtcagacgttggaggtggccggcagcaaccggtctgagacctggcaggtcggcaacgacgctggcggcatcgaccagttggtgcagcaactgcaggagttggcgccggcgcttgtcgtgctcgaagccactggcggctacgagttcgaggccgcgtgcgcattgcaggccgccggtctggccgtggcagtggtcaatccacgtgctgcacgcgacttcgctcgggcgatgggcgcactggccaagacagacgccctggacgctcgcatgttggccgcctttgctcgcgtgctgcatcaacacccggagcgcgaacgcttcgtcaagccactggcggacgccgagctgcagcggcttcgggcgctcgtgctgcgccggcgccagctcgtgcagatgctgacctcggagaagcagcgcaagcgcatcgcgcatgccgctgcgcacgcgagcatcgagcgtcacatcgagttcctgaccaaggagctgtctgacagcgactccgacgtggccggccacgtgcaacagcaccatgccgcgctggctgaggcgctgcaaaccgtgccaggcatcggggccgccagcgtggccgtgctgctggccgaattgcccgagttgggcaagcttgaccggcggcgcatcgcggccctcgtgggcgtggctccgttgaaccgcgactcaggccagatgcgcggtcagcgcgccatttggggcggtcgccacgacgtgcgtagaacgctctacatggctacgctcgtggctgtgcggcactgcagcgcgttcaaggccttctacgagcacctggtcgagcgtggcaagcgcaagaaagtcgccctcgtggcggccatgcgcaagctgttgaccgtcctcgatgccatcgccaagcagggctcccgttggaacccgatgctgcacgacgcttgacgaacaagacggttg

SEQ ID NO: 583 - DNA, 1358 bp, unidentified
  source 1..1358: mol_type = unassigned DNA; note = element_0682c12
  misc_feature 1..2: note = core
  misc_feature 3..90: note = LE
  misc_feature 91..1101: note = CDS
  misc_feature 1102..1358: note = RE
  misc_feature 1077..1346: note = bridgeRNA
tgatggggtggacgccccccgacggcatctgcgtgccaaggtgacggcgtcgaaccgtcactgaaggaggcgtccgtggagcaggctaccatgatcgggttggacatcgcgaagcacgtgttccaggtgcatggagccgatgctgtcggacatgtgctgttccgcaagcgtgtcacccgcgcgaagctgatcggcttcctggcggcgcaaacgccctgcgtcgtcgcgatggaagcctgtgccggcgggcactactgggcacgcgagatcagcaagctgggccatcgtgtgcgattgatcgcgccggcctacgtcaagccgttcgtcaaacggcagaagaacgatgcggccgatgcggaggccatctgtgaagcggcgcagcgcccgagcatgcgcttcgttccggtcaagaccgaggagcagcaggcgaacggcatcgtgttccgagcccgcgatcttttggtgcgtcagcgtacgcaatgcgtcaacgctctgcgcgggcacctgtttgaatacggctacgtctttccgcagggcatcacccatgttgcaaccctggtcgccctcgtcgaggacccacgatcctccttgcccgagagtgtgcgcaccattctgaagctgctggtcgacaccttcaccgcgctcgaggggcagatcgccgagcttgatgctgagatcaaccggcgctccaaggccgacccgaccgcacgtcggctgatgacgataccgggcgtggggccaattgcctcgacggcaattacagcgttggtgccggccgcggaggggtttgcggcaggccgtgactttgcggcctggctcgggctgacgccgctgcagaaatccaccggcggcaagcaaaagctcggcgccgtctcgaaacgcggcgaacggacgatccggcgcttgctgatcattggggcgagtgccgtggttcaacaggccagccggcgcggggcacccaagggatcgtggcttgcccagatgttggctcgcaaaccgaagatgctggtcaccgtggctctggccaacaagatggcccgcatcgtctgggctctgctggtcaagggcggcatctacagagctccggtcgcggcggcgtaggctggatacgatcgcgacggcgtaggggtgagcggaaggagagtatggcgcaacagtcggcgagacggggctgggacaaccagggctttccacagtgcttcgagcacgcttcgggtgatctggacctagtccgcgaactcccatacaggccggcggctatcgtcctgccgcattgaaggccggacagatgacagcatccgaccacgcgccactgcaatcccgatgttttcccttgcctggagcggggcgtccacaga

SEQ ID NO: 584 - DNA, 1471 bp, unidentified
  source 1..1471: mol_type = unassigned DNA; note = element_068972b
  misc_feature 1..2: note = core
  misc_feature 3..226: note = LE
  misc_feature 227..1450: note = CDS
  misc_feature 1451..1471: note = RE
  misc_feature 6..227: note = bridgeRNA
ctaatgggactggatggcgatcagtttttgggtgatgctatccccgagccttcaatcggtgagcactgtgcattcccggactttaagtcctagtgacagaccgtgccccggttgaaaggtgaggacagcggagaaggctggaggggtgtcgtgccgtgagcactggtccattaggtcgccgccgttgcctcgggctcgagtgggttttctagacgggaggtaacgaatgctttttgttggagtggattgggcggaagctcaccacgatgtctgcgtcgtcgacattgaaggacgcgtactgggtcgacgacgaatcagcgattcgttggcgggcgtgagcgaactgcacgcgctcgtggctgaatcgtcgggtgacgtcgaggatgttcccgacgtgattgtgggcatcgagaaagatcggggcctgctcgtgaccgcgctcgtggcggccgactatcaggtcttcgccatcaatcccatggcggcggcgcactaccgcgatcgccaccacgtctcgggggcgaagtccgatcccggcgacgccaagatgctggcggatctcgtgcgcaccgatcgccacaatcatcgccgggttgccggcgacagctcgtcggtggaggccgtgaaagtcctggcgcgggttcaccagaacaccatctggaaccgtcagcgtcaggtgaacgcgctgcgctcggcactaaaggactactaccccggtgcgctggcggccttcgggaccgacctcgcggatcgtgacgccgtgtctgtgctcttggtggcgccgaccccgacgttggggcgagcgttatcacgcgcgaaggtgatcagtgcgctgcgccgtggtgggcgtcaacgcaacctcgaaaagcgcgccgacgcgattcgaagtgccctgggcgaagagcaactagctcagcccgccgtgctcgagaacgcctacggcgcgacgacccgggccgcgttggcgctgctcacgcagttcaacgccaccattctcgaactcgagaaggccctcgcggagcattttgaacagcacccgagcgccaagatcatccgctccttaccgggaatggggacggtcttaggcgcccgggtactgggcgagttcggggacgacccgaaccgctacgccgacgccaagtctcgcagaaactacgccggcacgtcgccggtcaccagggcttcgggaaagtccaaggtggtgttggcgcgccgccatcgcaacaagcgactagccgacgccctcgatcaatgggccttttgctcgctcaacttctcgccgggcgccagggcgtactacgaccaactccgtgcgcgcgagaagactcatcgcaaagccgttcgccaactggcgaatcgctgggtgggcatactgcacgtctgtgtcgaacgaggctgtctttacgacgaaacgatcgcctggaccaaacgagaagacatcgccgcttgacaagttagggacaaggggtgt

SEQ ID NO: 585 - DNA, 1567 bp, unidentified
  source 1..1567: mol_type = unassigned DNA; note = element_068e009
  misc_feature 1..2: note = core
  misc_feature 3..245: note = LE
  misc_feature 246..1424: note = CDS
  misc_feature 1425..1567: note = RE
  misc_feature 5..225: note = bridgeRNA
ctactattagtattgtcatagtcattctttaccttttctacaggttagactatgctattttaagatactgtggattggtttattcctcctaccacttgatggttcatatgaggctccaaccacagtctctttgttcatttgttaatcagttagttaccgcatgacggtttatcaggaagtaggttacaatcgcaaggagtcctgtggtctcaaaacagtatcaatacatttttaggaggtcctatatgatttttgtaggaattgatgttgctaaaaataagcatgattgctttattacaaacacggatggagaaagtttatttaattctttcaccatcaccaacaatctcgatggatttaatgacctctatcgaaaaatatcatccgttactgaaaatataactaaagtaaaagtaggactagaagccactggacactatagttacaatcttctcggatatctcttagataaaggtttcccgacctacgttatcaacccgttacatactaatctgtacagaaaaagtctaagccttagacagaccaaaacggataaagtagatgcccgcacaattgcttctatgctgatgtctgacgtgaacttaaagtcctactcagatacatcttaccacaacgaagaattaaaatcactgacccgctatcggtttgataaagtaaaggaacgctctgcccttaaggtatctatatcccgacttgtttgcatccttttccctgaacttgaaaaccttgttccgactctccatatgacatccgtctattctttgctttatgaatttccgggggcttcttttgttgcatctgctcatcttacacgactggcaaatctactttccaaagcctctaaggggcattacaacaaagatacggctgtcctttttcgccaaactgccagagactctataggttctgttatgcctgcaaaatctttggaattaaaacataccatcaaactcattcaggaactaacttctgaaattgatgaaattgaggcagctatcaagcagatcatggatgaagagattaaatctcctattctcaccattcccggcattagttaccggatgggagcaatgatcattgccgaaatcggtgacttcaatcgttttgattcagcagataaaatactggcctatgctgggatgtctccatccacacaccaatccggtcaactggataactgtcattcccgtatggagaaacgtggttccagatatctccgctatgccctttacaatgcgacaaaatatgtctgccattgggataaatctttcggtgcatatcttgagaaaaagcgttctgaaggaaaacattacaatgtagctttatctcatgctgccaaaaaacttgtcagaactatctttgcaatggaaagatccggacacccatacatagcatccgtttaactctttctataatcattttctttttagggtacctacaaagatgctcttattgtcatgcagttttcaaggtactgattgcaatgaaaagtcattgacactttttcaaaaattcttttttaacttgactttctttaatagttagt

SEQ ID NO: 586 - DNA, 1355 bp, unidentified
  source 1..1355: mol_type = unassigned DNA; note = element_06922c1
  misc_feature 1..3: note = core
  misc_feature 4..84: note = LE
  misc_feature 85..1104: note = CDS
  misc_feature 1105..1355: note = RE
  misc_feature 1118..1342: note = bridgeRNA
ggatgaggtggatggctcctgctcccccggcatcaaatgtgccacaatgcagttgtcatcaactgcttggaaaggagccacccaatgtcagtaaaaacagtcagcctcgatttggccaaggatgtttttcaagatcacggtatttctgagaacggtcgcgtgatcttcaacaaggcaatcaaacgcgcaaagttgctcgcgttcttcgagaatttgcccccttgcatagtcggtatggaagcctgcggatcatcgcatcactgggggcgcacttggcgcaagctcggtcacgatgtaaggttgatgcccgcgaattacgtgaagccttatgtcaaacgcggcaagacggatgctgtcgatgcggaggcaatttgcgaagcggtcagacggcctacgatgcgctttgtcgaaatcaaaactgagaaccaacaggccgttctctcgatccatcgcacccgcgatctcgctgttaggcagcgtacacagatggccaatatgatccgaagtctattgcgcgagttcgggcatattttgcccttaggcgttgaagcggtaactgccttttcaaagcgccacctcgatggtgatcaaccagacatgcccgatatcgcaaacggcatgctcgagatgcagtgctatcagtttattggactaagtgagcgcattgcgggttataccaaaatgattgaacaacacgctttgctgagcacggatgcacgccggttgatgggtatgccgggaattggcccaatcacggcatctgcgattgtcgcaaccattggcgatgcccatcagttccgaaccggtcgtgatctggcggcttggctcgggctcaccccgctcaataaatccagcggaggaaaggaacgattgggcaagatcacgaagaagggtgatcgctacattcgcaaactgttggtcgtgggcatgacctctcgtgctgtgatggcaaaacgttcgccagaaaaggtcgaccttcggacagccaaaatcattgccgacaagccgctccggtcagcgacaacggcgatggccaacaaagcagcccggatcatctgggcgatgctcacaaagaaacaggaatatcggcagccaacgttctaaccgcgccgactgccaagagatgcaagacgttgaagtgatgatgcggaattaagtcaaccaagagcaaggacactccgggaaggtccgcggcccattgaggtcgtttagccgaacggaaactcgctcgcggaactcatcagggccagtggaggcaatgccgaaacataaacaggccggacacacgactgttctgactaaaaagaccgcaaacatcgccagaaaacgcttgcaatgcaagagccatccacaca

SEQ ID NO: 587 - DNA, 1378 bp, unidentified
  source 1..1378: mol_type = unassigned DNA; note = element_06930e7
  misc_feature 1: note = core
  misc_feature 2..70: note = LE
  misc_feature 71..1099: note = CDS
  misc_feature 1100..1378: note = RE
  misc_feature 1135..1373: note = bridgeRNA
caatggtatggaccccgccgccttcaatcggcgatcctttaatgatcgcaactgggaaaggagaactaccatggaaattgtacgaattggtttggacttggcgaagaatatctttgaggtccacggtgtagatgctgaggacaaggctgtcctgcgaaacacattgcgacgggatgcagtcgctcagttcttcgcagatttggcaccatgcattgttggaatggaggcctgcagtggctctcactattgggcaaaggtctttgctgaccttgggcacgaggtgcgtttgatctcaccgcagtttgtgaggccatatgtgaaatccaacaagaatgaccgaaacgatgcggaggcaatttgcgaggcggtcagcaggccgtccatgcgcttcgtgccgccaaaatcgtcagaacagctcgagacccaggccgttcatcgtatccgccagaggctagtgtcagataggacacggctggtaaaccaaatccgaggtttgttggcagagcatggtttggttgtcgcccgcgatatctcgcgccttagatatgcgcttgggcggattgcggatggcactgacaataacttagggcacataatctctgagttggcttgcgatgtgcgcgacgaactcagcgaactggatcaacgcattgctgcctacaacaagcgcatcagagacctcttccgctcgaatgaaatgtgccaacgtattggaaaaattgaggggattggaccaataacggcaacagcactggtcgccgctgtaggcgaccgaacgtgcttcaagaacggaagacagtttgccgcttggcttgggctcgtcccgaaacagcgatccagtggcggtaaatcgcgcttgtttgggatcagcaaacgcggtgatcgatacctgcgcaccttaatgatccatggtgcccgtgccgttcttgcgaagagcggtggaaagacggatcccagaagtcagtggattgaaaggatgcgcgagcgacggcatcccaatgttgtcgccgtcgctgtcgcaaacaagaatgctaggatcgtctggtccctcttgtcaggcgacaaagcctatcaaccaactgcaccagcacaggcataactcctaaaaccgtttaaaaagatcaatgaaacccggaatattgcagcaacttggcatgggatggtgacaacgacacgaaccgtagcttcttgaacctggtgtgtggatcggcatagcgaaagttgatgccttggagccaatgagggagaggcatgcggaaatccatcggggctcgcggcgacgatatatcgggccgcataaagaagccggatatacgtcagcaatcgtgatctcgaaaccagaccaaaaagagcgttgcaataaggcggggtccatata

SEQ ID NO: 588 - DNA, 1453 bp, unidentified
  source 1..1453: mol_type = unassigned DNA; note = element_0694b8f
  misc_feature 1..2: note = core
  misc_feature 3..163: note = LE
  misc_feature 164..1201: note = CDS
  misc_feature 1202..1453: note = RE
  misc_feature 1217..1448: note = bridgeRNA
agatggtgtaacgggccaccaagccgctcacttcgctacggcgctgttgagttgcgcgctcagctcgtggcttgctttgggagacagggcgatcgtccctcacaatgatggtgtgaaacggagtcgggactgggcccgctccaagcatccaggagagacgaccatggattattatgccgggatcgacgtgtcattggaatactcgagcgtgtgcgttgtcgacgcaatcggcaagatcgttcgcgaagccaaggtggagagcgaacccgaggcgctgattgcctggtttgcgtcgcttggcgttgggctggcgcggatcgggctcgaagccgggccgctgtcgcaatggctttatgcagcgatgcgagaagcgggactttcggtcgaacttctggagacgcgacatgtgcgggacgccttcaaggcgatgccggtgaagtcggaccgcaacgatgcgcgcggcatcgcccagctgatgcggcttggctggttccggccggtgcattgcaagtcgctggcggcacaggaggtgcgggcggtgctgacggcgcgcaagctcgtccagtcgaagctgcgcgatgtcgagaacagcctgcgcggcattttgcgcggcttcgggctgaaggtcggcaagacgacgccgctcagcttcggcgcccgcatccgtgaattggtcgccagccacccgaacctgaagacggtggcggcggggctgctttcggtgcacgccgtgctcctgcgcgaattccaggctttcgagaaaaaggttcgtgcgctggtgcgccaggacgcaagagccaggcggttgatgtcgacgcctggggtgggtccggtcgtggcgctgacctatgctgctgcgatcgacgacccgggacgatttgcctcctcgaaacgggtgggtgcgcatttcgggctgacgccgaagcggtatcagtccggcgagaccgactacagcggcaaaatcagcaagatcggcgatgcggctgtacgaacggcgctctatgaagccgcccacgtcatactgaccaagccgctcagggcctgcaccgggctgaagagctgggcgatgcggattgcccgtcggggcggcatgaagaaggcgaaggtggcgctggcgcgcaagctcgcggtgatccttcatcgcatgctcgccgacgaaactatcttcaatcccgcagtcacgccgatcgcagtggcatagaaaaggagaagcagggttttcgggcgggtcacgacaccaggccttcccaaagcggagtcccgtcgtcgggacgatggatcaggtcagaccgttgtagtgcaggtggcatttcgaccccgcgtctttagattggtcggcctatcctcttcagacgccatcaggtggcggccacgcgccgaccccgtacagaagcaagaccccggcgactggacgacgcaaaagagggattgactcatcgaggcccgttacaga

SEQ ID NO: 589 - DNA, 1327 bp, unidentified
  source 1..1327: mol_type = unassigned DNA; note = element_06a7c76
  misc_feature 1: note = core
  misc_feature 2..69: note = LE
  misc_feature 70..1110: note = CDS
  misc_feature 1111..1327: note = RE
  misc_feature 1109..1315: note = bridgeRNA
ctatgtatggactcctccaacctaatttcttaggttggaagtcgaccaaaaccctaagggagtccatacatgacacattcaacaacagtcggggtcgacttagcaaaaaatgttatccaagtatcggtggtttccgctcgcggcaaagaactttccaaccgctcacttacccgccgcaagttcgcggagttcttaggtaaacagaagccatcactggttgcattcgaggcgtgtgcaacgtctcattactgggcacgagtggcacaacgtcacgaacacgaagtgcgcattattccggcgaagtttgttgcaccgtttcggcaagggcacaagacggacagcaacgatgcgctcgctgtagcggaagccgcacgccgaccgagtatcaaggaagcaccgatgaagacggtagagcaacagggtctgcaggcgattcatcgttcacgccagcttctgatccaggagagcacggcattgtcaaaccacttgcgcggtctgctcatggagttcggtgttgtcattccacaaggctttgcctcattgctgcgtacggtaccggaggtcctggaggacggcgagaacgagttgccggatctgtaccggccaacattgcatcgcatgtacatgcgcctgctcgaactgcgcgagcacatcgaagcgatgaccagggaagtcgagatactggtgaaggagcatcctgtctgcagtcgcctaacagcactggaaggtatcggccctatcggtgccttgttgctgtacgccacgttgggttctggcaatgcgttcagcggcagccgggagttcgcggcctatcttggcttggcgccgcggcagtacagcagtggcggcaaaaccaacatcgtcggcttgagcaagaagatcggcaactgccgattacgatcaatactaatcctgggtgctcgcgcctacacttaccggctcaaggaaccgaagagcacgaaggatcgttggttaaagaacgccatcgatcgcaacggccacagtcgagcggctatcgcgctcgccaacaagaatgtaagaacagcctgggcgatggtgacccagggaacagagtatcaacgtcgaggccaactgaaggtggctgcctaaacgtcctgcaaacaaagaccttaaatcagataaagatatctgctccggtgaaacctacaccgctttgaggccctagagcccattgacccttagaggagccggagtgcgcatacacatagtgggccaggagatagcgtctccaaacaaaggccagatatacattcgcgtctgaattctgattaaagaaattgtttgctagactggaggagtccatata

SEQ ID NO: 590 - DNA, 1265 bp, unidentified
  source 1..1265: mol_type = unassigned DNA; note = element_06be574
  misc_feature 1..2: note = core
  misc_feature 3..75: note = LE
  misc_feature 76..1008: note = CDS
  misc_feature 1009..1265: note = RE
  misc_feature 1033..1262: note = bridgeRNA
ttaataggatggtcagcccgatcctcacccagcggactacgctgagtgaggattttgtccttctggagggccatcatggacacggtatcgctagtcggcatcgatctgggcaagcactgcttccacctgcatgcgcaagacgcgtcaggcaggatggtgttccgcaagaagctcacgcgcagccagatgttcgcgctgctgggcaattttccgagttgtaccgtggtcatggaggcctgcgccggtgctcactggatcgcccgccgacttcaagcgctgggccacgaggccaagctaatttctccccacttcgtcaagccgttccggcaaggcaacaagaacgacttcgcggatgcgcaggcgatctgtgaagccgcttcgcgcccgagcatgcgcttcgtgagtccgcgtaacgaagcgcagcaggtcgtatcagccttgcaccgcgtgcgcgaggcgctggtgcgggagcgcaccggtacgatcaaccagattcacgcatttctgctggagttcggtatcagcctgccgcgtggcatggcggtgatccgcagactgccggccgtactggagacgcaagcgttgccgcccaggctggtggccgtgctcgaacggctgctggagattcccggcatcgggccaatcaccgccagcgtgttgatgtcggaattgggcgacgcccatcaatatgattcggcaaggcagtttgccgcttcgatcggtctggtgccgcgacagtacagcaccggcggcaaaccaacgctactgggcatcagcaagcgcggcgacaaggaactgcgacggctgctggtgcaatgcgcgcgggtcatcatgctgcgcatcgagcgccgaacggattccttgggcacctgggtccgcagcctgttggcgcgacggcactccaacgtagtggcttgcgcgctggccaataaattggcgaggatcgcgtgggccatcctcgccaaagggacacactacagaagcgcgccggcggctcttgcggcctgacgcttccgatcgcttacggcttcagtagtcacacctggttttgcgacgcgagatacgtgaaggcataaacgactcaacggccgggcaagtaacctgacaacaaaaacagcatctcgatgctgagcgctttttgaggtttgcccggcgcggctcccatcatggggcgggatcattcccatccgcgaccccggatagattcgagcaagtccactttaggtcaacactgcctcgcttgcaaaaatcgggctgaccataga

SEQ ID NO: 591 - DNA, 1168 bp, unidentified
  source 1..1168: mol_type = unassigned DNA; note = element_06c35ee
  misc_feature 1..2: note = core
  misc_feature 3..217: note = LE
  misc_feature 218..1156: note = CDS
  misc_feature 1157..1168: note = RE
  misc_feature 36..223: note = bridgeRNA
cttgtcttatgatttctgtgcttcttggtgcgataaagaagcgccggagaggacggccatccgtctccggcgatgggggacggatcgtgattccgcaggtcagccttcttaggaatgccggaccggtttagagtttgatcgcccccatcttttccaatcgtcctgaacggataccggagcttttggctcggatgacaagcataggagatcagaaaagatgaacgatattaccatcggtgcagacatctcgaaagaccatatcgacctgcacagtctgccagacggtcaaaccctgagggtcagtaatgaccgcaagggatttgccaccattgtcaggtggatcaccgaaaagggcgtggcgcggattgtctatgaaccgacaggcccctaccacaaggccttcgagcagttcatgatggcgcaaggattgccgctctccaaagtcaatccgcgccttgcccgtcgcttctgtgaagccacaggcaggctggccaagacagaccggatcgacgctgaattgctggcccgttacggccagttgcttgaaccacgcactctgaaagccaaccctcaaatccacaatgatctgaaagagttacacgccgcacggctggccctgatcaaggacaggaccgccacaaaaaacagggccaataaccttacaagcccgctcttgaagagacacaatgccgacaggctcgctcaggtcgagcgccagctcaaggccgtggaccacgccatcatgacaatgatcggcgcagatgcctccctgagcgccaggttcgacatcctcgtctcgatacctggcgtgtcgcagatcacggcctttacgctccttatcgagatgccggaactcggtcaactcgatgagaaggctgccgccgcactctccggactggcccccatgacccgccagtccggacgatggaacggacgcgctttcatcgccggcggcagggccatcgtccggcaagccctctacatgcctgctctcgtcgcctgccgtttcaaccccaatctcaaggccaaataccaccaactcaaagccgcaggaaaaccaccaaaagtcgccatcactgccgtcatgcgaaagctcatcatcctcgctaacgcactcctgcggaataagcgaaaatggacaccaaaatccgcttgatcaaaacggata

SEQ ID NO: 592 - DNA, 1406 bp, unidentified
  source 1..1406: mol_type = unassigned DNA; note = element_06cd010
  misc_feature 1: note = core
  misc_feature 2..229: note = LE
  misc_feature 230..1393: note = CDS
  misc_feature 1394..1406: note = RE
  misc_feature 13..244: note = bridgeRNA
ctacttgtttcatgaccgcaggatcggtgcctgcgcaaagctcggtccaggtgcccggcccgtcgctctcacatcggctgcccacgcttcgtcgtgtggctctctcatggcctgcgcgggtcgggcactgctgagcagggagaggctcaagaggggtttgctcagctcgaagtagcgctgccctccctgctcgccaaccagttgctggctcgagcagggaggacacaacatgacacgcgtggtcataggcatggatccgcacaagcggtcggtcacgatcgaggtgatggcgccggacgagacggtgctcggcggcggccgttacgccaccgatgagccgggcttcaccgccctcctgcgcgacgcgcagcggtggccggaacgggtctgggcggtcgaggggtgcagcgggatcggtcatcacgtcgcgacccgactgctggcccaaggtgagcaggtggtggacgtcccgccgaagttgtcggcccgagcgcgggtgttctccaccgggcagggccgcaagaccgacgccaccgacgcgcactccatcgccctggtcgggacctgcatggccgggctgcgaccggtagtcgacaaccagcagctcgccgtgctgcgggtcctggccgaccggcgacggacgctcggcgaggaccacacccggatggtcgcccagctgcaccacctgctgctcgagctcatacctggcggtgcgaagaaggatctgtcagcagcacaggccaaggcgctgctggcgaaggttcggccgcgggacgccgctggcaagacccgccggcgcgtcgccgcggagctcatcgcggacctcgaacgggtttacgcgcgcaagaaggccgccgacaaggagcttcgggagcttatcgaagccaccggcacctcgctgctgaccttgaacgggatcgggccgtcaggcgcggccaggctcttgatcgacgtcggtgacatcatccgctttcctaccaagggccacttcgcttcttggaacggcaccgccccgctcgacgtatcctccggcgaccagatccgccaccggctgtcgcgcgcgggcaaccggcagatcaaccggacgttgcacatcatggcgaccgtgcagctgcgcaacccgagcgaaggccgcgcctactacgaccggaagaaggcgtcgggccagacgtcgatggaggcaatgcgctgcctgaaacgacggctttccgacatcgtctaccggcacatggtcgacgacgccgtccgcgcggtgacgggcccgggaggacaaccgggagcggctacgcagtccagcgcggccggctcacatccccacaccggctcttcggacaagtcacgtcccggacccgccacgcccgaccctacgaccgtgctccctgccgcgtcttgacacagaggggagc

SEQ ID NO: 593 - DNA, 1154 bp, unidentified
  source 1..1154: mol_type = unassigned DNA; note = element_06d0c65
  misc_feature 1..2: note = core
  misc_feature 3..191: note = LE
  misc_feature 192..1139: note = CDS
  misc_feature 1140..1154: note = RE
  misc_feature 22..189: note = bridgeRNA
cttgtatcttgaatcccgagtctaaacaatggaatcattctccaaccgggcgtgatagaccgattcagccgaggtcgtctgagaccgaggagtagcccgggtcgtcacgcctttatcctgaatgagcccgaacagttgcacgggtcaacaagcccgcatcatgcaaggatgggccaccaagggaggcgatcatgacacataccccatggtttgtcggtattgatgtctcaaaggctcagttggacattgccctgcggccagaaggacggttcgccgtccccaatgatgagaccggatgggcccacgtgattgagcgcctgcaggccctcccggttgtgttgatcgtcttggaggcgaccggtggtcttgagctgccactcatcggggcgctcgtcgcggcgaggttgcccgtcgtggttgccaatcctcgacaggtgcgagactttgccaaggcaacggggaaacttgccaaaaccgattccctcgatgcgcagatcctcgcccattttgccgacgtcatccgtcctgtaccccggccgttgccagatgcgcagacgcacgcgctcgccgcgctccttgcccgacgtcgccaactggtcgagatgctgacggcggagaaaaaccgtctcgggagcgcgccccactccctgcacaagcgcctgaaggtccacatcacatggctcaaacgtgaggtgactcagaccgagcgtgcgctcgctaccgccattcgcgagagtccgctctggcgagaaaacgatgatcggctccgcacggtgccaggggtgggaccagggctcgcccggacgctgattgtgggccttcccgaattgggaaccttgaaccggaagcaaattgctgcactcgttggggtcgcccccctgaaccacgatagcggaacgctccgaggtaaacgcaccgtatggggcggccgtgcacatgtccgagccgcgctgtacatggcagccctggtggcgtcccgctgcaatcccgtcattcgcagtttctaccaacgcctatgcgaggcggggaaggctaagaaggtggcgctcaccgcctgtatgcgaaaactgctcaccattctcaacgccatggtgaagcatcggacacgctggggcacgcaggagatcgtgtgcccttgacaatgaagacagttg

SEQ ID NO: 594 - DNA, 1431 bp, unidentified
  source 1..1431: mol_type = unassigned DNA; note = element_06d6eff
  misc_feature 1..2: note = core
  misc_feature 3..83: note = LE
  misc_feature 84..1157: note = CDS
  misc_feature 1158..1431: note = RE
  misc_feature 1175..1418: note = bridgeRNA
tgatggggtggacggcgccccgaacggcatcaagcgtgccaagatggttgtcgttgagagcgccatctggaagggagctgtccgtgggcaagtctatcatcgatacctcgtctgtcacgcgcgtcgcgcttgatctggccaagagggtcttccgcattcacgcggtcgacgcaacgggctcgatcgtcattgcccgctcggtcaaccgccgaacgcttttgaagtttttcgacgcgcttccgcggtgtgtcgtggcgatggaggcctgttcctctgcgcatcgctgggggcggcaattgctggaactcggctttgcagcgaggctcatcccgccggcgcatgtgaagccctatgtccggcgcaacaagaacgacgcagccgatgcggcggcgatttgcgaggcggcggagcgtcaaggccagcgcttcgtccccgtgcgctctgtcgagaaccaggcggcgctgatgcgccatcgcgtgcgcgagctgatggtcgggcaacgcacggcggcgctcaacgccctgcgcggccatctgtcggagatcggcgtggtcgccgcacagggggttcagaacgcttacgcgctcaaggagatggccgccgagggcttcgacgagaacggcgagatcgtggttcccgactgcgtgcgcctcgccctcgcccctctcgtccggcagatcgacgcgctcgacaaagcgatcgaggcgatcgacagggagcttgaagcgtccgccaggaccgacgaggccgcgaggtggctgatgaccattcccggcgtcggtccggtcaccgccacggcgcttctcgccacgatccaggacttcgccgcattttccagcggacgagagttcgccgccttcgtcgggctgaccccgcgcgagcattcgagcggcggcaagccgcggctcgggcggatcaccaagatgggcgaccgctacctgcgcaagcttctggtcgtgggcgcgtgctccacgctcggcgcccgcaaaggacacaatgacgcccagcgccgctgggcgagcggaatgctcgagcgcaagaccgtcaagtacaagttcaagctgaccgcggtggcgctcgccaacaagctggcgcggatcgtctatgcgctcgcgaccaaagggggccattacgacgaccatccggtcgcggcctgaaccaacaagctccgcaggaacgaggtttcgccgcaaggcgatccgcatcgagggcgacggcgaagcgatgtgacccaacggaacggctcggaagcccggtgaagggcaggcgccataaagagcgcgttttgctgatggggcgaagagccatgcggaccagcatcagggccagcgggacattcgtttcccgcgccaacaggccgaagacatgaccgcacccgatacgttcgcaaagcctcaaccaaacccttgacgaaggggcgccgtccagaca

SEQ ID NO: 595 - DNA, 1384 bp, unidentified
  source 1..1384: mol_type = unassigned DNA; note = element_06dfae3
  misc_feature 1: note = core
  misc_feature 2..87: note = LE
  misc_feature 88..1122: note = CDS
  misc_feature 1123..1384: note = RE
  misc_feature 1154..1379: note = bridgeRNA
caatgggatggactcctccccgctgacggcatcgaagtgccagactggagttatcaccaaccagtcaagagaaggaaggagtccgaaatgaacattacacgtatcggccttgatttggcaaagagcgtttttcaagtgcatggtgtggatcggcaggaacggtcgatcgccaaacgcaagcttagccgtggtcaggtgcgcggctattttgaaaaactttcgccctgcctgatcggcatggaagcgtgcgccagcgcgcattactgggctcgcgagtttggccggatgggccatcgggtcaagctcatcgcaccgcaatttgtcaaaccctacgtcaaaagccagaagaacgacgccaatgatgccgaggccatctgtgaagcggtggggcgcccgagcatgcgctttgtcgccatcaagacggttgagcaacaggatatccaggcgatccatcgcatccgtagcgaactgatccggcaacgcacggccaaggccaaccagatccgcggcctgctggctgaatatgggatcgtcgtgccggtcggtatcggcgcgctccggcgcgctctgccggcgcttcaggaagacactgagaacggactgagcggggtgttcaggcgcctgctgagcggactgcgcgaggatttggaaagcttcgatgcccgtgttgcggcactcgatgaagaaattgagatcaccgcccgcgatgagcccacggcccaacgcctgcagagcattccgggcatcgggccgatcggagcgacggccttggtcgccgccgtgggcgatgcccggcaattcgagcgcggacgggacatggccgcctattttggattgaccccgggccagcacagcagtggcggcaaggagcaactcctggggatcagcaagcgtggcgacagttatctgcgcacgctgcttatccagggtgcccgtgcggtgctcaaaacggccggcaggaaaacggacccgcgtagttgttgggtgatgaacatcgccgcccggcgccacaagaacgtggcggcggtggcgctggccaacaagaacgcgcgtattgcctgggcgttgctgacccacggcgatcggtatgacgcaaggcatggcatggcggcggccgcctgagccggtatcgagaaacgaaacactttcaacccgcgattgcaaaagagagaggagtgatggcaaaacggtcgaaccggcggtgggagagaccgaagattccgctggcccttgcggccgacaagccgatgagtcccctccgcgcgcatgcccatcatggccaggtgcattcaacaggtgccaccaacaggtcggatatacggtcgcagtcgcacccatttgcccaatctcaactcgatcttgcaaatagggaggagtccatata

SEQ ID NO: 596 - DNA, 1610 bp, unidentified
  source 1..1610: mol_type = unassigned DNA; note = element_06e175c
  misc_feature 1..4: note = core
  misc_feature 5..278: note = LE
  misc_feature 279..1475: note = CDS
  misc_feature 1476..1610: note = RE
  misc_feature 14..298: note = bridgeRNA
ctcctacaatataaattaaggtaatggacacggtagccagccgtgtctgttttccttttcaatgcctaagctgtagaatgagaaggaatggtctgacatgtttttccatgaaacagcacgttcgccaaggagttagtcagccgcctttctcattcgcagcattcgatttacgcaagttgctccgtcgcttttccgacgcgttcgtgtaacactcaggagattgaataagcattgagtaaaaagcggaatgccatatcaaaatctcaggaggtataattatgaactcggtcggaattgatgtttcaaaaggaaagagcatggtagcagccttgcgcccaatgggtgaagttgcgatgcgtcctacagagtatcttcacacggaggttgagcttgaaaggctggcttacgccattctcgctctcggcgaagatacaagggttgtgatggaagccacaggacgttaccatgaacccgtagccgcagcgctgcatgaatatgggatttacgtcagtgttctgaatcccatcttgatccaccagagcggtggaggatctgtcagaaaagtcaagtccgataagaaagattccatcaagatcgccaaatacggacttgacaactgggtcgatctgagagaatatactccggtcgatgctgtcaggcaacaattgaagctgttatcccgacagtacaacctttacatgaagagtgccgtatctctcaaaaacaaccttatctctttaactgacaaggtgtttcccggagtcaatgagtacttcaaaagtcccgaaaaagccaacggtcatcagaagtggattgactttgtcactactttctggcactgtgactgtattactcttgtcagtgaaaaagcatttactgagcgttaccgtaaatggtgcaaacgtaaaggatacaatttcagcgttgagaaagcgcttgatctgtacgcttgcagctgcggtcacattacaacgcttcctaagaacagtaacactaagctacttattactacagcagcgaaacaactgacagctttcaactgtttgcttgcttctgtgaaacaggagatgttttctcttgccaaacaattgccggaatacgaaaccgtcatcgctatctatggcgtcggcgatatctctgccgcccagctcatggctgaaatcggcgacgtcagacgctttcctaacagaaacgccttggttggctttgccggtgttgatcctattgttgatgaatcaggcaaagatgtttctaagtgccatcccactaccaagcgcggttcttctcatttgagaaagactctgtttcaggtcgtcagcacttatgtgaaactcgctcccgctgatgagcctgtttaccaattcatacaaaagaaacgagccgagggtaagccttattacgtttacatgactgccgcagctaacaagttccttcgcatttactacgctcgtgtcaaggagtgtctgaacgactaaccccttgtcaacaaataaatatttttacttcaagctgaaaaaattgttcttcggcttgtttgctatgccttgctttgtgtatgcccaaataatctcatcttttttcattttagggcttgacttttatttgcaaga

SEQ ID NO: 597 - DNA, 1401 bp, unidentified
  source 1..1401: mol_type = unassigned DNA; note = element_06e6c51
  misc_feature 1: note = core
  misc_feature 2..79: note = LE
  misc_feature 80..1045: note = CDS
  misc_feature 1046..1401: note = RE
  misc_feature 1124..1389: note = bridgeRNA
atgttggagtggacggcccctgaacggcatcgaaatgtgccagagtgagctgttaagatctcaatcgaaggggccgcccatggacaagattattcgtattggcatggatacgtcaaaacatggttttcagctgcatggcgtaaatactgaagagaagtcggtcttgcgtgagaaaatgcgacgcaaggagatgatcgacttcttcacgacctgcccgccaactttggtcgcgatcgaggcctgtggtggttcgcatcattgggcacggctgctcgcctcattcgggcatgcggtaaagatgatcgcaccacaacttgctaagccctacgtcaaacggaacaagaacgacgcggccgatgccgaagggctttgcgaagcagtgagccgcccaacaatgcgatttgttccggttaagacagttgatgaacaagcggcactcatgctgatcagcgtccgtacccgcctcatcgccaaccgcacccaactcgccaacgcaatccggggctacgccaatgagtttggtgtttccgcagccaaggggctggcgcatatccctatgctgcttgaaaggatacaggccgacgcgactgtgccagagctcgcacaggaattgttcatgagccaggccgaggaatacgctcaactggcaaagaagattgcggatgtggaggccaagttaaaggcatggcagcgtaacgacgaacgcagcagacgtctcagcaccattcccggcattggcccaatcggttcggctcttttgatcatgaagacacccgttccggagctgttccaatctggccgccagttcgcagcctggatagggttgacgccaaaagatcactcgaccggcggcaagctgcggctcggtggtatcacgcgagagccggcgatgaagctctgcgggccgtcttggtggcaggagcaaccgctgtcattcatcacgcgcggcgatctggtaaggcttctcaatggttggcggaactgctcagacgtaagccgcctaaactggcagctgtcgcacttgccaacaagatggcgcgcatagcttggaaactcatgatctctgggcaaacatacagcgcacaatcaggagcagctttgacgggatgcgccacatgaagattggcgagcaagaaccctggatatcctgatcttcaccacgtgttggtgatacaacaacttgcaggataatagcagatggtgtgatcgatcgatccgggacacaggatactccggaaatccctttggctcctcaaggccgccttgatgtttgggacctgtgttgcggaaaccatcttggccagcgttcatgtgcggacgcaacaacacgctggacatatggacgcaagcgatctggtcaaattatctcgagatatcttgcaagtcgggggccgtccacat

SEQ ID NO: 598 - DNA, 1242 bp, unidentified
  source 1..1242: mol_type = unassigned DNA; note = element_06ed074
  misc_feature 1: note = core
  misc_feature 2..437: note = LE
  misc_feature 438..1238: note = CDS
  misc_feature 1239..1242: note = RE
  misc_feature 43..199: note = bridgeRNA
accttagatttgcagcatcaaaatatttatctttgaattgatattgaaaggaaagcaaaaggaaaaccatcagcggcaatagaagtcaagtctaagtccctattcggtccttttgctccttccttgaactcaaacccatataagaatttcagtaaacctgtttaagattattaggtcaagttcaggtcctttcttttttgtttaatgttcaaaaacaaaagtatgaaagtttttttatttaggagttgatgtgagtaagaaaaaattggatttatgtttaaggagtaacggtaaggacatcctttatgatgttattcctaatgatctatcctctattaaatcttggttaacaagaacgtttgagaaatttttcctctctgaggacagtttggttgtctgtgcggaacatacagggcaatatacctatcctttggtctgtgcaacaaaaaagtataggagtctacttatgtttggaagatgcagctaaaataaaatattgtcatggaatacctcgtggcaaaaatgataaaatagatgcctgccgaatagcaatgtatgcagaaagatataatgattgcctacaaccgtataccgcatcagagcttataatacaaaaactcaaaaacttatcaacagaacgcagtatgcttgttgcagatagggctaaatatcaatcccagctaaaagatcaggtagactatatggaacactcaatatatattgctaaatgcaatagagttgaagggattatcaatacatttacggattacatagcacaaatagaccttgaaataaaagaacttataaatcaagcacctgtcattgctcatcaaatggatttactcatgtctgtggatggagttggggaacgtgttgcactgaagatgatcatggaaacagatgctttcacttcttttactgatcccaggaagttttgctgtcatgcaggagttgttccgttcgtctatgtgtcaggaagtagccaacgttctaaaaatagagtatctaatagggctgacaaaagcatcaagcatttgctacatatggcggcactatctgtttcacaagtgaaaaatagtccattgaagaaatattatgacagaaaggtcgaagagggaaaaaataagatgtcggttctgaatgcagttagagcgaaattagttacgattatgttcgctgtaattagggcggatgctttttttcgagaaattatcaaaattcgcttgcgtaatccataagaat

SEQ ID NO: 599 - DNA, 1571 bp, unidentified
  source 1..1571: mol_type = unassigned DNA; note = element_06eecc8
  misc_feature 1..2: note = core
  misc_feature 3..264: note = LE
  misc_feature 265..1449: note = CDS
  misc_feature 1450..1571: note = RE
  misc_feature 16..239: note = bridgeRNA
ctggtaaaatatagttgaattgcaacataaatatttcatattgattttcctgattaaatgtttgtgttataattttcatgtgaatagaggtcgtagctatcctgcttaagactttagatcttccagcgaagagttacgactctttctctacgtgattgtgcgaataagctggatgacagtttttgtcccttttcctaaccagtctgtaccggcgtagtcttagaggattctctgttcacctattctttacctcggaggtattttatgttctttatcggtatcgacgttgcgaaacgttcccaccaagctgccgttacggatatttccggtaacgtcatcgtaaagccgttcaacttcaaaaactcttcggacggttttacgaaatttctatccgctgtcgaatctaacgctatcgaaaaaaacgattgcatcatcggtctggaatccacagggcactactggtatccattgtatttcttccttatcgaaaacggttttgacgttaaggtgttcaatccaatccagactgccgctttccgggaaattaccattcgtaaggttaaaaacgacaatctcgacagccttctcattgcggattttacaaggttcggcaggtattccgaaacttatatccccgatgagaatatgcttgctctcaaaaatctgacgcgtttccgtttgtctatcagcgatatttgcggtagccttaagaagaaggtcattgcgatactcgatcaggtttttcccgaatataccggcgttttttcggacgttttcggtaaaaccagcaagcaactgctcgaacaattttctacacccgacgaatttatggatatttccaccactaaattgactaatctattgctcaaagtcagtcgtggccgtaatggaagagaaaaagccgaattgattaaaaccgccgcacaatcttccatcggtatttcttatgccatcgacgcgttctccttcgaacttaaacaattgcttgctcagatagagttcatggaaaaccaactttcggatgttgacgcggaaatggaaaaacttctttctcagtccgaatacggaattattaccactataagcggaatcggtccgatgctcggaagtgttattgtcagcgaaatcggagacattaatcgttttgaaaactcctctaaactcgtagcctatgccggattagacgcttcggtaaaacaatcgggcgagttcaattcctcgaaaaacaaaatatctaagcgcggatctccgtatttgcgcagagctttatggatggcagcttttatgtctttacagtgcgatccggctctttatgattactattccagattacgggcaagggggaaaacccatcgctgcgctacgaccgccgtcgcaagaaaactctgcattatcgtctgggcaatcatgaaatctaaaaaaccttattcaccggtcttaaaaaactaatcccgtttttattcgttaatctttcagccgtttcttacaaaacggctctttgtcgtagagttttttactctaaaaaatttttatcttttctgcgtgttttcgcttgacttttaatagctggt

SEQ ID NO: 600 - DNA, 1382 bp, unidentified
  source 1..1382: mol_type = unassigned DNA; note = element_06f1d0b
  misc_feature 1..2: note = core
  misc_feature 3..85: note = LE
  misc_feature 86..1117: note = CDS
  misc_feature 1118..1382: note = RE
  misc_feature 1126..1370: note = bridgeRNA
tgatggtgtggaacggcccttcgaagcggcatcgaaggtgcctatcgtggcgatcttcttgatgcgagatagaaggacccgttccatggagaagacgatcacgatcggattggacttggccaagtcagtcttccaagtccacggcatcgcagaggacggccgcgttgtcgtccggaaagccctgcggcgttctcaggtgttggacttctttcgcgggcttgaaccctgtctcgtcggacttgaggcctgtgccagcgcgcatcattgggccaacgcgatcggccattttggccatacggtgcggatgatgccggcggcctacgtcaaagcttatgtgaagcgcaacaagaccgatgcagcggatgcagaggcgatctgcgaggcggtgacgcgacccacgatgcgcttcgtgccgatcaagacgccgaacgagcaagccgcctgcatggtcctgaagacccgagagctgttcgtgcgtcagcggacccagacatcgaacgcgatgcgagcgcacatggccgaattcggcatcatcgccgcgacgggcatggccagtatcgataagctgatcgccatcctgcgcgatgaggcggacacccgtcttcccctcgcggcaagagcggcgcttctggaggtggccgagcagatcgaacagctgtcggctcgcatcgaggcgttggacacgaagatcgtcaaggctgtgaaggaagacgagacggcgcggcgcctgacgagcattcccggcgttggcccgatcattgcggcgagcgtccgggccatgatccaggatcccggagcgttccgaaccgggcgtgacctggcggcctggatcgggatcacgccaagcgcccgctcaagcggcggcaaggagcgtctcggcgggatcacgaagcgaggcaacactcagctgcgttcgcttctggtggtcggtgcgacctcgatcctgaagcaggcgaggcgaggcttgaagatgccggcctgggtcgtctccctgatggcccgcaagccctacaaggtcgcagccgttgcgctggcgaacaagatggcccgcacgatctgggctcttatggtcaagggcgggacttaccgagccccgacggtaatggtgggcgcgtaaagacaacgagcttcccggcacttcggcgccgggaggagccaggcaaggtgccgaagcgtgatgaccccgaggggcgacacctcaatgtcgatcagaccgtccgttgcaatgcgccttcgagcgcgtcagtttgatccaggcgatcgacattgcggatctcatcgtggccagcggtccagaccgcgctcataggccggacatatgactgcaccgtccgacggcgattgacgcgacgcataccttgcaaaccgggccgttccacata

SEQ ID NO: 601 - DNA, 1477 bp, unidentified
  source 1..1477: mol_type = unassigned DNA; note = element_06fd218
  misc_feature 1: note = core
  misc_feature 2..439: note = LE
  misc_feature 440..1462: note = CDS
  misc_feature 1463..1477: note = RE
  misc_feature 9..235: note = bridgeRNA
cgttatgttttccgcggtcctgcaagaggaccgctggcctccgggcccggcatgactggtcccccctgtcgaacgcatgacctggggggtggtgtcaccgggtccgagaggcgccgttggaggcgctgatgagaggtccgactaccgcctggcctggcgcaatgcccggccgctcgcgggcggcaggtctgcataacgtggatgcgcgcacgacgccaacgcccaggccagcacgcatgacatccgttcgggaggacggcttgaacgacagcgacgagatagcgtcttcctcggcctggacgtcggcaagaccgcccatcacgggcacggcctcacccctgccggcaagaaggtcttcgacaagcaactgcccaacaccgaaccgaagctgcgggacgtctttgagaagctgaagaccaagttcggcaccgtccttgtcgtggtggaccagcccgcttccatcggcgccctcccgctcatggtcgcccgggacaccggctgcaaggtcgcctacctgccaggcctgtccatgcggcggatcgccgacctctaccccggcgaggcgaaaaccgacgcgaaggacgccgcggtgatcgcggacgcggcacgcaccatgccgcacaccctgcgcgcgctggaactcaccgacgagatcaccgccgaactgaccgtactcgtcggcttcgaccaggacctggcggccgaggccacccgcacctccaaccggatacgcggcctgctcacccagttccaccccagcctcgagcgggtcctcggcccgcgcctggaccaccaggccgtgacctggctgctggaacgctacggctccccgaccgccctgcgaaaggccggacgccgcaggcttgtcgaagtgatccggcccaaggccccgcgcatggcccagcggctgatcgacgaagtcttcgaggcactcgacgaacagaccgtcgtcgtccccggcaccggcaccctcgacatcgtgatcccctccctggcccgctcgctcgccgccgtccacgaacaacgccgggccacagaagcccagatcagcgccctgctggaggcgcaccctctttccaaggtcctgacctcgatgccggggatcgcggtcaggaccgccgccacgctgctggtcaccgtcggcgacggcaccagcttccctaccgccgcccacctcgcctcctacgccggcctcgccccgaccacgaagtcctccgggacctcgatccacggcgaacactcacccagaggcggcaaccggcaactcaaacgcgcgatgttcctgtccgcattcgccgccctgcacgaccccgcctcccgcacctactacgaccgatgccgagcccgcggcaagacccacacgcaggcccttctccgcctcgcccgacaacggatcaacgtgctgttcgcgatgctccgcgacggcaccttctacgaaccccgaaccccacgcctcgcttgacgaaagacatagagg

SEQ ID NO: 602 - DNA, 1358 bp, unidentified
  source 1..1358: mol_type = unassigned DNA; note = element_06fe798
  misc_feature 1..3: note = core
  misc_feature 4..80: note = LE
  misc_feature 81..1103: note = CDS
  misc_feature 1104..1358: note = RE
  misc_feature 1082..1345: note = bridgeRNA
tgatggggtggatggcccccttgcggcatcaatgtgccaagctggtgttttcgaagaatcaccaggaacgggagccatccatgagcgagattacaacggtcggactggatctagctaagcatgtttttcaggttcacggcatcgatgcggagggtaccacggttctgcgccgccggctgcggcgcaaccaagtgctggcattcttcagccgacttcggcgctgcgtggtgggaatggaagcgtgtgcgacggcgcactactgggcgcgcgagctggccgcgcttgggcatgaggtacggctgatgcccgcgcaatacgtgaaggcctacgtcaagcgtaataagaacgatgccgccgatgcggaagcgatttgcgaggctgttgggcgcccgacgatgcgatttgtctcggtcaagacggcagagcagcaggcgagccagctgctacatcgtggccgcgagcagctggtgcgccagcgcacaatgctggtgaacgcgttgcgggcgcatctggcggagttcggaatcgtagcggcgcaggggttgcgcaatgtgagccagctgatcgccattgttcgcgacaatggcaataaacacttgcctgatgtggcacggcaggtgctcaaagtgctggcgtgtcagatcgagcagatcgaggcggcgattaccgcgctggagaggcagctgctggcctggcacaagagcaacccagtcagtcagcggctggctagcattccgggcattgggccgatcatcgccacggctattgcgacgagtgtggcggacccacatgcgttccgctcggggcgcgagttcgccgcctggctgggcttggtgccgcggcagaattcaaccggaggcaaaccccggctgggcggcatcacgaagcggggcaaccgctatctgcgtaggctgctcatcaatggggcaagcgccaacctgctgcgatcaaaagcaaccaaagccgatccgtgggtgatcggactgcgtcggcggcggccgccgctggtcgtcgccgtcgcgctggcgaacaagacggcgcgtatcgcctgggcggtgatgctgcgccagaacgaataccagccccgggctgtggcggcttagtccgcctcggctggcgctggagcttgcgagagagtaatgacgcgtgatggcacagtcggtcgatccgacgcaaccgagagaagcctgtcgcttcattgggacatcgatcccgctcgagtgatgaggcctcggttcgcggaccccatcagggccagcggtccatccggactgcgtgaacaggccggacacatgactgcaagcgacttctgtgcggcacgctcaattttctcttgccaggcgggggccatccacaca

SEQ ID NO: 603 - DNA, 1601 bp, unidentified
  source 1..1601: mol_type = unassigned DNA; note = element_070a447
  misc_feature 1..2: note = core
  misc_feature 3..282: note = LE
  misc_feature 283..1488: note = CDS
  misc_feature 1489..1601: note = RE
  misc_feature 14..302: note = bridgeRNA
ctactacaataagtttatgggttatatatctggcagccagtcaggttattgtccaacttattgcttaactgatagaatgaaggtgcaatcggaatgactacctcctacttggacttcgcgtccgtaatcgagtctgttatccggcacctcattcgcagtgttcgttttatgcaggttgaactgccagtggtacgttcgtgtcacaccacagtagtttgaataggcaatgagtgaaactggatttttccattgcattattaaatataaggagtgatatagtgtatgaatgcagtaggtattgatgtttccaaaggcaagagtatggtatcgataatgagaccattcggagaaatcgtttttgagccatttgaagtaaaacatacttcgagtgaaataaaagcattgattgctcttattaattcggttgatggagaatcacgtatagtgatggaacacacggggcgttattatgaagtccttgcgcatcagttggctgaagcaaacctttttgttagcactatcaatgctaagttgataaaagattttgataatgattccttacgaaagttaaagtctgataaggctgattcaataaagatagccaggtatgctcttgacaaatggacggggctaaaacagtatagccttatggatgagatacgtaatcaactaaaaataatgaatagacagtttggcttttatgtaaagcaaaaaactgcgatgaagaataatctaattggtatcattgatcaaactttccctggagagaacacatactttgatagtcctgctagaaacgatggaagtcaaaagtgggtggatttcatcgatacatactggcatgttgattgcattcggaatatgtcattaaatgcgtttacagaacactataaaaaatggtgtaaacgaaagaagtacaattatagtcaatctaaggcagtagagatatacgaaaaggctaaagaggtggtacctgtacttcctaaagatgaaataactaagctgatcattaaacaagcaatttctcaattgaataatgcatctgctacagttgagtcgcttaggcagttaatgaatgaaacggcctcaaagctaccagaatatcctgttgtgatgtcaatgaagggagtaggaccatctttagggccgcagcttatggcagaaataggtgatgttactaggtttagccacaaagctgcaataacagcgtttgcaggtgtggatccgggagttaatgagtcaggaacttacgcacaaaaaagtgttcacacaactaaacgaggctcgtcggagttgagaagaacactttttcttgttatggatgcactaattaaatccatgccacaagatgaccctgtatatcagttcttggataagaaaagattgcaaggaaagccgtattatgtatatatgacggctggcgctaataaatttctaagaatttactatggcaaggttaaagagtatctatccaagctggaaaagtaattgccatttatcatttgtgtattgagccggcacatatgtggtggcttattagttatgcacgatttcgaaactatagaaaaatcttattttactattgactttatatttgcagg

SEQ ID NO: 604 - DNA, 1242 bp, unidentified
  source 1..1242: mol_type = unassigned DNA; note = element_071aa7f
  misc_feature 1..3: note = core
  misc_feature 4..230: note = LE
  misc_feature 231..1220: note = CDS
  misc_feature 1221..1242: note = RE
  misc_feature 7..203: note = bridgeRNA
gctattagattagcatcattaaataaatgaagttaatttagaacaactgaagaaccagagaagttgaggtgaactagttcgagtagtaagcttttagactttagctgagcattagtcctcatcttctccgggttcatgtaccatttagaatgttaagcttccaggcttattaatagtgatagtacgaacccttctggccctcagtttttgtttttcctaattgtaaaagtatgaaaaagttatttgtaggtattgacgtttcgaaagatgtttttgatttttgtgcattgaatgaaaatggtgatattgaaacatcgaaggaggtgtttgaaaactcgaagaagggtattgtagcgttctgtaaatcattgaagaggtgggatgactatgatgtatggatctgtttagaacatacgggacattatggttatttattagcttcagagttttcagaaagaacgatcaaatacacgctcttaaatcccttagaaattaaaaattctattggtatgacaagaggaaagaatgatgccatagatgcataccgtattgcttactatggatttacgcatgttcgtaaactaaagagacatattatacccatccatgacattcagaagttaagaacattgatgagtatgcgcgatggatacgtcaagattaatgtgcaacttaaaaacagcttcaaagctcttgaaatcattcatcaatcaataaacattaggccacaactcaatgaccatagactattgatcaaaagacaagagaaatctattgataaagttgaactgcaaatcatggagatactaaataacaatgaggagctgaaaaagaccttcaaaaaggtgaatacagtcattggtgtcggaatgcttacagcagttaaatgcatcattgaaaccgataatttcaccaaatttaatgatggcagaaaatttagctgtcactgtggattagccccattcgattataaatcagggtcaagtgtaagaggaaagacaagaaccagtccattaagtaataaagggcttaaatcaatactatttaaagcagcatcaactgcaatacaacatgatccgcaactgaaaaattattactcaagaaaagttggagaaggaaaacataaactatcggttctaaacgcagtagcaaacaaaattgtacttcgaatttttgcagttgcaaacagagatgaaccttttgtgaaattagcggcttaaaaatttggatttatcttagaat

SEQ ID NO: 605 - DNA, 1482 bp, unidentified
  source 1..1482: mol_type = unassigned DNA; note = element_071d561
  misc_feature 1..2: note = core
  misc_feature 3..276: note = LE
  misc_feature 277..1362: note = CDS
  misc_feature 1363..1482: note = RE
  misc_feature 13..296: note = bridgeRNA
ctactacaatatatttatggtaaatatcccttacagccagtaaggaattatccatcttgttgcttaagctgttagaatgagtggcgcaataggtctggccttcacctcctaggactttacgtccgtaaataagtcagccaaccagtccctcatccgcagcattcgttttacgcaggttgaacccataggcgttcgtgtgaaacacccagtagattgaataggcaatgggaaaactggtattgaccattgcaattacattacaaaggagtatctcttatgaacgctgttggtattgatgtttctaaaggaaaaagcactgtcaccatccggagaccgggagatgtagttcttatgccaccctgcgatatcccccacacacagtatgccataaatgacctaatcgtgtacctccaaaaccttgatggggaaacgaaagcctgtatggagcacaccggcagatactatgaaccggttgcctcatggccttctgatgccggcatctttgtcagtgctgtaaatcctatcctcatcagggatttcggtgatgattccctgcgtactcccaagacagacaaagccgattctaaaaaaatcgcacgttatactcttgaccggacttatccgggagccaatgatttctttaacagtcctgcccgcagcgacggcagccagaaatggggggattttgtccatacctactggcatgtggattgtgtcaggtctaaattactgaacgcttttaccgaacattatcagagctggtgcaaacgcaggggctataacttcagtgcagataaagctgagaaaatctatcatctttcttctgacctgatcgccgttttcccaaaggatgacatcaccaaaatgctgatacggcaggctgtggcattgcggaatactgcctccgaaactgaggaaccccttcgtctgaaaatgaatgggcttgcttccacgctgccggaatatccgattgtcatggatatgaacggtgtaggttccactcttggaccacatcttatagctgagattggggatgttacccgctttacccaccgcgaagcccttaccgcctttgcaggtgttgaccccggaaagaacgattccgggcagcatgttcagaaaagtgtacggacctcaaagaagggttccccttacttgcggaaagccctctttcaagtcatggacagccttatcaagcgctcgccggttgaggatcctgtttatgcctttatggataaaaagcgggcacagggcaagccttattacgtttacatgaccgccggggcaaacaaatttctccgtatttattacggacgggtaaaagaatatctttccactttgccggaaaacgaaggagtctaatatctttctcagtcccatatcagaccagcgcactgcggtggtcttgttttggtgcctttcattcaacctgtataaatttttcaaagttcatcaatttctgcttgactttttatttgcaga

SEQ ID NO: 606 - DNA, 1587 bp, unidentified
  source 1..1587: mol_type = unassigned DNA; note = element_071ee78
  misc_feature 1..2: note = core
  misc_feature 3..250: note = LE
  misc_feature 251..1462: note = CDS
  misc_feature 1463..1587: note = RE
tctaccatcggaaattgcaggttacagaataggagagcttaaggtataagtgatcctgacgagggtgtggctcttggggtcagtggcctgtttattcaggctcgcaatggcctgaaatgccgccctcgtcacctgcatcatccgaggggtcgaccgggatggtgccatattctcaccagaatacgtggctctgtaagtagacgagaccgaaggatgatgaatcgatcttgtttacgggaggaggagctacgtgtcagagagaaagtctttagaacttcgagtcagtgtggatgtggggtgccgacgccacagcgtggcgattgggtggcccgatgggcaggtgttggaggagtttgagatagcccaccggcctgaagggtttgaagagtttttctcccgcatcgagaaacatcaaaaggcaaatggctgcggagtagcagtagccatggaaggctacaacggctatgcccgaccgttggacagcctggtgcgatctcgtggctatcggctttacaacatcaacaatctaaagttagcgcggttcaaagagatctttcctggagcagccaagaaggatcggattgatgcgcgcaaaggattagagctatttcagcttcgcgatcacctcccgttagccaaggaagtcttacaggaggttacgggaacgccccaggagaatgaaatcctcaagcggctcacccggcggcggcgcaggctcgttaacgagcgagtacgggtggtgaataatcttcaagccgatctgcaggcggtgtgtcccggtttattggagataactactgaggcgagcaaccggtggtttctcaactttcttctcagtgcggacacacttcctcaattggctcggcttcgaaaatcgacgttgctgaagatccctgcggtaggcagaaagtacgccagtctgatccaggagtggcaaaagcgggcgcattttagcgaggaagcgcagtgggtaggtgaaatgatccacgaagacgctcagcgctgtcttgagctcgaagagaagatcaaagcgttagagacaaagattaaagaagtcgccaagaactccaagatcgccaagatcttgttatccattcctggctttggaaccgtttgtacttcagagttagctggagagatcggtacggtggagcgctttggtaaggaaggtggtttggctctgtacctaggcctgtcaaccttggacaacagttccggcaactatcaaggcaccaagcagcccaagcacgtcaatacgcgagctaaggctgctatgatgacggcgctcgatcgtcatcgaaagtatgtgccggagtcgccgcggtactacgaaaagaaacgatctcaagggaaaaagcacaatcaggccatccgagctttaggtcgccatctctgccggatcatttataagatgctcacggaagaaagaccgtaccagattcgctctaaaaaggggggttagatcgagatcgtcgcatatagggcaaatacggaagaaaaaaatctcagcgaaaagctaaaaacacaaaatacactaacagagcccgtgacggttggctcctctgcttgaaatttccagcgggatga

SEQ ID NO: 607 - DNA, 1334 bp, unidentified
  source 1..1334: mol_type = unassigned DNA; note = element_0728a46
  misc_feature 1..4: note = core
  misc_feature 5..293: note = LE
  misc_feature 294..1286: note = CDS
  misc_feature 1287..1334: note = RE
  misc_feature 78..282: note = bridgeRNA
cgggagcctttagattagcaaatagaaataattacttaaaataaaaacataatagttatgatgaaatttctttttttgcttctttttttctttgttaataactcttattttgttgataaccaaaaacacaaaagaacggagtgaactttagcggccagctagctttttagagccatcccccgattagtctccgttctttttaaaagttacttagaaccatatagaatttcagtttctgcccttattaaaggtcttagtttaagtaactattattaatatctaattacaaaattatgaaaacaaatgaaattatcggaatcgatgtcagtaaattattaattgatgtttgtatctattctaaacaaattgttcaacagtttgagaacagtaaatctggatttaaattaatgctaaagtggagttttaaaaattcgtctttctctaaagaagaaaccatgtttgtatttgaacatacaggaatgtactctcatttattatctgtgtctttaactgaacaaaaattatcttttttcatagcttctggtttagaaattaaaagatctattggtattgctcgtggaaaggatgaccaaattgatgccaaacgcattgctcatgggtatcgattaaaagaagaacttaaacccagtaagctacctaaaagaagtatattacaactaaaaagtctcttatctttaaggacaaaacttaacaaacaaagagctggttttaaagttactttgaaagaacaaaaaagaatttataaagcaaaagagtataaaataatctttgacgttcaacaaaaaatgattgcagaactaaccaaacaaatacacaagattaatactcaaatgcaagctattattgaccaaaatataatgttaaaagaaacctataaccttgttactagtgttaaaggtataggaatgcaaactgctataatgatgattgtgtttactgacaatttttcaaaatttgaaaactggagaaagtttgcctcttattgtggtgttgctccttttccttaccaatctggaactagtattaaaggacgtacaaaagtctctcatttggctaataaaaaattgaaagcaattattaatatgtgcgctatttctgctatacaacataacccagaaatgaaattatactatcataaaagaataaaacaaggcaaaagtaaaatgagtaccgttaacattattagaaacaaattaatagcaagagtgtttgccgttgtcaaacgacaaacaccctatgtagatacttttaaatttgctgcataaattagtaaaaataatatctcaacttttacttgtttttatcatagaata

SEQ ID NO: 608 - DNA, 1494 bp, unidentified
  source 1..1494: mol_type = unassigned DNA; note = element_07342b9
  misc_feature 1..2: note = core
  misc_feature 3..225: note = LE
  misc_feature 226..1473: note = CDS
  misc_feature 1474..1494: note = RE
  misc_feature 8..233: note = bridgeRNA
ctaatggggtcgtgatcaagcgttggccgatccggcaggctgatgtccgagccgcccgacgggtgagcactgtaagacgccgggcttcgagctctagctctagaccgtgcccccgtcgggtcggtgaggagggattgacgactggtgggatgacgtgccaccgcgagcactgatccattagcccgtgcgcgtgccctccttgaacggctcgagtgcgtgtccgtgatggcttccgactggagtgaggcagtgatcttcgttggtatcgactgggcagaggagcaccacgacgtccacgtcatgaaccctgacggccagccgttgggccgcgcccgagtgcctgaaggcatcgacgggatcgcgcggctgcacgcgctggtcgccgaccacgccgacgacccgggcgaggtggtggtaggcatcgaaaccgaccgtggcctgctggtcacgacgctggccgcggctggctatcaggtgtacgggatcaacccccgggcggtggaccgctaccgcgaccgtcatgcgatgtcgggcgcgaagtccgacggcgccgacgccaaggtgctggccgacctggtccgcaccgaccgccacaaccaccgtcaggtcgccggcgacagcgacctggccgaggcgatcaaggtgaccgcgcgtgcccatcagaacctggtgtgggcacgtcaacggcaggtcaaccagctgcgcagcgcgctgcgcgagtactacccaggtgtgctggcgacctttggcaccgacctggcgcaccgcgacgtcgtcgccgtgctggtcaaggcaccgacgccggagttgggccggcgtctgtcgaccgcgcagatcgccgcggcgctgcgccgcgccggccgggtccgcaacgtcgacgcccgggcagcggcgatccgcgacgggctgcgcgcgccgcagctggccgccccggacgtcgtcgccgacgcgtacggcaccagcgccaaggcgctgatcagcgtcatcgcgaccctgaccgcgcagatcgacgagctggagtcggccctggccgaccgttttgagcagcacccggacgccgacatcttgcgtagcctgcctggactcgcggtcatcctcggcgcccgggtgctcggcgagttcggggacgacccgaaccgctacgccgatgctaaagcccgcaagaactacgccggcagctccccgatcaccaagcagtccggcagccgcaagctcgccctcgcacgctatgtccgcaaccggcggctcgccgacgccatcacgctgtgggcgttctcttctctgcagtcctcgcccggtgcacgcatgttgtacgaccgccgtcgcgccgctggcgacacccaccacaaggcgctgcgggctctgtcaaatcgctgggtcgggatcatgcacggttgcctgcgccaccgcaccccctacgacgaacgcatcgcctggggccacctcaccgacaatctgcccacagcggcttgacaaccaccgaccgtgggatgt

SEQ ID NO: 609 - DNA, 1475 bp, unidentified
  source 1..1475: mol_type = unassigned DNA; note = element_0736085
  misc_feature 1: note = core
  misc_feature 2..271: note = LE
  misc_feature 272..1348: note = CDS
  misc_feature 1349..1475: note = RE
  misc_feature 72..269: note = bridgeRNA
cagtgaggatggtggtgggggtccggtggccttggggatgatgtctttggggtctgggttgttcgtttgaccgatctcgacactggcgctgttggttgggtgccttgaacgcgacttgtcgacggccggcccgccgggcccctctttcggtttggatggccagaccgggcgggtgtgacttgataggaccttgatcggtgtctcatcactgtggtgtccgcccggcctgggaggtcatccctcgatccagttgtagagggagacatcacccatgatgaccaccaaccatgccacgcctcaagacccgaccccggtggtggccggggtcgatactcatcaacgcacccatcacgcggtcgtgctcaccgagaccggggtgttgttggctgatcgggagttcccggtctcccgcgcgggttatgccgcgttggtggactgggtcgccggccacggaccgatcaccgcgatcggggtcgagtcgaccggttcgtatggggccgggttgacggtgcatctgctggcggccgggatcgaggtgatcgaggtcaaccggcccgataagaccacccgggcgcggcggggcaagtccgatgtgatcgatgccgagtccgcggcccgggcggtgctgaacggcaccgcgaccgcccggccgaaggtcaagaccggtgtggtcgaagcgatccgggtgatcaaggtcccccgggatcgggcggtcaaggaccgcaccgcggcctatggccagttgcgtgatctgatcaccaccgcccccgcggtgatccatgacgagctgatcggctgcaccgcacggcaacgggtgacccgggccgccggttaccggcccgacggtgcccggctggccgacccggtccaggccaccaaacacgccctgcggatgatcgcccgccggatccaggccctggatgccgagatcaccgccgccgacaagactctgcgggtgttgacccggcaggccgctccgtcggtgatggcgatgccccaggtcggggtgcagaccaccgctcagctggtgatcaccgccgggcagaacatcgagcgcatgcactccgaggcggcgttcgccgccttgtgcggggtcagcccgatcccggcctcctcgggccacaccagcagcggacgggtccggctgaaccgtggcggggaccgccaggccaactccgcgctctacatggtcatcatcggccggctgcgccgcgaccccgacacccaggcctacttccaccgacgcaccagcgaacacaagacccgcgccgaaaccatccgatgcctcaaacgccacctcgcccgcaccatctaccgaaacctcaaaaccgacctcatgaccacttgacgatctataggaccgtcgctcgctgcgcgagctactcgatgaacgtgagcaaccgctcgctgcgcgagctactcgatgaacgtgggcaactgcacgctgcgcgagctactcgatgaacgtgggcaac

SEQ ID NO: 610 - DNA, 1402 bp, unidentified
  source 1..1402: mol_type = unassigned DNA; note = element_074ac57
  misc_feature 1..2: note = core
  misc_feature 3..79: note = LE
  misc_feature 80..1120: note = CDS
  misc_feature 1121..1402: note = RE
  misc_feature 1118..1389: note = bridgeRNA
tgatggggtggacggcccccgacggcatcgagtgtgccagagtgagttcgttgcatatctcactagaaggggaccgtcgatggaacagattagccgaattgggatggatacgtcgaaacgcttcttccaacttcacggggtgaatgcggccgagacggtggttttgcgcaagaagctgaggcgcaaggagatggtcgggtttttcgagaagattgcgccgacggtagttgggatcgaagcctgcggcgcttcccatcattgggcgcggctcttgcagtcattcggccatacggtgaagctgatcccggctcaactggttaagccgtatgtaaagcgcggcaagaacgatatggccgatgcagaggcgctatgcgaggcgatgagccggccaaccatgcgttttgtgccgataaagacggccgaccaacaagcagccctgatgctggtcggcctacgcgatcggcttatccgcaatcgcacgcagctgtctaacgccatccgcggctatgccgccgagttcgggctcactgccgccaacgggttggcgaaccttcgtccgctgctcgaacgcattcaagccgatgagggcgtgcccgacctggcgtgtgagttgttcgcggcccaagccgaagagtatgctcagcttgaggagcaaatcgccgagatctccgccaaactcatggcctggcacaaggctgacgaatgcagccgacgtctcgccaagatccctggtatcggcccgatcggagcggcattgctgatgatgaagaccccggcgccggagctattccggtcagggcgccagttcgcggcctggatcggattgacgccgagggaccattctacggccggtaaggtcaagctcggcgtcatcacgcgggccggcgatgaagctttgcgcgccgtgctggtgtcgggggcaaccgccgtaatcaagcatgccgttggctgcaaaggacgcgcgtcgccctggctcatcgaccttctcaagcgcaagccgcctaagctggctgccgtagcgttggccaacaagttggctcgcatcgcatggaagctgatggtcacaggcgaagcctacgcggcgacatcgacgcctattgcttcggcggccgcggtgtaagaatcagccagacacggggagcaacttaactgcaaccgtgccgagccgatgtcagaacttgcaaggagacgagcagatggtgtgatcgatcgatcctagacgtgagacaatccgtggaccccactggccgcaaaggtcgccggcgtgtctggagctcacgtcgcggaaaccatcttggccagcgttcatatgcgagcgcgccaacaggccggacatatggacgcaagcgctctgatcaaatctatgcaacgacagtcttgcaaggagggggccgtccacata

SEQ ID NO: 611 - DNA, 1636 bp, unidentified
  source 1..1636: mol_type = unassigned DNA; note = element_0751509
  misc_feature 1..2: note = core
  misc_feature 3..297: note = LE
  misc_feature 298..1254: note = CDS
  misc_feature 1255..1636: note = RE
  misc_feature 62..276: note = bridgeRNA
ctggtataatgtaaaaaagactcatctaacagtcatttacattatacctttctcctttctatcaaccttttaatctgtggttgattacggtatgatacattggtattatataaacatgtgatgtggatttatatgttattcctgtggctttgactacttgaaggaggttcttaccactccttgtttcttagtaatgattagttagatgagtctttgaattcatatctcgtaccaggttttacagaacaagtgttgtggataaacacattacatattttttgaaaggaatgtattatcatgattttagtcggaattgacattggtaaaaacaaacacactttttccataattgataaaaactctggagaaatacttttatctccttctgatttttctaataatctgaaaggtttcttgtttctcatccaaaaattaagcagctatactaaatcggaacttcttatcggcatggaagatacaggtcattatcactttgccttacttaagtatcttctcgacagacgatataccgttgccctgattaatcctacaaccactgatcttacaagaaaattacaaggcggtattactaaaaacgacccttttgattctctcaccatctgcgatgtgatttcctctaatcaccgcaataaaccttatcgtgttacaaagttaaatcgttttgacctctacgagcagaaacagttaacccgtcatcatcataatctgaaagaagagttaaacacatacaaaaatcgtcttcaaaaatgcattgatattgtatttcctgaattcaactctctgtttcattctaaatatgggattgtatatatgaatattttaaaaactttctcttctgccaaggcgattgcaaatgctgatatacgaagtatccgtaaatgttttgaattcaaaggacaaggaaaacgaatttccctttctgccgagcaactaaaacttactgccaagtcttctattggcataccttctgtcgctgaagaaattcaaatcagacaccttgtaagccaaattgaattattggaaaaacaactttctgagatagacaaaaggatagaagagttttccctcaaaaacaactctcctatcctcaccataccgggaatatcacatttttccggtacttctattatatcagaactaggagatatttgcaattatacaaaggcatctcaaatcatcaaatttgcaggtgttgctccatatcactacgaatccagtcaatttacggcatagcatacagccatcacaaagaaaggctctaaatatcttagaaaaactttgtatcagattattttacctgttatcagtaataacgaagttttctatgcctattacaccaaaaagttaaatgaaggcaaaggtcacagatgcgctcaaggccattgtatcagaaaactcttaagagttatttatcatctcttaagcacaagacaaccatttaaccccaaacttttggtataactaaacattaaaatcccctttttcaaaacacctcccacagaggggttatttagcgtgccacaaaatccacaattatttatatattttcaattttcattttcagttagctaaattttatgttttttcaaaaaacacttgatttttatatagttag

SEQ ID NO: 612 - DNA, 1360 bp, unidentified
  source 1..1360: mol_type = unassigned DNA; note = element_0751734
  misc_feature 1..2: note = core
  misc_feature 3..68: note = LE
  misc_feature 69..1103: note = CDS
  misc_feature 1104..1360: note = RE
  misc_feature 1110..1349: note = bridgeRNA
ttatggtatggcccgcccctcgcttccgggcgcaatattggcgctgaatttggagggggagaggaccgatgaaaaggtcatcaatcgctgtaatcggcatcgatcttggcaaaaatagctgtagcctggctggtcaagacgcgactggcgccatcgttttgcgccgtaagatgagtcggcaaggcatcattgctttcacggcgactctcccaccatgcgtcatcgccatggaagcctgttgcggggcgcattttttcggacgcacgttcgagacccagggccatgaggtccggctgatgtcgccggaatatgtccagccctatgtgaaagcccaaaaaaccgacgatcgggacgcagaggcgatcgccgaagcggcgccccggccgacgatgcgttttgtgtcccttaagagcgaggctcaactagacttgcaagccttgcatcgggccagagaacgccttgtgctcgcacgcactgcgctcatcaatcagttacgcgccgtcctgttcgagcgcggcgtcatccttccgaaaggtcggttgcttcttatgcgacgtcttggagagatcggcgttgagagcttgccgatcagcgtccgcacaaagatcctggtcaatgacctgcttgacgagtgcacggcgctcgacaagcgcatcaaaggttacgacgaggaatttgccgctgtggcgcgtaacgatctccaggcgcgccgtctttcgggaatcccgggcattggcgtaatcaacgccacggcgctgattgcggcgattggagacggcagcgcgtttgcgcgtggtcgtgatctcgcatcctggctcggcttgacgccgcgtcaacattcgacgggcggcaggaccaagatcctgggcatcagcaagcgtggaaaccaatatttgcgcaagcagctcattcatggtgcgcgagcggctctgccgcatttggcggccaaaccaacaagaatgggcgaatggttgcgagaaatgctcaatcgcaggcataccaatgtcgtggtcgtcgcgttggccgccaagctcgcccggattatctgggcgctcttgcgccgtgaaacgacctacgatcagagcgcgatcatcggagtttgacaataccgccttgcggccaatccctgacgggcgggccgcgtcgttgtctgtgagaggtgaagaacagatggcataacggtcaaaccggcggtcggaaatcctggtcctaaatgcggcgctcgacgccgtcgcctttatgaggatccaggccgcgcggatatccatcttggccagggaaagccctgagaccggatacgttgatgcagaccgagcatgccatcgaagcgacactcttgcggaccgggcgggccatacgt

SEQ ID NO: 613 - DNA, 1446 bp, unidentified
  source 1..1446: mol_type = unassigned DNA; note = element_075227a
  misc_feature 1..3: note = core
  misc_feature 4..219: note = LE
  misc_feature 220..1431: note = CDS
  misc_feature 1432..1446: note = RE
  misc_feature 10..212: note = bridgeRNA
tccctaaggttgatgttgttcggggttggatgccctggatgcccagggcgacggggtgtggctgatcgttgtctgccgcgcggtggctcggaaggaatggccgccctgtcgttctggacgccctggccactgattcagatctgatgcggactgtcgctgtttagggacctgttggcggggttgtccacggggttgacctgcgataacaggagatcttgcgtgaaggttcggccagtgatctgggtcgggatcgacgcgggcaagaccatccatcacgcgtgtgcgatggatagcgaaggcaaggtcgtcttctcgcagaaggtgaccaacgaccagaccgcgatcgagcagctcatcgcccgcgcgaacaagaccgccaccgaggtgcggtgggcggtcgatctgaccagcaacgccgccgcgctgctgttggccgtactggtcaccgccggccaacgagtggcatacgtgcccggccgggtggtcaatcgcatgaccggcgtgttccgcggtgaggccaaatccgacgccaaagacgcccggatcatcgccgaaaccgcccgcatgcgctcggacctcaccgaactgtccacaccagacgaattggtggtcgaactgacccggctgaccgcccaccgggaggacttgatggccgactgggtgcggggcgtcaaccgcctgcgtgacctgctgaccagcatcttccccgcactggaacgcgccttcgactactccacacgcagcgcgttgatcctggtagcgggctaccagacccctgatgccgtccgagcagccggcgagcacggtctgacgcgacatctgctcgaccacagcgcgtgggccaaggggacaccgtccatggtggacaaaaccttggcagctgcggcatcccagaccgtgcggctgcccggtgagaccaccaccgctgtgcttatcgcccgcctggcccggcaactgctcgacctggaccgggaaatcaaagacaccgacaagctgatcaaggaccgcttccgcgcccacccgcaggccgagatcatcgaatcgctgcccgggctgggaccgatcttgggtgcggagttcatcgtggccaccggcggcgacctggccgccttcgccaactccgggcgcctggcctcttacgcaggcctggtacccgtcccgcaggactccgggcgtgtcaccggtaacctccgccgccccaagcgctacaaccgcaagctgcgccgggtgttctacatggccgccctctccagcatccgagcaaacggcccctcgcggacgttctacgacaaaaaacgcggtgagcgactgatccacacccaggccctgctcgccctggcccgacgcctggtcgacgtgctctgggccttgctgcgcgacggccggaccttcacaccaaccgcgccaccacccgctaccactgcggcttgacacgatcattcagat

SEQ ID NO: 614 - DNA, 1436 bp, unidentified
  source 1..1436: mol_type = unassigned DNA; note = element_07597ef
  misc_feature 1..2: note = core
  misc_feature 3..229: note = LE
  misc_feature 230..1420: note = CDS
  misc_feature 1421..1436: note = RE
  misc_feature 13..222: note = bridgeRNA
tccctacattgttctgcgggaggcggtgagcccttcgtatggttcactcacccaggggcaccgggtgtggttgaaaaggctctgccgcttgtggctctcactgattggccgcccggtgccccacgacgactcggctgccaattaggaattgcgaatgatcgctgagtagggaatcgacagcgaggtcgtccgtaggaggaaccagcagcacaccgcacggaggcaccacatggccgcgatctgggccggcatcgacgcaggcaagacccatcaccactgcgtcgcgatcgacgacagcggccgccggctgctgtcacgacgcgtcgccaacgacgaaccccaactgctcgaactcctcgccgacgtccaagctctcagcgacgaggtgacctggggcattgacctggccgatggcggagccgccctggccatcgcgattttcctcagccacgaccagccggtgcactacatctccggccgagccatccaccgtgcatccgagagctaccgcggcgagggcaaaaccgacgccaaggacgctgccgtcatcgcagaccaggtccgcgtccgccgtgatctgcagtccttacacgccgacgacggagccgtcaccgacctcaagatcctcacgggccgacgcacggacctggtcgccgaccgcacgcggactgtcaaccgcctccgtgcccagctgacgggcatcttccccggactggaacgggcgttggatgtgaccaacaccggcccgctcaccttgctggccggctaccagacccctgctgccatccgccggatcggcagcaaacggctggagacctggctgcgcaaccggcacgtacttcgcgctgaccggctcgccgagatcgccgtccaggccgccgagcgacagcacaccagcctgcccggagagaagctgaccgcccagttggtgcacacactcgcgacggaggtgacggccctcaaccagcggatagccgagctcgacaaggctatcgaggcacggtttcgcgaccacgccacctttgaggtgatcacgagcatgcccggtctgggcatcatcctcggagccgagttcctggcagccaccggcggcgacatgaacctcttcggcaccgccgaccgtctcgccggcttcggcggtgtcgctccggtgcctcgcgactccgggaaggtcagcggcaacctgcggcgcccgcagcgatacaaccgccgtctccaacgggtcttctacatctcggcgttgttcagcatccgccactgccccgagtcccgccggttttacgatcgcaagcgagccgagggcaagcgtcacacacaggccgtcctcgcgctcgcacgccgccgcgtcaatgtgctctgggccctcttgcgtgacggacggtgctatgaggcgaccccacccacggttctcgcggcttgacagaccgcattaggaa

SEQ ID NO: 615 - DNA, 1429 bp, unidentified
  source 1..1429: mol_type = unassigned DNA; note = element_0761e79
  misc_feature 1: note = core
  misc_feature 2..219: note = LE
  misc_feature 220..1416: note = CDS
  misc_feature 1417..1429: note = RE
  misc_feature 13..240: note = bridgeRNA
ctactaggaaacttcccgcaggatcggtgtccggccagacttcgatccaggtgatcggcgggacgctctcttatcggctgcccaccgatggtgtggctctcatctggactgcgcctcgccggtcaccgtgacgaggagtggctccagaggggtctgcccagctcgtagtagcaatgcccacctcgtcgtcctgctggttcccagttgcgaggtgagcagatgagcaagacgcaggcggtgatcatcggggtcgatccccacaagatgtcggtgacgatcgaggtcgtcgacacccacgagcagctgctcggcacgggtcgtttcgctacagacagagccggtcacgcagcactccagcgttacgtgaagcagtggccccaacgcacgtgggccgtcgagggagccaacggcgccggtcgtcccctggcccaacgactcgtcgccgccggcgagcgggtggtcgacgtgccggccaagctcgcggcccgggtgcggctcttcgacaccggccacaaccgcaagaccgacgccctggacgcccactccatcgcggtcgtcgcggtccgcaccgggggcctgcgggtgttggtcgaggacggcgagctcgaagccctgcggatgctcaccgaccgccgtgatgaactcgcccgccaacgggtccagacggtcaaccggctgcagcgactcctcagcgaactgctgcctggccagcgcaaacgcgacctctcagctacccaggccaagaccatgctggccaccgtgcggccgcgtgacatcgccggcaagactcgtcgccggatggctgccgaggaggtcgccgacctggtcgcgggcgatgcaaagctgaagaagatcaaggccgaactgaaggcgacggtcctcgcccgcgggtcaggtctgatggacatctacggcatcggcccagccggcgccgcccggaccctggccgacgtcggcgacgtcacccgcttcgtcgaccgcaaccggttcgcgtcctggaccgggaccgcgcccctggacgcctcatcgggcgagcagacccgacaccgcctgtcccgagcggggaaccggcggatgaaccacgtcctgcacgtcgccgcgatcgtgcagatccgccacgacaccgagggccgcgcctactaccgccgcaagctcgccgctggcaagaccccgatggaagccctgcggtgcctgaaacgacggctgtccgacgtcgtctaccgacagctcgtcgccgacgcccagaagcacgatggagcgggcccgggagggcactgcggggcgacacttcaatccagcgcggccgactcacacccgctcatcgacacttcggatcagccacttcccggacccgcgcagccgacgctacgccgaccatctcccggtcggaagaccctcacaacgagcactccttgacacagaggggtgc

SEQ ID NO: 616 - DNA, 1468 bp, unidentified
  source 1..1468: mol_type = unassigned DNA; note = element_076d454
  misc_feature 1: note = core
  misc_feature 2..523: note = LE
  misc_feature 524..1453: note = CDS
  misc_feature 1454..1468: note = RE
  misc_feature 44..220: note = bridgeRNA
cgttacctttttcgtagccccttcttcgggagaggatgtgggtgtgctggcctgacggccccggcatgattcctgcccccagtcgaccatgatccggggggtgatgtcaccggggcccgaaggtgccagggatatcgctgataggggccgggcagaaagtattcgaggccgttcgtaacgtggatgccgagctctgacaccgcagccaagccagcacatatggacactgtttgctactgctgggagggaactgcgtgatcaagaaccatgccgaggtcgatgttttcctcggagtcgatgtcggcaagggagaacaccacgccgtagcgctggaccgagccggcaggaagctctacgacaaggcgctgccgaacgacgaagcaaagatgcaggccgtcatcgagaagttggccaagcacggcgcgatcctgttcattgtggatcagccagcgactatcggcgccctgcccgtcgcggttgcacaggccgccggcgtgcccgtcggttacctgcccggccggcgatgcgccgcatcgccgacctgcaccccggtgaagccaagaccgacgcccgggacgcttacatcatcgccgaagccgcccgcaccatgccgcacacgctgcgctcgatccaggtggctgatgagcaggtcgccgagctctccatgctctgcggcttcgacgacgacctggccaaacagatcaccgcgacctccaaccggctgcgcggcctgctcacccagatccaccccgccctcgaacgggtcctcgggccgcgcctggatcacccggcagtgcttgacctgcttcgtacgtggcccaccccggaagccctgaaaacggctggccgcaagcgggtcgccgccaggctgaaacggctcgctccgcggatgtatgctcgcctgaccgaggagatcttcgacgccctcgaccagcagaccgtgaccgtgatcggtaccaacgccgcggccgtcgtggtgccacagctggccagcatgctcggggacctgcgcgcctcccgtgagaccctccacgcccaggtcgaggccctcgtggaggcccaccctcttcactcggtcctgagctcgatcccggcggtcgggatcaggaccgaagcccgaatcctcaccgaaatcgtcggcaaggaattcgccaccgccggacacctggcttcctacgccggcctgtccccagtgacctggcgctccggctcctcaattcgcggtgaccattcctcacgccgcggcaacaagatccttaaacgagcgctcttcctctccgccttcgccgcgctgaaggacccgctgtccagggcctactacgaccgaaaacgcgcgcaaggcaagaaacacaaccaagccctcatcgccctcgcccgccgacgctgcgacgtcatcttcgccatgctccgcgacggcaccctctacgaagcccaaaaaccagccgccgcttgacgaagaacatagggg

SEQ ID NO: 617 - DNA, 1436 bp, unidentified
  source 1..1436: mol_type = unassigned DNA; note = element_07700a6
  misc_feature 1..2: note = core
  misc_feature 3..166: note = LE
  misc_feature 167..1408: note = CDS
  misc_feature 1409..1436: note = RE
  misc_feature 21..194: note = bridgeRNA
cttgtatgttgagtcctcgctcgctaccgggctagatagcgctcgacgggatccgggagagggtcgccacaggctgctcgaggctccgtcctcggttttgagatcggcgccctcgcccggtgtccaacgctcggacggtatcccgaggcgtttcagacgacctcgcatggacaagcgtgagcaaggacatcgggcccgagggctcccggccgtcccgtcggaaagggcgggtatgcgcttcgtcgggatcgatatcggagcggaacgccacgtggtggcctgggtcgatgagcagggcaccatcctgcagcgcccgacggccttccgcgaagaccgcgaaggctatcagcaattgctcactcagctcggctcgcgggccgagacgctcatcgtcatggaggccaccggacactattggcaaaatctgtttgcgacgctcgcggccgagggttttgcgatcgcgctcatcaatccgttgcggacgcggcgctttgccgaggaagacctggtccgcacgaagaccgatgccatcgatgcgctggggctggcgcgctttgggcagcagaagcgaccgccggcgacggagttacccgacctcgcaacgcgagatcttcgcgaactcgtccggcttcgggtgcgctttctccaggactttggtgatcgcacgcgacagctccatcgcgccgtcgatttgagcttccccgaattcacgcggttcgtggtcgagctggacagcccgcgggccaccgccgtgctgcacgctttccccacggcggcggcggtccgcgcggccagtgagcgccagctcgccgccgtccgcggcggccaacgcaccgtggggcgtgaactcgcccgcgccctcaaagccgcggctggtacatcggtggggcagcatcacaccgaggtctacgcgcgtcaggtccgcttcttctgtgaagatctggacttgctgcggcgtcggctcgccgagatcgagcgcgacatcgaacagctgctgacgaagcaccacgtgggccggctgctcaccacgatcgacggcatcggtccccagaccgccgcaagactcgtcgcggaactcggtgaccctgcgaagttccgcagcgccggtgcgctcaccgcctacgttggagccattcccggcttgcggcactccggcaagcagaactgggatcgcgccggcctcgcgcgctgtggacacgccaagctgcgggccgcgctctggatgccgacgctggtcgccgtccgctgcaatccttggctccgcgcctattacgagcggctacgcgctcgcggcaaactcccgcaggttgcgctcatggcggccatgcgaaaactgctcgtcgcgatctacgccgtggccaaacatcgtcggcccttcgtccccctcgtcacgatgcgcgcgccatgaaaacatcacgtgaccgagctgacggtat

SEQ ID NO: 618 - DNA, 1389 bp, unidentified
  source 1..1389: mol_type = unassigned DNA; note = element_0774db6
  misc_feature 1..3: note = core
  misc_feature 4..87: note = LE
  misc_feature 88..1116: note = CDS
  misc_feature 1117..1389: note = RE
  misc_feature 1087..1376: note = bridgeRNA
agatggggtggttgccgccctccccagacggcatcgcaatgtgccaagatggtggtctgatagccacgaagcggagaggacgacaagatgaaggatacaataatcggggtggatttggcaaaacgagttttccaactccacggtgcaacggcgacggggcatgtgatgtttcgcaagaagctgacgcgcgagcaattccggcggttcatggctgaacatccatcctgcatggtcgtattcgaggcctgcggcagcgccagctactgggcgcgcgagatggaaaagcttggccatgacgccaagctcattgcgccacaatacgtaaaggctttcgtgaagcgccagaaaaacgacgctgccgatgccgaggcgatcgtgatcgccgcgcgccaacccgagatgcggtttgtcgcccccaagacggaagatcaacaggccagggcgatgctgttccgcagccgtgagcgcctggttcatcagcgcaccgaactggtgaacgcgctgcgggcggtgctctatgagcagggccacgtgtttcctgccggcatcggccatctcaagcggatcgaggcgctggtcgaagaccccacctgcgacctgccagccctgatcaccgcggaatgccgcgacctgctggcacagattgccgaacagaccgacaggatcgacgcgaaaaccaaagccttgaaagagctggcagccgcgaccaatacggcgcgccgtctgcagaccatgccgggggtcgggcctctgacggcgctcgcggtcgaggcctttgcgcctgacgtatcgcagttcaaacggggccgagatttcgcggcctggctggggctggtgccgcgccagtactcttccggtggcaaggagcgcctggggcgaatatcgaaggccggtcagaccgacatccgacggcttctgatcatcggggcgatgacccggatcatgggccgcgcgcgccacaagatcccggcggacagctggcttggtcggatgctggcgcgcaagccgaaaatgctggtcgcaatcgcgctggccaacaagatggcgcggcagctctgggcgatgctgacgaagaacagggattatagggatccggcgctggcaacaacggtatgaatatcgtgtcataatcagccagtgtcggtgcaacggggagtgtgagaaggcgacgaccagaatgggcgcaacgatcgaacagatccagattgggaaaaccagtgcttgtcttggagctatatagctcgttcataagatttggacctgatccgctgatcaccataccggcccgcggcttctgaaatgccgcacaacgaggcctgacagaagaccgcaatcgatcacacgccaatagggtcagaaacttcttgcatcatgggcggcaaccacaga

SEQ ID NO: 619 - DNA, 1731 bp, unidentified
  source 1..1731: mol_type = unassigned DNA; note = element_0784884
  misc_feature 1..2: note = core
  misc_feature 3..416: note = LE
  misc_feature 417..1586: note = CDS
  misc_feature 1587..1731: note = RE
  misc_feature 54..332: note = bridgeRNA
ctcgtataatatctttcagatacataaatacatgtatctcagttaccaaataaatattgttcaataggcttagtaaagcccatgatataattgtcctagtgtcaatcaggtaatagttcttttcccccctgttgaaccagtaatggttgcttcataataagtctgttcccctgacatggaagttagcttcaaaccggctggctgtttgcttaagtacatggacaaccatctaacagtgtggtttcgcatctgtccatcttaagctggattcttatatgcgagggtgtcgatgctccatgatcatgggttttaccaagccgattgaacactttaatccataacgaaagaaggtgattacaataaacacactttacgtcggtattgatgtaagcagcaaatccaatgtcgtttacttaatgcttccaaatggtgataagcacagtaacttttctgttgccaactcacatgaaggttctacacaactggtaaaaagaattctttctgcgttaacttcacattcccttgacacggttctgattggtcttgaagcaacctctgtctatggagacaatctcgtgtatttcttaagggaagatgccactctggcaccatttaacagaaagattcatgtcatcaaccccaagcaggtcaagaaatttcatgacgcttataatgacctgccaaagaatgattatgtggactcttttgttattgctgactgcctgcgtttcggtagaatcaacaaagaggtttatctcggagactatcgctacaaagcactccagaacctcacacgggcacgcttcttcgctgttcagaatcttgtcaaagaaaagcagcgatttatgaatgtgctgttcaagaagtattctacgatgacgcaggagaaggtattcagcgataccttcagcactactgcccttgctgtctacgatgaatttgaatccgcagaagcactggcaaatatggacttacatgagcttactgacttcatcattgaaaaaggaaagaaccgttttcctgatcctgatgcagtagccaaagccattcagaaagctgcccgcagttcttaccgtttacccaagacggtaaatgattctgtcaatcaggtgctttctatatctataacctccatgaaggcattggaatctcagatcaaagagttcgataaagctattaaagcccagatggaactcttgccaaatgtattgatatctattcctggtatcggacctgtatattcagctggaatcatggctgaaatcggtgatatcaatcgttttaacagccaagctgctcttgctaaatatgcaggacttgcctggaagcagcaccagtccggcggctttgagtccgaagttacacggctcatcccatccggcaaccgatttttaaaatactatctgtgtgaagctgcattttctcttgtaagatgcgacaaggaatacagcgacttctaccacctcaaatacaaagaggtcaacagatgccaacacaaacgtgcactcgcattaactgcccgtaaatttgtgcgcttagtctttcgactgctgaaagacaaccgcctacactgtccggcaaagtagatcatctacttgctgatgagctacgccctgctcgtttttaaaaatctggtcgacagggcttaggtgggtgttttttgtttcctcgagatatacacaaaaatatatgatttttgtatcatttatttcttgacatcacaccgctgga

SEQ ID NO: 620 - DNA, 1378 bp, unidentified
  source 1..1378: mol_type = unassigned DNA; note = element_078c958
  misc_feature 1..2: note = core
  misc_feature 3..87: note = LE
  misc_feature 88..1119: note = CDS
  misc_feature 1120..1378: note = RE
  misc_feature 1149..1366: note = bridgeRNA
tgatgctgtggacggctcctccaccggcacgcgagtgccatggatgtgggggctgctagaggctcccacgattcggaggagctatctatgcaaacggttacgacgatcggtctcgatatcgccaagtcggtgtttcaggtgcacggcgttgatggtgccggccaggtagtgatccgtcggcaattgaagcgtcggtacgtactagctttctttcagaagctgccgccctgtctggtcggtatcgaagcgtgtgcctcatcgcatcattggtcacgcgagctgcaggcgctcggccatacggtacgccttatgccgccggcctatgtgaagccttacgtcaagcggcaaaagaacgatatggctgacgctgaagcaatttgtgaagcggtcaccagagccaatatgcggttcgtgccaaccaagacgcctgagcagcaaagcggcttgatgcttcatcgcacgcgtcatctgttgatccgccagcagacctcagtcatcaacgcgattcgcgctcaccttgccgaatttggcatttccgcgccggtcgggcgcagaggtatcgaggaactgctgcgtgtcgttgccgatccgagcgataaacgggtacctgagcttgtgcgctcgtgccttgcggctctgggcagccaactgctcagcctcaaaaagcagatcttggaatttgatcgaatgatcctggcttggcaccgctgcaatcaaacgagcaagcgccttaattgtattccgggtgtcggtccgctgctcgcaaccgcgctcgtcgccagcgtcggtgatgctaaaagctttcgatcaggtcgcaatttctcggcttggatcggattggtacccaagcagcaatcgagcggcggccgtgagaggctcggcagcatcagcaaaaagggtgatcgctatctgcgcagcctatttgtcgccggtgcactcgcggtgatccgctacgccaaactccacggcagcaatcatcggccctggcttaccgcattactggctcgacggccaaccaaagtggcggctgtcgcgcttgccaataagcttgctcgaatggcctgggcactgatggccaggggcgagcgatacaattatccggtcgcgctcaggccgtagcgagatcgcgccgagtatctggcgtgatgtgaaggttgggagggcgaacagcacgtaatgcagagccggtcgatccggcgatcaggacaacccactcgtgccactgcattctcgaatgcgggcttttgaccgggacctgatccgcggagggcattatggccagcggtcatgtgaaccgcacacaggccgaacacatggctgcaccgacccaagcctgcgacgtgaggaaagtccttgccaacccggagccgtccacaca

SEQ ID NO: 621 - DNA, 1405 bp, unidentified
  source 1..1405: mol_type = unassigned DNA; note = element_078f1f0
  misc_feature 1..4: note = core
  misc_feature 5..89: note = LE
  misc_feature 90..1130: note = CDS
  misc_feature 1131..1405: note = RE
  misc_feature 1148..1393: note = bridgeRNA
atgatggtgtggaacggccccgctacgacagcatctaagtgctaaaacgtggtcgttgctcgcaacgccacaatgcagggagccgttccgtgaagcagattaccaccatcgggctggatttggccaagcaggtttttcaagtccatggcgccgacgccgagggcgccccgatcttcaaccgaaaactgcgtcgagccgaagtgctgcgctttttcgagaagtcgcctccatgtctagtcggtatggaggcctgcggcggttcgcatcattgggcgcgcgagatcgcggcgcttggtcacgacgtgcgcttgatcccgcccatctatgtgaagccgttcgtgaagcggggcaagacagacgcagcggacgccgaggcgatcagcgaggcagtgacccgcaagacaatgcgcttcgttccagtcaaatcagcggatcagcaggcggctgcgatggtgttgaagactcgcgcacttttggtccgtcaagaaactcaggcgatcaacgcgctccgcgcccatttatcggagttcggcgtcatcgccgccatcggcacggcgaaggttacggcgttgatcgagatcgtgcgcgacgaggcggacgttcgcttgccgaaagccgcccgcttcgctttggcggaaatcgccaatcagatcgaggcattgaagcggcagatcgaaaagctcgagcgggagattgtcgccgaggcgaagcatgacgaggacatgcggcggctggccacaattccgggagtcggggcaattactgcggcttccatcaaggcgcttgttccagatcccgacggcttcaagtccggtcgtcacttcgccgcctggctgggactgacgccgaagccccattcgagtggcggcaaggagcggctgggcgggatatcgaaaatgggcaatccaatgctccgctccctgctcgtccttggcgcgacttctgtcctgcggcacgcgcggggcaacgccaatgcgccccaatggctgatcgcccttttggcgcgacgtcccttcaaggtcgtcgccgtggcgcttgccaacaagatggcgcggatcatttgggcgcttctcaccaagggcggaacatatcggaatgctggtacggcgagcggcgccgcaagcgcctgagcctaacgatgaccagaacggactgaccggcgcggaagccgggcagaggcgaggtgcacgacgcagacgatgattccacgggacgaaatcccgaggcgagagaggccaccaccgtcatcgcgctcacagcgcgtctgaatgatcagcccctcgcatcgcggacttcatcgaggccagcggtccatgaccgcgttgacaggccggacatatgaccgcaccgttcccgcagaatgaaccgtctgaaaaaagcacttgcctgtggggccgttccacat

SEQ ID NO: 622 - DNA, 1514 bp, unidentified
  source 1..1514: mol_type = unassigned DNA; note = element_079c3f5
  misc_feature 1..4: note = core
  misc_feature 5..84: note = LE
  misc_feature 85..1143: note = CDS
  misc_feature 1144..1514: note = RE
  misc_feature 1251..1501: note = bridgeRNA
atgatgaggtggacggccccctcgcggcatcgctgtgccaagctggccggtgatgattcggatccagcagaggggcaccgtccaatgaacgaggctatcacatatcggatcgggtttgacgtggcgaagggcgttttccaggcacatgctgtgaaggacgagccgggcgagccggtggcgttcaagaagcggctgaaacgggcgcaggtggaggggttcttcgccacgctgccacgctcgctgatcggcatggaggcgtgcggctcggcgcactactgggcgcgggtagcgcggcgctacgggcacgaggtgcggctgatgccgccggcctacgtgaaggcctatgtcaagcgcaacaagagcgacccgctggatgcggaggcgatctgcgaggcggtggggcggccgaccatgcgcttcgtgccgatcaaggacgaggcggcccaggcgatgctgatgctgcaccgcatgcgcgcctcgttcgtggagcggcggacggcggcggccaaccagctgcgggcagccttcgccgagttcgggatggtggcggctgccggcaatcgaggcctgagcgagctgctggcgctggtggagaccgaggcggagaggttcacgggcctgcccgcagcgttgcgcctggtgctggcggagctggctcggcaatggcgaagctgccacgaggtggtgtgccgcatggaccgcgagatcgcggttggcgtgaagaagaacgcgcgcgccatgcgcctcaccttggtgccgaccatcgggccggtgggggcgagcgcgatcgacgccatgctccccaacccgcacgtgtttgagagcgggcggcacttcgcggcctttctcgggatcaccccgcgcgaggacagttccggcaagaccgtcaggcgtggcccgatcaccaagaagggcgacacctatctgcgccgcatcctggtgctgggcgcgaccgcctatctggcgcgggtgcggcgcggccaggtgcagggcgcctcgccctgggtgctccggatggcggcccaccccaagcgcaagctggcggcggtggcgctggccaacaagacggcgcgcatcgcctgggcgatgctcgccaagggagaggattatcgtgccccaactgcggcgttggaggcggcctgacggtgggctcgctcgggttcaccaaggggatggccgccatcccctctccgccaccgccgctcgcccgcttgagtgagcgagcgacggtggctccgaggggatggcttcgaggccaaggttaggcacggatagaggagttgcaaggagccgagatggcgtgatgacgaacggtcgaggtgaccggacccgaggaactccgtaccgtcatcgtggcttcgaccacgtcgggatgattggagctcgggcctcgcgaacttcatcagggccagcggccatgcaacggccgcatcaacaggccgtatacatgaccgctcccgagaccccagtcgtcacaccgtcaaaagtccttgccaaccgggggccgtccatac

SEQ ID NO: 623 - DNA, 1446 bp, unidentified
  source 1..1446: mol_type = unassigned DNA; note = element_079caac
  misc_feature 1: note = core
  misc_feature 2..18: note = LE
  misc_feature 19..1143: note = CDS
  misc_feature 1144..1446: note = RE
  misc_feature 1208..1437: note = bridgeRNA
taatgggatggtccggccgtgctcctgccccgccagcgttttaagctggccaggggcaccaaagacaaggagcacgccatgtctgagaagctcaataccgcaatcgccgtaatcggcattgatatcggtaagaactcgttccacgtcgtgggccacgatcagcgcggcgcgatcgtgctgcatcagaagtggtcgcgtggccaggtagccgcacgctttgccaacatgccgccgtgcctgatcggcatggaggcctgcgtcggtgcgcatcatctcagtcgcaagcttaaggcgtttggccacgatgctcgtctgatgccggcgaagtacgtgcgcccgtactcgaagggacagaagaatgacttccgcgatgcggaggcgattgccgaggcggtgcaacgcccgacgatgaagttcgtggcgacgaagaccgccgatcagctcgacctgcaggcgctgcaccgggtgcgggagcggtttgtcagccagcgcaccggcatcatcaatcagatccgcgctttcctgctggagcgcggcattgccgtgcggcagggacaacgcttcttgcgtgccgagttgccgcgcatcctagcaagaccccaggatgtcctttcgccacgcatggtgcacctgatcgagaacctggccggcgactggcgccggctcgatgagcggatcgaaagtctgtcgagtgagatcgaagccatcgcacgccaggatgccggttgcgagcgcctgatgagtgtgcccggcattgggccgatcatctccagcgcgatggtggccgcgatcggctctggagaagtcttcaccaaaggccgcgacttcgccgcatggttgggtctggtgccgagacagatgtcgaccgggggccgcacgatcctgggcaggatctccaaacgcggcaatcgctatctacgcgtcctgttcgtgcaggcggcgtgggttgtgctgatcaagccaaagagctgggaacgccacgggctcaaatcctggatcgaggcggccaagaagcggctgcaccccaacgtgctcgcgattgcgctcgccaacaagctggcccgcatcgcttggggcgtcctggctcatggccgggacttcgaggcaaggacgaatactaacgcaaccgcccaagctgcttgattgtccaacgcgagatgaaaaccgaaagatgaggaacgcgaaatgatatagcccaataacccttacccgccgaggtctgcgagaggatgagacgagatggagattcggtcttcccggcgcatgcgaacactggtgacccaaatggcccgctcgaggcctttccgctaatgagatcgcacgcgcgcttatatccatgatggcccggagcacaacacgctccaatcagaggccggatacattgatgcaagaccgcacaccgccagctcgacaaaatccacttgcaacgcacggccggaccataca

SEQ ID NO: 624 - DNA, 1538 bp, unidentified
  source 1..1538: mol_type = unassigned DNA; note = element_07ab388
  misc_feature 1..3: note = core
  misc_feature 4..261: note = LE
  misc_feature 262..1428: note = CDS
  misc_feature 1429..1538: note = RE
  misc_feature 15..241: note = bridgeRNA
tcttgtatactctatttatgattatagtaatttaagtgagtatacattcctttctttatattttatactataatctatttatggtactgtggatttggttcatttttttgtagctttgactaccctaaggagactcttaccacaggcctattttttaactagcaataagttatttagcgcaagacgctcgatcacaagaatatggaaaataggatctcgtgtgcaaacaacagtgccaaataaattaaagaggtgattcatatgtatctagtcggtatcgatatcgctaaatacaaccatcagtgttttatagctacaacacatggtgaagttatcaatgaattttcatttgataacaattcagacgggtttaagttattacttaaacatttaagtgctttagatcaatctttagaaataaaaatcggtcttgaagcaacaggacactacggcaatactttaaaacaattacttagtgcaaacggttataccttcatagagtttaacccctatcttgccaaacagttttttaaatccacaacgataagaaaaactaaaactgacaaggttgatgcacgattattatcaagtatgttagcgtctgtagactacaagaccttacatactaaatattaccacactaatgaattaaagtcacttacaagaactaggaatagtttgattgaaaccagatctaattcgttagttcaaataacaaatgccttagacatcgtctttccagagtttaaagcccattttagtaatagattaggtcttacagcactttatattttaaagaagtataaaactcctgaaaaaattagtaaacttactaaaaatcagtttcaaacaatttctaataagtttatgggtaagtttacttatccaaagtttttaaaacttaaagacttagctaagaataccattggtataaaatctaattctataactacagttatgataatccatattgatttatttcattctataaacactaatatcgaaatattagaaaatgaaattaaaaaaattatgagtctaactaactgtaaaatgattactataccaggaatatctttaatgtctgcagctactatacttggcgaagttaatgattttaacaacttctctaacccagccaagttaatagcattttcaggatttgatatagcaatttatcagtctggtgaatctttatcttacggtaaattagttaagagaggatcttctttacttagaaagacaatttggaatttagtcttaggaagtattcgattgatacctgaaataactgaatattatcataagaaacgtgctgaaggtaaacatcgaaatgtaatcttctctgcaatatcacgtaaactattacgcattatatatcatctagaaactaacaatgttagttacgataaaaacaaaattagataaatattaagtagctagatatttatttaataaatacgattttattaacctaatacatatcattaggtttttttcgtattgattaaattatttacttgacttattaatagtta

SEQ ID NO: 625 - DNA, 1455 bp, unidentified
  source 1..1455: mol_type = unassigned DNA; note = element_07b50a9
  misc_feature 1..2: note = core
  misc_feature 3..77: note = LE
  misc_feature 78..1202: note = CDS
  misc_feature 1203..1455: note = RE
  misc_feature 1203..1442: note = bridgeRNA
tgttggggtggacggcccccgacggcatcggtgtgccagaatgaggtcggtgaagatctcaaacaagggagccgtccgtgcctgagattatccgaattgggttggatacgtccaagagtgttttccagctgcatggagtggacgcggcggacaggccggtgctgcgcaagaagcttcgccggcgtgatgttctgccctttttcgccaagcttgcgccgaccaggatcgggatggaggcgtgcggaggggcgcactactgggcgcgcgaactcaaggcgttgggccatgaggcagttctgctgccgccgcaatacgtgaagccctacgtgcagcggaacaagaacgatgcggccgatgccgaggcgatctgcgaggcaatgagccgtccccggatgcggtttgtcccggtgaagacggccgagcaggaggcagcccagatgctgatgggcatgcgcgctcggctggttggctgccgcacgcagctgagcaacgcgatccggggctatgcagccgagttcggagtggtggcggccaaagggttgaacaagatcgaaccgctgttggcgcgtcttgagagtgacccagcggtgccggagactgccaagcagttgtttgccgcccatggccaggaatatgccgcgctcaaggcggaggtgcgcgagatcgaagccaagttggtggcctggcatcgccagaatgagttgagccggcgactggccgaggtgcctacgatcggtccgatcggagcatgcctgctggtgacgaaggtgaccgatccgcaagcgttccgatgtgggcgggatttgtcggcttgggtgggcctgacgccgaaggatcattccaccgccggcaaggtgcggctgggcgtcatcacgcgagccggcgacgagaccttgcgcaaggtgctgatcgccggtgcgacagccgtcattcagcaggtgcgcaaaggtcgcggcaatccgtcgccgtggcttgttgacctcgtccggcgcaaaccgcccaagcttgccgcggtggcgttggccaacaagatggtccgcgtcgcctggaggctgatggtcagcggtgaacgctataacccacaccatcgccgcagcccgcgaggggcaccgcgctccgctatggggggctgcgcgccgcgcccctcgcttgcctcgtgcccaaccgcaggcgccacaccagcagcccccatgcgggcataaccagttcagcgttcgtagcgctgaagccgaagcttgctcgagacggagcagatggagtgatcgatcgatcggagacgcgagacattccgcgggacccattggtgggctcacatcgcctacatgtttggaactcgcgtcgcggaccccatcttggcagcggtcatgtgcgaccgcatcaacagaccggacatatgatcgcaatcgcttcgatccatgccacgccgtcccttgcgagccggaggccgtccacata

SEQ ID NO: 626 - DNA, 1365 bp, unidentified
  source 1..1365: mol_type = unassigned DNA; note = element_07b6051
  misc_feature 1..2: note = core
  misc_feature 3..75: note = LE
  misc_feature 76..1101: note = CDS
  misc_feature 1102..1365: note = RE
  misc_feature 1132..1361: note = bridgeRNA
ttaataggatggtcagcccgatcctcacccagcggactacgctgagtgaggattttgtccttctggagggccatcatggacacggtatcgctagtcggcatcgatctgggcaagcactgcttccacctgcatgcgcaagacgcgtcaggcaggatggtgttccgcaagaagctcacgcgcagccagatgttcgcgctgctgggcaattttccgagctgtaccgtggtcatggaggcctgcgccggtgctcactggatcgcccgccgacttcaagcgctgggccacgaggccaagctaatttctccccacttcgtcaagccgttccggcaaggcaacaagaacgacttcgcggatgcgcaggcgatctgtgaagccgcttcgcgcccgagcatgcgcttcgtgagtccgcgtaacgaagcgcagcaggtcgtatcagccttgcaccgcgtgcgcgaggcgctggtgcgggagcgcaccggtacgatcaaccagattcacgcatttctgctggagttcggtatcagcctgccgcgtggcatggcggtgatccgcagactgccggccgtactggagacgcaagcgttgccgcccaggctggtggccgtgctcgaacggctgcaggcgcatttcaagtatctggacgagcagatcggccagctcgaacacgagctgctcacgcaactgcacgaagacgaacgcagcgaacggctgctggagattcccggcatcgggccaatcaccgccagcgtgttgatgtcggaattgggcgacgcccatcaatatggttcggcaaggcagtttgccgcttcgatcggtctggtgccgcggcaatacagcacgggcggcaaacccacgttattgggcatcagcaagcgcggcgacaaaggcttgcggagactgctggtgcaatgtgcgcgggtcatcatgctgggcatcgagcgccgaacggattccttgggcgtgtgggtccgcagcctgttggcacgacggcactcgaacgtggtggcttgcgcgctggccaataaattggcgaggatcgcctgggccatcctcgccaaagggacacactatcgaagcgcgccgacggctctgccggcctgacgcttcccatcgcttacagcttcagtttcagtcgtcacacctggttttgcgacgcgagatacgtgaaggcataaacgactcaacggccgggcaagtaacctgacacaaaaatcagcatgtcgatgctgaggggtttttgaggtttgcccggtgcggctcccatcatggggcgggatctttcccatccacgaccccggatagattcgagcaagtccactttaggtcaacgctgcctcgcttgcaaaaatcgggctgatcatagat

SEQ ID NO: 627 - DNA, 1463 bp, unidentified
  source 1..1463: mol_type = unassigned DNA; note = element_07c1001
  misc_feature 1: note = core
  misc_feature 2..225: note = LE
  misc_feature 226..1449: note = CDS
  misc_feature 1450..1463: note = RE
  misc_feature 13..228: note = bridgeRNA
ctactagagacttccttgcaggatcggtgtctggccagactcggtccaggtgtccggcggagggctctcctcgcggctgcccaccgagtgttggtgtggctctcttccggtctgcaatccgtcggacaccgtgacgaggcgtggctcgaaaggggactgcccagctcgtagtagcactgcccacctcgccgtccctaccggtacgaggatgagcaggagcaggtaatgacgaaggtgttcatcggggtcgatccccacaagctctcggccacgatcgaggtcgtcgaccgacacgagaagcttctcggcaccggccggttccgcaccgaccaggccggctacgccgcgatgcggacctatacgaagaactggcccgagcgggtctgggccgtcgagggagccaacggggccggtcgccccctggctcaacgactcctcgaggacggcgaacatgtcgtggacgtgccggccaagctcgccgcccgggtccggctcttcgataccggccacaaccgcaagaccgacgcccgcgacgcccactcgatcgcgatcgtcgcggtccgcaccaccagcctgcgagtcctgcgtgccgacggtgagctcgaagctctacggatgctctgcgaccgccgcgaggagctcacccgactccgggtccagaccgtgaaccggctccaacgcctcctcgccgagttggtgcccggacaggcgaagaaggacctcaccgccctgcaggccaaggcaatcctcgccaccgtgcgccctcgcgacatcgccgggaagacccgccgacgaatcgctgccgaggagctcgccgacctggtcgcggtcgaggcgaagatgaagaaggccaccgccgagctcaagatcctggtcaaagcccgcggctcccgactgatgaacctgcacggtgtcggacccgtcgtcgccgcccggaccctggccgacgtcggcgacatcgcccggttcgccgaccgcaaccggttcgcgtcctggaccggcaccgcgcccctggatgcctcctcgggcgagcagaaccggcaccggctctcacgagccgggaaccgccgaatgaaccacatgatccacatcgccgcggtcagccagatccgactcgacaccgaaggacgcgcctactaccggcgcaagctcgccgccggcaagaccaagctcgaagcactgcgctgcctcaagcgcaggatctcggatgcgatctaccgccagatgctcgccgacgccgaccgagccgcgtccaccagcgcagccgagaccgttggcacgggcccgggagggcactgcggggcgactcatgaatccagcgcggtcgacctgcccccgcacatcgacacttcggatcagccacttcccggacccgcgaaaccgacgctacaaccgcatcagcccgcccggaagacccctcactcgaggacaccccagaccaccggttgacaacaaaggggagc

SEQ ID NO: 628 - DNA, 1455 bp, unidentified
  source 1..1455: mol_type = unassigned DNA; note = element_07c80b5
  misc_feature 1..2: note = core
  misc_feature 3..216: note = LE
  misc_feature 217..1440: note = CDS
  misc_feature 1441..1455: note = RE
  misc_feature 12..201: note = bridgeRNA
tccttacctttcttgcagggtgttcgtggccgatggccttaggcttcgagttgcccagggacgtcgggtatggctttcattttgttgccgtcggtgatggccgaaggagattggccgcctggggtcccgcgatgactcgaccgctaattgagagatgcgatttgatcgctgtgtaaggacacgccggcgtggtcgtctgctgggttgatggcacctatgacgaggacggaggtggttgtggcgcaacaactgtgggccggtgtcgacgccggaaaatctgagcatcactgcgtggtcatcgatgctgacggaaaccgacttctgtcccaacgtgtcctcaacgatgagacagcgctgctggaattgatcacgtcggtgaccacgcttgcagatgggggcgagatcacctgggcgatcgacctcaacggtggtggggccgcgttgttgatctgcctgctgatgaccgctgagcagcggctgctctacattcccggccgcacggtctatcacgcgtcgggcagctaccgcggcgagggtaagaccgacgccaaggacgctgcgatcatcgccgatcaggcccggatgcgccgcgacctgcaaccgctgcgcaccggtgatgacatcgcggtagaactgcgcatcctcaccagccgacgcaccgatttggtggccgatcgcacccgagcgatcaatcggctgcgcgcccagctgctggagtactttcccgccctggaacgcgcctttgactacagcaagagtcggtccgcgctgatccttctcaccggctaccaaacccctgatggactgcgccgcgccggcgctgctcggctgacggactggctgcgcaaacgtaaggcccgcaataccgatgccatcgtggccaaagcccttgcggccgccaacacccagcacaccatcgtgcctggacaacacctggcagccaccgtggtggctcgcctggctaaggaggtgattgccctcgacatcgaaatcagcgacaccgagacgatgatcgaggagcgatttcgccgccaccgccacgccgaaatcatcttgagcatgcccggattcggcatcatcctcggcgctgagttcatcgccgccaccggcggcgacctcagcgtcttcaattcggtagatcgcctcgccggcgtctccgggctggcaccggtaccccgcgactccggacgcatcaacggcaacctcaaacgccctcgacgctacgatcgccgactcttgcgcagctgctacctgtcggcccaaatcgccatccgcaccgaccccgcctcgcgcacctactacgaccgtaaacgcgccgaaggaaaaacccacacccaagctgtgctcgctctggcccgccgccgcctcaacgtgctgtgggcaatgctgcgcgaccgcaagccatatcaatccaccgcaactactcctgcggcggcttgacaacttcattgagaa

SEQ ID NO: 629 - DNA, 1488 bp, unidentified
  source 1..1488: mol_type = unassigned DNA; note = element_07cad29
  misc_feature 1..2: note = core
  misc_feature 3..240: note = LE
  misc_feature 241..1467: note = CDS
  misc_feature 1468..1488: note = RE
  misc_feature 40..239: note = bridgeRNA
ctaatgggagctgcggggtcgtagagactcggtagccgtagccgccagcaggtgagcactctcgccgccggaagcgtccgacttctgtggtcagaccgtgcccctgctggccggccgggaggccagaccgttgatggggtggcgtgcccgccgatcggggcgtgagcactagatccattaggccgcgtgccgcgccttccgcaggctgcaaggagcgaagtacctgaccaggaggacgagttgctgctgatcggcgatgactgggccgaagaccaccatgatgtcgagatccaggacgaggccggccggaaactggccgccgcgaggctgcctgagggtgtggaggggatcgccaagctgcacgagctcgtcgccaagcacggcggcggggaccttgacgccgccgaggtcgtggtcgggatcgagaccgaccgcggctcgtgggtgcaggccctgatcgcctccggctaccgcgtctatgcgatcaatccccggcaggtggcccggttcaaggagcggtacgcctcctccggcgccaagagcgacaagggcgacgcacacgcactggccgacatggtccgcatcgaccgggcccaactgcggccggtggccggggacagcgcccaggcccaggccgtcaaggtcgtcgcccgcgcccaccagaccctgatctgggaacgcacccgcaccttccagcggctgcgcagcatgctgcgggagtacttccccgccgccctgaacgcctacgccggcctggccctgaccagcacggacgcactggaactgctgatcaaggcacccacaccggcagccggggccaagctgacccgcacccagatcaccggtgtcctggcccgcgcccgccgacgcgaccgggacaccaaagcggccgcgatccagaccgcgctgcgccaacgacagctcggcctgcccgagccggtcaccgccgcctacgcggccaccgccaccgcgcacgcccatctgatcatcgcgctgaacgcgcagatagccgcgatcgaggagcaggtgaaggcccattttcgaacgcacccggacgctgagatctacctctcgatgcccggcatcgcggagatcaccggcgcccgggtgctcgccgagttcggagacgaccccacccgctacgcctccgccaaagcgcgcaagaactacgccggcaccagcccgatcacccgggcatccggcaagagccacaccgtccaggcccgctacgtccgcaacaaccgcctcgccgacgccctgcagacccaggcgttctccgccctgcgcgcctccccgggcgcccgccgttactacgacaagcaacgggcccgcgagaccggctacaaccccgccctgcgccagctcggcaaccgcctcgtcggcatcctccacggatgcctcaagacccgcaccctctacgacgaagcaaccgcctggtcacaccacacccaatcccacgccgcttgacacccaaacgacatggggtgt

SEQ ID NO: 630 - DNA, 1559 bp, unidentified
  source 1..1559: mol_type = unassigned DNA; note = element_07ce804
  misc_feature 1..2: note = core
  misc_feature 3..260: note = LE
  misc_feature 261..1427: note = CDS
  misc_feature 1428..1559: note = RE
  misc_feature 3..237: note = bridgeRNA
cttgtatgataattaggaagttaattatcacacgtttcctttcttttaatatcgtggttcaatacattcagatactgtggacttttgatttttccctgtagctctgactacttgaaggagtgtattgccgctacctttatctgaattgtttatagctggatgttgccggagtaatccgagtacttatttccatcaagtctacgatgataatcgctggtggatatcacggtatcagacttttgaaagggaggtgcaacctcatgatttacgtaggcattgacattgccaaactcaatcactttgcctcagccatatcttctgatggtgaagaactaatcaagccgttcaaatttacaaatgacaatgatggcttccatttgctgatttccaagctagatcctctagacaaggacagcctcatcattggtcttgaatcgacggcacactacggcgacaaccttgttcgatatcttgttgctaagaattacaaagtgtgtgtgttgaaccccattaagacttctactatgcgtaaaaacaacattcgcaaaacgaagactgacaaagtcgacacattcatcatctgcaaaactctcatgatgcaggaatctctcagatttgtgaccttttatgatcttgatctgatggacttaaaagcccttggacgcttccgtcagaagaccattaagcagcgaacccgcctaaagatccagctgacttcttacgtggatgagatattccctgaattgcagtattttttcaaatcaggtctgcatcaaaaatctgtctatgcgcttctcaaagaagctccaacaccggaagctgttgcttctatgcatatgactcatctggctcatcttctcaaagtgaactcgcatggacgctttaacaaagagatggctcagcagttaagagttctcgcacagaagtctgtcggtgccaacgacagttctctatctatccaggtaactcacacaattcaacaaatagagttactcgatagccaattagaaagagttgaagctgaaatgacggaaattatgaaattcaatgattctgtcattatgaccattcctggtatcggatatatcaatggaggaatgatacttggcgaaatcggagatatacaccgtttttcctgccccaacaagctgcttgcatatgccggtttagatccttctgtctatcagtcagggaactttcaggctaagaaaaccagaatgtccaaacgaggatctaaagtcctcagatatgcacttgttaatgcagctcacaatgttgttaaaaacaacgccaccttcaaggcttactacgaagccaagatggtcgaaggccggactcactataatgcccttggacactgtgccggcaaactcgtcaggatcatctggaaaatgatgactgacaacgtggaatttaacctcgattaagaggtctggatacctacatcatagatttgtttaaaagcacccaccagggagccttattaaggttacccatttttgccacgaaaaggatttattaatttccagctaatttaagcttgacttttcatagctggt

SEQ ID NO: 631 - DNA, 1418 bp, unidentified
  source 1..1418: mol_type = unassigned DNA; note = element_07cfdc0
  misc_feature 1..2: note = core
  misc_feature 3..126: note = LE
  misc_feature 127..1080: note = CDS
  misc_feature 1081..1418: note = RE
  misc_feature 1179..1417: note = bridgeRNA
gaatgatatgaacgccccccacccaacggtacatccgtgtgagctacgccgttgcgcggcgatcactatcaaatttcgaaatcggtgatcatattggcctactcagccgaattgaagggatccgtcatgacgcatacgatcgttggtgtagacatcgcaaaaaacgtgatgcaagttcattgggtcgatcaggaaactggcgagatcgtgaacaggcctgtcaagcgagcagcgtttctcgagtacttcgccaatcgcaatgcctgcctcatcgggatggaatcttgcagcggatctcaacactgggcccggcgattgatcgagatgggccaccaagtgaagcttatgcccgcgaaattcgtcaagacattcaacatccgcaacaagaacgatgccgcggacgcgcgagcaatctggatggccacgcagatgaccagcaaagcggttgccgtgaagaccgaggcccagcaggcggttctcgccctacatcgtatgcgccagcagctggtgaagtttcgcacaatgcagatcaacagcctgcgcgggttgctgagcgaatacggcgaggtgatgggtgtcggtcgtacggcgttggacaaggcagtcgcgggagttctggaaagactggcgggacgcttgcccgcaatactgattgatacattgcgtgagcaatggaagggtcttgacgatctggatcggcagatcggccagatcgagcgccggttgcgagagtggatgaaggacgatcaggctgccaaggcgatcgcggtgattccgggtgtaggtttgcttaccgcaacagccgcagtggcaacgatgggtcatgcgaaggccttcaaatctggccgcgagttcgcagcgtggctcggtctcgtgccagggcagaccggctccggtggcaaggtagagctgctaggaataagcaagcgtggtgacacgtacttgagaactctgctcgttcacggcgcccggagcatcgtctaccgagtgaaagcgcccgggccttgggtggagcagatgaaaaagcggcgcccgctaaacgtcgtaatcgtggcgatggccataaactcgcccggatagtttgggcgatgctggcacatcaacggccgtacaggaaagactacgaaagcgtcaaaccagcctgatttcacagagaggaaaagcttttgttgcaagggatggaacgtcaaaagttgcggcggcattcgagcgtgatgacaaaacgggtaggacctgggactcaccaagcctgaaaatttgtctgagacgattgatctcgtgaattgaatgaggcgtgagtcagcggatttcatgggggcccgcagcgaaacaggctgcaacaaggccgaatgtagagctgcagcccatcctgttcgtcgaagcctcgaaaacctggcgcaaaggggggcgttcatgta

SEQ ID NO: 632 - DNA, 1440 bp, unidentified
  source 1..1440: mol_type = unassigned DNA; note = element_07d54be
  misc_feature 1..2: note = core
  misc_feature 3..228: note = LE
  misc_feature 229..1425: note = CDS
  misc_feature 1426..1440: note = RE
  misc_feature 10..224: note = bridgeRNA
gctctaccttccttcctgggttagccccagccattcgtagggttgtggcgcccaggggagccgggtgtggctgtcgtcgtgctgccggttgtggctcgagatgcttggccgcccggttccccacgacgactcggccgccgattgggaagtgcgaatgtgtcgctgtgtagagcaatgccggcgaggtcgtccgtggtacgcaagacaagaacgacctgatggagtgcaatgagccggatatgggcggggaccgactgcggcaagacccaccaccactgcctggtcctggatgccgagggtgacacgctgctgtcgcgccgggtggccaacgacgagcccgagttgctggagctgatcggcgacgttctcgacatcgccgacggtggccgtgtgacctgggcgatggacatgacgggtggtgagcccgccctgttgatcgagctgctgatcgcccacggtcaggaactcgtctacatccctggtgtcgtagtgaatcgggccaccgacagctaccgcggcgagggcaagaccgacgcccgggacgcgaaggtgatcgccgaccaggcccggatgcgccgggacctgctgccgatccgccccggtgacgaggccgccatcgaactgcggcttctgaccgagcatcgctccgacttggtcgaggaccgaacccgcacgctcaaccgactcaagtccctgttgaacagcatgttcccggccctggaacgggccctagacatgggaaccgtcggcgccttggtcctgctgacgggataccagagcccggcagcgattcgccgcacgggcaaacggcgcctgacgacctggctgcgcaaccgcaaggtctaccgcgctgaagccctcgcagccaaggccgtcgaggccgcggagcgccagcacacggccgttgcgggtgagagggccatcgcgaagatggtgcacaccctggcgagggaggtgatcgccctcaacgagaagatcaccgagacggacaagctcatcgagggccggtttcgcgaacacgaactcgccaatgtgatcacctccatgcccggcatcggcaccaccctgggcgccgaactcctcgccgccactggcggcagcatggacgcgttccccaccccggaccggctcgccgctttcgccggcgtggcgcccgcgccacgagactccgggcaggttagcggcaacctccaccgccccaagcgataccaccgacgcctgcaacgcgtcttctacacctccgccttggtcagcatccgctgcgaccccaactcgcgccgcttctacgacaggaagagagccgagggcaaacgacacgtccaggccgtcctcgccctggcccgtcgtcgcgtcaacgtcctgtgggccctgatacgtgaccgacggtgctacaccgtgacaccaccagtcactcacgccgcttgacttccagattgggaa

SEQ ID NO: 633 - DNA, 1575 bp, unidentified
  source 1..1575: mol_type = unassigned DNA; note = element_07d6bb9
  misc_feature 1..2: note = core
  misc_feature 3..133: note = LE
  misc_feature 134..1165: note = CDS
  misc_feature 1166..1575: note = RE
  misc_feature 1198..1379: note = bridgeRNA
acatggggtaatcgcggcgcgatcgtcccaggctatttctatagatgatggctggctggggtggttgcccccgataagatggaaaaacgggctctcgattcgaaccgggcccaacatcaaacggagagcaaccatgaatcaatatatcgggcttgatgtttcattgaaagataccgcgatttcgatccgagaggacggaaagcggatctggcgaggaaagtgtccttcggacccgaagctcctggcagagacgatccgcaagcatgcgccgcatgccaggcgtgtcgtcttcgaaacagggccgttgtcgacttggttctatcatgcgctaacgaacgaggggtttccggcgatctgcatagaagcgcggcacgcgcaaaaggtattgaacgagacgctcaacaagactgacgccaatgatgcggatggcttggcccagttggccgaagccggcttctacaaagcggttcgcgtcaagtcgttcgacgccatgacgacccgcgccttggtggcggcccgcgataagctcgtgcacatctcaacgcaactcggcaatcagatccggggtgtcatgaagacgttcggtttcattgtccccgaaggaaaaggtcggatattcgatggcaatgtgagagagcttgtcgctgggaatgacaaccttgcacggatcattttgccgctgctcgatgcgtggcgcgacatccgcaagcgtgctgcaattcttgatcgccaactgctcgcagcggcgcggcagagccagtcggcgaagctgttgacgacaattcccggcataggtgccatcacggcgatctcttacgtcgctgccatcgagcatccgcaaaacttccggacttcgcgttcagtcggcgcctggctcgggctgaccacacgccgctatcagtcgggcgaggtcgattatgatggtcatatctcacggagaggcgacaaccatttgcgcgcgctgctttacgaagccgcgaccgtgatgctgacacgaaccggcgccaggactgaaagccgcctcaaagactgggggctcaagttgcgcgaacggcttggcttcaagcgcgccgcagtggctgtcgccaggaaactcgcggtcatcatgcataccatgctcaagacaggggaaatcttcaacccatcggccagcgccatcgtataatgaagctctgacagccgatgactctctcagcgcgtcatccttctgacgcgacgaggcgtccctgtcgtggacgtaggtcgggtcattccgttcacgtggcggcagctcctagagactgcgcataaaacataggaagaccttgcctgcgaggaccatgatgcggcgggcttgtaccgaccgcggagacaaccatgttcccgacatacgattgcctcacgtcaaaatgaagcactgagcgaacaccgagaacgcgccatatgaccgcccgctacgccgcccgctccctacggcgcttttgggggcgcgctcgcgagcggcttcgctaccaccgagctacacaccacctggcggacacgatcggacgatgtcgcttgcccaggccaccttgactaacgggatgcgattagaca

SEQ ID NO: 634 - DNA, 1464 bp, unidentified
  source 1..1464: mol_type = unassigned DNA; note = element_07e1b80
  misc_feature 1..3: note = core
  misc_feature 4..240: note = LE
  misc_feature 241..1449: note = CDS
  misc_feature 1450..1464: note = RE
  misc_feature 13..235: note = bridgeRNA
tccttaagttcgtagttgcagttacttcgtgttgttacgttgtgctgtgacccgggtgggtcgggtgaggctgcatggcgctagccggccttggtggtgcggcttgaagggactggccgcccgacctgcttggacttctctggccgctgattgagatctgcgatgtgatcgcttgtttaaggaaatgctggcggggttgtccgtggggaccgtgttggcagacaagcgaaaagaggtgcgatggcagcgagccaggtgtgggctggagtggatgtcggtaaggaacatcactgggtgtgcgtggtcgatgacaacggcgcggtgatgctctcgcgccgactggtcaacgatgagcaaccgatccgtgaactcgtagccgagattgagcaactggctgacgaggtgtcgtggacggtcgacttgaccaccgtgtatgccgctctgttgttgacggtgctggccgacgccggtaaaccggtccggtatctggccggccgtgcggtatggcaggcctcggcggtgtaccgcggtggcgagggcaaaaccgacgccaaagatgcccgggtgatcgccgaccagtcgcgcatgcggggtaccgatctgcctgtgctgcatcccgatgatgtcttgatcaccgagctgcagatgctgaccgcccatcgcgcggacctggtcgctgaccgtacccgcacgatcaaccggctgcgccaacaactcatcgcggtctgcccagcgttggaacgggccgcgcagctgacccaggaccgcggctgggtggtactgctgacgcggtatcagcgaccgaaagccattcgccaaagtggtgtttcgcgtctgacgaagatgctcggcgatgccggtgtgcgcaacgcggccacgatcgccgccgcggcggtggcggccgccaaatcccagacggtgcgcctgcccggcgaagatgtcgctgccggactcgttgccgagttggccggggaggtggttgccctcgatgaccgcatcaaatccaccgatgccgacatcgaggaccgatttcgccgccatcccgccgccgcagtgatcaccagcatgcccggcatgggtttccgtctcggtgcggaactcctcgccgccgtcggcgatcctgccctgatcggctctgccgaccaactcgccgcttgggccgggctggcgccggtatccaaagattccggaaagcgcaccggacgactgcacacccccaagcgctacagccgacgactgcgccgcgtcatgtacatgtccgcactcaccgccatccgctgcgaccccggttccaaggcctactaccagcgcaaacgagacgaaggaaaacggccgatccccgccaccatctgcctggcgcggcgccgcaccaacgtcctctacgcactcatccgtgacaaccgcacctggcaacccgattcacccccgatcaccaaatcggcggcttgacttcttcattgagag

SEQ ID NO: 635 - DNA, 1598 bp, unidentified
  source 1..1598: mol_type = unassigned DNA; note = element_07e2945
  misc_feature 1..2: note = core
  misc_feature 3..266: note = LE
  misc_feature 267..1487: note = CDS
  misc_feature 1488..1598: note = RE
  misc_feature 25..286: note = bridgeRNA
ctgatacaatatatttgaccgagaaagtgcgggatttggaatagcacttttcaagttccgttacctaagctataatggaagggtatttaaggtctgacgttttcctccttgtgcttttacgcacgcaattgagactgtcagctgactttccattatagcattcggtttccgcaggttgggcttcgcgtccgtgtaactaatcagattgaatcggtaatggttcttgtcggtcacctttttacaaatccatatcagagaggttacttatgaacgctgtcggcatcgatgtttccaaaggcaagtctaccgttgccatcctgcgccccggcggagaagtaattgcttccccgttcgaggtttctcacgatccaagggaactttccgagctcgtcgcactcatcaaaagcttggacggtgataccaaagttgttatggagtacaccggcaactactatctccctgttgctctgttcctccaaaagtacggtctcttcgtttccgtcgtcaaccctattctcgtaaaagactacagcaacaaatctttaaccgttcgcaaaggcaaaaccgataaaaaagattctgcaaaacttgccgccttcgccttagaccgctggaatgaactgccgctcttttcctctcaatctgacacgagaacgttactcaaagcctttaacaggcaatataaccagtacatcaaactcaaagtcatgctcaaaaacaatctcatctccattctcgaccagactttccccggggcgaatactctgttcactactcccgccagaaaagcggacgggcacgagaaatggattgattttgtgctaaaattcccgcattgcaagtgcgtttcaaagaaatctttctccgctttttccaaatgctatctttcatggtgcaggaaatgcggttataatttttccgaaaccaaagcaagagaaatttatgcgtttgcctgtaactgtactccgtctttagccgattcagaggctgctcatacgcttgtgtctactgcaattctacaattgaatacactcaatgaaactttcgcctctttacagagagaaatggatctgttggcaagttctcttccggagtacgataccgtaatggatttatacggcgttggctctgttctcggttcgcaacttattgccgaaattggcgacgtgtcgcgcttttccaataaaaaagctctcgtgggatttgcaggtattgacgctccaccgttccagtccggcaatttcaatccgcagtcacgctcaatctccaagcgcggctccgctgttctgcgcaaaaccttgtttcaaatcatggctgtcatcctccaaaatgcacctgcaaacgagccggtattccttttcatggacaaaaaacgttccgagggaaaacatttctacgtctacatgatggcgggcgccaacaagtttttacgcatttactacgcacgtgtaatggaacacctgaactcgttgcaagaagctgcttgaccgtttttatagctgctaccgttctcccgaacggctttttgtcatgcattttttgctcgcaaaatttcttagaaaaacttcttgctttttccttgacttttttttgcaggt

SEQ ID NO: 636 - DNA, 1366 bp, unidentified
  source 1..1366: mol_type = unassigned DNA; note = element_07e5bc8
  misc_feature 1..2: note = core
  misc_feature 3..255: note = LE
  misc_feature 256..1296: note = CDS
  misc_feature 1297..1366: note = RE
  misc_feature 36..206: note = bridgeRNA
cttgtatcttgtttgcatctgcccgattcggtctctctgtgttagtgggggaatggatcgggattcggcgggaggccgttcacatccttaggcgcagtgagttggcagcctggattatagataggccccccgccctcctttctcaacgccgtggagaatctcaggccgcgagagcctgcatacaaggacggcgagagaggtggtacagggtcggggagccgaagctcagtctaatccagacttgcgaggttcaacatgcctgaaacggaagtcgacacgtttgctggaatcgatgtaagcgcacgggagttaagtgtcgccctacgccgggggaaaggcgaggacaagcccgctatggctaagttctctaaccatccttccggacacaaggccctgatcgcccacttgcttcggggcggccggcgagtgcgggtctgcctggaggccagcgggaattacagcctggatctggcgttgaccttgcaagcacaccgccaagtggagatcagtgtcatcaatccgcggcgggcacgacgattcgcggaatcgctcggtcagcgcagcaaaaccgatccggtcgatgcccgcgtgctctgcgagtatggcgctcgcatgccttgggttgcttggcaaccgcccagctctgtcgccctacacttgcgggctgtgacgcgtgccattgccgacttgggggcgatccatactcagcagaacaatcgtgcgcatgcctcggccgcgagccaagccttgccggtcttggtggtcaaggagatgcaacgccatcagaaatatcttgagcagcgcatgacacggttgcggcgggaagctctccggctcatcgccggcgattccgaactggatcgtcgcttccgtctaatgctgaccacgactggcatcgctgagaccagtgctctgcagatcctgggcgaattagccgtactgcccgacatgctggacgcgcgccagtgggtggccttcagcggactggatccgcggcttttcaagtcagggaaatcggtcgagaagcggcctaggatcagccggggtggtagtcgtcacttgcgtcgtgctctctacatgccagcgctggtcgctctgcgtcgtgatccttatctgcgacgcttctatcaaaacttactagctcgcggcaaagctcgactgcaagccgtcgtagcggttatgcgaaagctgctgcatgctctgtttgccatgttccggaccgatcaaccgtacgacggatcgaagctgtgttgcgccgtcgacatggctggcaatgccattgctgcttgtgcttgactgacccaaaaagagagaggttctcctgcacctctccagagagaaaacaaattgaatttcaagagagaat

SEQ ID NO: 637 - DNA, 1402 bp, unidentified
  source 1..1402: mol_type = unassigned DNA; note = element_07f27bd
  misc_feature 1: note = core
  misc_feature 2..75: note = LE
  misc_feature 76..1131: note = CDS
  misc_feature 1132..1402: note = RE
  misc_feature 1168..1392: note = bridgeRNA
taatggcatggaccggccgtgctcccggatggagcataggaggacgggacggtcccgcagcgaaggagctatgccatgacccagcagacccaacccgagagtatcaccaccatcggcatcgacctgggtaagaacaccttccacctgatcggcatggatgcccgcggaaggatcgtgctgcgccgcaaggtctcgcgcgggcagctgctgccctgcctggccaacctgccggtctgtctgattgggatggaggcctgtgccggggctcatcacgtcgggcgccaactcgcgaccctcggccatgacgtgcgcctgctgccggcccagtatgtcaaacccttcctcaagggacacaagaacgactatcgcgatgccgaggccatcgccgaagcagcccagcggccgaccatgcgtcccgtgccgctgaagtcggccgagcaactcgacttgcaagccctgcaccgggtgcgaagccgactggtcgggcagcgcacagcggtgatcaaccagatccgcggcttcctccttgaatgcggcatcccggtgcgtcaggggccagcgggcttgcgggaggcgcttccgacgctcctcgctcagcgcacggacgtgctctcgccgcgcatgatccacctgatcgaggatctcgccggggattggcgccaccttgatgaacgcattgagacgctcacccaagacatcacggctttggcccggcaggatgcgggctgccggcggctgatggggatcccgggcgtcggcgtgatcaccgccagcgccatggtagcagcggtgggaacaggagccgcgttcgccaaaggccgcgacttcgccgcctggctcggtctggtgcccaagcagatctcgaccggggatcgaacgatcctgggcggcttgtccaagcgcgggaaccgctacttacgcacgttgttcgtgagtggagcgcgagttctcctgcagcgaccgggccactgggatgggcatggcttcggccgctggttggccgcggcacgggcccggctgcaccggaatgtgctggccgccgccttggcgaacaagctcgcccgccttgcctggggcgtgctgaaccacgaacatggctatgatccggagtacacgatccgcggagcctgagccgcctgcagcactcagtcgttcaataatcgggtttccccccgaggttcgcgagaaggatgtgacaggatggacgaacggttgcccggcgcaccgtaagcctggtttaaaaaatggcccggtgaggccttgaaagtaagcaggctcagtgcacgcggattcccatgatggcccggagctcaagctccagatcgaggccggatagattgatgcgaaccgtctctcccccatcggccacagccctcttgcaacgcacggccggtccatagat

SEQ ID NO: 638 - DNA, 1365 bp, unidentified
  source 1..1365: mol_type = unassigned DNA; note = element_07f6110
  misc_feature 1: note = core
  misc_feature 2..291: note = LE
  misc_feature 292..1359: note = CDS
  misc_feature 1360..1365: note = RE
  misc_feature 9..286: note = bridgeRNA
ctgtaagtctttgggtggctggcctggggttggctggcagggttggtgctggtgctccgcttgatcgtgactcgtgaatcgtctggccttctgctctcgggcagtgtgcctttcctgggatctgtccggccgggcgggtgccggcgccgaccctgtccactccgatggcttgattagaatcttgcccgaccgttagcggtggtcgtggcccattacaggcctgcctcgaagtgactttcccgggtcgacgccagcagtgacgtcaacccagtggagaggatcacggtcaccatgaccatcgttgcaaacacgttcgcgtatgtcatcggcgcggatacgcattccaaaacacacacgctcgccgtgctcgacgcgcgcaccggcgcgaggatcgacacatcgacgttcccgacgacaccggcggggctctcacgcgcggtcgcgtggatcggccgccgcacgagcgggcaggccgacgtgctcgtcgcgatcgaaggtgtcgggtcgtatggtgcacggctcgcgcggtcctgccagaacaccggctaccgagtcgtcgagtcgttcccgacaccggcccgtgagcgacgcggccgcggcaagagcgacgagatcgacgcggaactgatcgcccgctccgtcctcggtgttgacgcggacaagctccgcgatccacgtcaggacgcgggagtccgcgcagcgttgcgggtgctgatcggtgcccgtgacctgctcaacatcgaacgcactcggtcgatcaacgcactgaccgcgctgttgcggacggttgatctcggtatcgacgcacgcaccccgatctcgaagaagcagaccgggctgatcgggtcctggcgcacccgacaggaagacgtcgcaaccgcaacggcacgccgcgaagcgatccgtctggccaagcgagtcgcagcctgcgatgaggagctcgccgtcaatcgggacgagatcaccgcgctggtcgctgccagcgacgatgccgctctgcttgacgaacccggcatcggcgcgattaacgcggccgtgattatcgccgcctggtcgcaccccgggcgagtccgttccgaagcggcgttcgccgctctcgccggagtgagccccgttccagcttccagcgggagcacgacccggcaccggctcaaccgcgggggcgacagacgcctgaaccgggcgctgtcctcgatcgcgctcactcgcatgtctcaccacccgcccacccgcgcgtacctcgaacggcgacgcgccgaaggccgcaccacgaaggagatccgccattctctcaagcgctacatcgcccgccagctctaccgccgcctcacccacgagaacggacttgacaggacatagaagcat

SEQ ID NO: 639 - DNA, 1379 bp, unidentified
  source 1..1379: mol_type = unassigned DNA; note = element_07f8cfc
  misc_feature 1..2: note = core
  misc_feature 3..86: note = LE
  misc_feature 87..1118: note = CDS
  misc_feature 1119..1379: note = RE
  misc_feature 1149..1367: note = bridgeRNA
tgatgctgtggacggctcctccaccggcacatgagtgccactgatgtgggtgctgttaaggctcccacgattcggaggagccaatcatgcaaacggtcacaacgatcggtctcgacattgcaaagtcggtgtttcaggtccacggcgtcgacgcggaaggcaacgtgctcattcgccgtcagctgaagcgccgctacgtcctagcgttcttcgagaagctgccgccgtgcctggttgggatcgaggcctgcgccacgtcgcatcattggtcgcgcgagctcaaggcacgcggacataacgtgcgcttgatgccgccggcctatgtgaagccttacgtcaagcgacagaagaatgatgccgctgatgctgaagccatctgtgaagcggtgaccagggccaatatgcggtttgtcgagaccaagacgcccgagcagcaaagctgcctgatgctccaccgcacgcgccagctgttcatccgccagcagacctcggtgatcaatgccatccgcgcccacatggcagagttcggcatcgtagccccggtgggacggaagggtgttgaacaactgcttgatgtcgtcgcggatgctcgtgacagacgggtgcccgaggtcgcacgcgcctgtatcgctgcccttggcgcgcagctgcggctgctaaaggcgcagatcctggagttcgaccgccggatcctggcttggcaccgatccaatgagacgagcaggcggctcgatgagcttcccggcgtcggacctgccttggccacggctttggtcgccagcgtcgccgatgcgaaggccttccgatcggggcggaacttctcagcctggatcgggctcgtgccgaagcaacactcgagcgggggcaaggacaaactcggcagtatcagcaagcaaggcgatcgctatctacgcagcctgttcaccgctggcgcactcgccgtgatccgttatgccaagatccatgacactcagcatcggccctggctcacggcattgctggcgcggaggccgaccaaggtcgccgccatcgcgctcgccaacaagattgccagaatggcttgggccatgatggcaaggggcgagcgctacagggaacccgtcgcacttgcggcgtgaacgagatcgcgccggtcacccggcgtgatgtgaaggttgggagggcgaacagcacgtaatgcagagccggtcgatctggcgatcaggacaacccaaatgtgccactgcatcgtcgaatgcgggcttttgaccgggacctgatccgcggagggcattatggccagcggtcatgcgaaccgcgctaacaggccgaacacatggctgcaccgaccagcgacgcgacgtgaagttttgacttgccaacctggagccgtccacaca

SEQ ID NO: 640 - DNA, 1739 bp, unidentified
  source 1..1739: mol_type = unassigned DNA; note = element_07fcbfc
  misc_feature 1..2: note = core
  misc_feature 3..323: note = LE
  misc_feature 324..1571: note = CDS
  misc_feature 1572..1739: note = RE
ctcatatactaattggtgtcgagtagaggacttgttgagagaccaggaatctgcgagactgggaacagcagcgggagggccacggtaaccactcgtagcctgtctcgtacgcgagatggtgacttccaggaaaagacggcttcccgcctgccagagtgacaaacgtcgattcggcttgtggtacgcgttgcgttctcggtaagaactcgatgacttccgatccaagatgagttcatgattgctctgcgtaggagggtgtcccgctgaaagagaggaaaacaaagcgcatagggaagtgatggtgagaagaaagtaggtgtgtgatggcagaagtatcgctttctgtgctccttgacccgtcgtcgtttgcgtacgtcgtgggcattgatatcggcagcgaggactgctgctttaccgttctgactccccagaagcaggtggtgatcaaaccgaccaagctagccaatgccgcctccggctttgcgctgctccaagaacggatggcccgtttaggagtggaccccggtcagatcgtggtgggcctggaagcgacctcgcgctacggggagaatctctttcactttctccagcagcaaggctatcatctgtgtttgttgcatcccagacaaacgcatgagtttgccaagcaacgaggactgcgggcgaagaccgaccggttggatgccactacgattgcacgggtgttactcagtggtgaggctcgcgcgggctatgtccccaatgagcagattgccagctatcgcgagttggtgcgcctgcatacccaactcagcgatgaactcgcgtgggacaaaaatgagatccaggccctgctggtcgtgctgtttcccgaattcagccaggtctttgccgacccgtgtcggctcaccgcgaccactgtgctccaggcgtatccaagtgccaaggccattcgcgaagcgggggtagatgccatcgcggcggtcttgcggacgtcggctcctcgcaactacggccagcagaccgccagacggctggtgcagttagctgagcattcggtcagcagtgatctggcgctcgaagcccgctcactcagcttgaaaatctggtgtgaacagctgcaacacaccctggcccacttggcgcaaattgaagaggagatggggaaacggctctcccgcgatccaggagccaaagggttacaggaggttcccgaatttggcaccaagacggtggcggtcctgcgcgccgaactgggagacgtggctcgtttccagcgtctggatcaggtggtggcctatgcaggcatggatatcgaaatcaaacagagtggcaaatggcaaggtcaggccaagctctccaaacgcggcagcgggttagtccgacgcatgctctacatggctgccatgcgctgtacctgtctccctggttcggcttttggagcctactatcatcgtctcctcgcacgaggcttaggcaaaaaaacggcgctgatggcggtgatgcgcaagatgctcgtgattgctgcctatttactcaggaccggggaggactatgatcccaccaaagtcgcggcggggccagcgggctaaacccaacaggtcaagcagttgggtttagcccgctggcctcgccccccagataggccgttctcaggcgcttcaggcttgtcctcaagtgcaagggagagcgttgttttaccctttcccggatgggtttcttcggcttggcccacaagggcttgacaatttctatggctt

SEQ ID NO: 641 - DNA, 1614 bp, unidentified
  source 1..1614: mol_type = unassigned DNA; note = element_07fde3d
  misc_feature 1: note = core
  misc_feature 2..170: note = LE
  misc_feature 171..1490: note = CDS
  misc_feature 1491..1614: note = RE
cctcctaatatataagtgtagggtttcagtacccaacagccagttgggacttaatcctctcattgtttaagctgtataatgattaggcatcggtctgacgccaactcccaggaccattagcgtccgtaagaaagcctgtcagccagcctgtcattgcagccgttcgatttatgcaggttgaactactactgtatgttcgtttgataccccagcagatggaaccggcaatgagaaacgctggaatccatgcaaatacacatttggaggtccatagaatgtacaatgcagtaggtattgatatttcaaagggtaggagcaccgtttcagttctgcagcctggcggtactgtaatccgtaaacccttccatgtttcccacacatcccagagccttcatgaactcactgagtatctgggttcattagatggcagtaccaaaatcgttatggaatgtacaggcagataccatgaacctgtggtaaaggctctctcggaagctggattgtttggttccgttgtcaatccgcatctaattaaaaactttggcaacaactccctgcgcaaagtcaaatccgatccggcggatgctaaaaaaattgcccgctatactcttgacaactggacagagctgcgtcaatattcaggtatggataacacacgcactcaattaaaaactttaaatgctcaattcagcttctttatgaagcaaaaggtcgctgcaaaagcaaacctgatcgctcttttggacaacacatatcccggtgtaaacaaactctttgacagccctgtccgccaggatggaagtgaaaaatgggtggattacgcgtattctttctggcatgtggactgtgtccgcaagatcggggtaaaagcctttacagaacgttacagggctttctgtaagaagcaccactatatcttccagcccgacaagcctgaaaagctgttccatgcctccagggaactggttgctgtctttccaaaggagaagacctacaagctgttgatccagcaaagcatccagcagttaaatcttacttccgcgcatgtggaacggctccgccaggaaatggatgagctggcctctacgcttcccgagtacagtaccgtaatggatatctatggtgtcgggaaaacctatggtccgcaacttatcgccgagattggggatgtgtccagatttacccacagggaagcgctgaccgcctttgccggtgttgaccctggtgtggatgaatccggccaacacaagtccaaaagcaacaaggcctccaaagtcggatccgcaaggctgcgtaagacattgttccagatcatgacgactctgctccaaaatgcgccggaacacgatccagtgtaccgttttcttgacaaaaagcggtctcagggaaagccctactatgtctacatgacagccggagcgaataagttcctgcggatctactatggcaaggtcaaagagtgcctgcggaacttagaacaggcagaatagccattattttctaaatcacccctttcaaagccggcagttctggcggcttaaaagttatgccttaaaatatcaaatggattttttcaaattttcttcaaatatcacttgactttttattagcagg

SEQ ID NO: 642 - DNA, 1161 bp, unidentified
  source 1..1161: mol_type = unassigned DNA; note = element_07ff35b
  misc_feature 1..2: note = core
  misc_feature 3..189: note = LE
  misc_feature 190..1149: note = CDS
  misc_feature 1150..1161: note = RE
  misc_feature 25..199: note = bridgeRNA
cttctgtatctcggatctggtagcgtggtcccgtcacgtgtcccggccaggacccgtgacggggtggtgcgcgacgtctgaccctcgtggcatgaccacgcttcctagcctgtcggcaccacctctccttcattatctcgaacagttgccagcggcccgcttgggaccgcgtatcagaaggaggagagcatggagaaggtaacacacggtcggatcatgggaatagatgtgagccgagattggctagacattcattgtctcccggacggtcagcgccatcgtatccccaataccgatgatggccatgtcgcggtgtccgatctcgctcacgaccagagagccgtcgtctgtttcgaagcgacgggcgggcaggaatggcggctctggttccatctggaggatgcaggcgtcgaaacccgtcaagtgccgccagcccaagtcaaggccttcgcgcgcagccttggaacccgcgccaagaccgacaggatcgatgccgaacttatagcgcgcttcctggtcttcagacctgaggcgggacgaacacttcccgcggaacatctacgtcttctcagggccttgaccaccaggcgggcacaggcggtcgaaatgcgaaagcggctcttggcgcagattcgggcgcatcagaaatcgggaactgcagagctgttcgaggatatcgatgtggagctgaaagagcggttggatgtcgcgatcgccgagctggaaagccgaatttcagagcttctcggtcgcgacaggcatcttgcggacaccgcccggatccttcgttccgttcccggaattgggccggtcgccagttcgacgctgatcgccgaacttcccgaactcggcgcgatcactggcgaacaagctgcagcgctgaccggtctggcgcctgtggcgcaggacagcggaacgctgcgcggcaggcgcgcgatcgccggtggcaggcgtgccctgaggcatgttctattccaggcggcactggttgcctcacatcacaaccctatgctcaaagtcttcgcggatcggctccgaaaagccggcaagccgcacaaggtcatcgtcacggccgtcgcccgcaagctcgtcatcatcgccaatgctctctgtaaaaaacggcggaaatgggagccccgccatccctgaaggatacagttg

SEQ ID NO: 643 - DNA, 1409 bp, unidentified
  source 1..1409: mol_type = unassigned DNA; note = element_0800b9c
  misc_feature 1: note = core
  misc_feature 2..79: note = LE
  misc_feature 80..1105: note = CDS
  misc_feature 1106..1409: note = RE
  misc_feature 1183..1400: note = bridgeRNA
taatgagatggtccgccgcttgcacttcaccacgatcgggaggatcgtgggaggcaggttgggataggaggatcacattatgaagattcactcgattggcatcgacctcggcaagactacctttcaccttgtggcgctgggagcagcaggcaaggtgctcgtgatgaagaagtttactcagaagcagctgttggtttacacggcgaacctgcagacctcactgattggcttggaagcctgttccggagcgcatttccttggccgggcgctgcggaagcaaggccacgatgttcgattgattgcggcgcagttcgtgaagcctttcgtgaagacgaacaagaacgacttcattgatgccgaagccattgctgaggccgtcgaacgcaggaacatgcgctttgtcccgattaagacggacgatcagttggatctccaggcgatccaccgagtgcgcgaccgattgatctccaggcgtacagctgtcattaaccagattcgtgcctttctattggagcgagggctggtcttcgcccagacgccggcgaagctcaaggctgccatggcagaggttctggagaacgccgatgccgacctgacaccgatgatgcgcaacctgatcgatgcgctatggagtgagtggaagcaggtcgagcagcagattgaggggctgacagacaagcttgaagagatctcggccggtgatgccggctgcagccgcatccgcaaaatcccaggtatagggccggtggtcgccactgccatcgtcgcagccattggcaacggagctgccttcagcaagggacgggagtttgcagcatggctcggtgtcgttccacggcagtactcgactggcggcaagcccaggctgctgagtatcagtaagcgtggcaacgtctacctgcgcaaagttctgattcatggcgcgcgagcggctgtcggacgcatgaagcgggacggacttgccgttggcgcgtggctcgatcgactggacgcgagggcccataagaacgttgtcgtagttgccatggctaacaagctcgcacggacagcctgggcggtcctctcaagcggtgacgactaccggccaaaagccatatcagcataggcagtgcggaaagacgccttcggcgtggaagcgctgcgcgctcccactttctcgaagtgcgacgatgaaaaaagctctcccacgaagtctgcacagggtagcaaggacgaaagaacagtcacaacggcgtgtccgcagcctgctgacgagaatggcttccaacggccgtcgcgcttataaggacagacacgcgcgcatctcatcctggccaggagaactactctccgactaaaggccgaatacatttgcgcagacttgtcttctcgaccaaactaacccttgcagtcgcgcggcggaccataca

SEQ ID NO: 644 - DNA, 1625 bp, unidentified
  source 1..1625: mol_type = unassigned DNA; note = element_0805652
  misc_feature 1..2: note = core
  misc_feature 3..283: note = LE
  misc_feature 284..1504: note = CDS
  misc_feature 1505..1625: note = RE
  misc_feature 14..309: note = bridgeRNA
ctactacaatatatttatggttaataccccttacaaccagtaaggaattatccatcttgttgcttaagctgttagaatgataagagcaatcggtatagcggatacctccttgggccttgcgcccgtaaataagtctgctaaccagctcttcattcgcagcgttcgttttatgcaggttgagccacttttcgagtgcgttcgtgtcacaccacagtagattgaatgggcaatgagtaaaactggtactgaccaattgcaatcttaaataaggagtgacatttttatgaacatgaacgcagtaggtattgatgtctccaagcggaaaagcactgtagcgattctccgccccggtggaaaggttgttgtaaaaccctttgatgtcccgcacttgtccactgattttcaatctcttaagaagctgatcagggaactgaatggtgaaacccgcattgtcatggagtgcaccggacgctactatgaacccgtagtgcgggaactgtctcaggctggcttttttgtaagcgctgtgaaccctcagatcatccgtaactttcagggacagaataatcccctccgtaaagtcaagactgacaagacggattccataaagattgcacgttacactcttgacagttgggcaaatctgaaacaatatagccttatggataaattacgttcccagctcaaaaccatgaaccgccagtttgatttttacatgaaacataaaactgccatgaagaataacctgatcagtctcatagaccagacttttcctggtgccaacacctatttcgacagccctgcccgcgaagatggcagtcagaaatgggtggatttcattgacacttactggcatgtggattgtgttcgcaagatgtctctgactgcttttacagaccgctatcagaagtggtgcagccgcagaaagtacaacttcagcaggtcaaaggctgaagaaatctatgagaaagcaaaggagctcattcccgtacttccaaaggacagctttacgaaacgcattatcaaacaggcaatcgatcaattaaacgctgcatcacagacggttgaacagcttcgcacccttatgaacgagaccgcctccaaactgccggaatatccgattgtcatggcgatgaaaggcgtaggaccgtctctgggtcctcagcttatggctgagatcggagatgtcacacgtttcacccacaaaggtgcaatcacagcattcgccggcgtggatcctggtgtcaacgattccggagattattcacagaaaagcgtacatgtttccaaacatggttcgccagtgctgagaaaaaccctgttccagatcatggaggtactaatcaaaaccaaaccggacgatgccgtgtatcgattcatggataaaaaacgatccgaaggcaaaccgtattatgtctatatgactgccggagccaataagtttttacgtgtttactacggaagagtgaaagaatatctcgctgctcttcctacatcagactaactatccaagtacctgttcttgaggtcggcataaactggcggccttattgtgttacccatttttcaacctgtataaaattttcaaagtactttaaaatttagcttgactttttatttgcagg

SEQ ID NO: 645 - DNA, 1495 bp, unidentified
  source 1..1495: mol_type = unassigned DNA; note = element_0809f65
  misc_feature 1..2: note = core
  misc_feature 3..248: note = LE
  misc_feature 249..1475: note = CDS
  misc_feature 1476..1495: note = RE
  misc_feature 13..244: note = bridgeRNA
ctaatgagttctgggagtgagccatccggcaaactcctggtgggtaggtagccgccggcggatgagcactcggttcccctggacgttgagtcctgatgaaagatcgtgccgctgccggtcggttgggagagttgatcgctgatggatgtcgtgcccgcccggttgcggcgtgagcactgcttcattaggtcgctgatggttctcccgctggctgctgaccgtgttcgctgtcgcagacgggagatgcgttgctgttcgtaggagacgactgggccgaggaccaccacgacgttgagctgatggacgccgccggccgccggctggcgaaggcccgcctgtccgaaggcgtcgcgggaatcgcccggctgcacgcgctgatcggtgcgcagctcggcgatgacgtcgaggacgccgctgggcaggtgaagatcgggattgagaccgatcggggtccgtgggtgcaggcgctggtcgccgccgggtacacggtgttcgcggtcaatccgttgcaggcagccagataccgcgagcgcctcgcggtgtcgggcgcgaagagcgacgcggccgacgcgcacatgctcgctgacatggtgcgcaccgattcgcatcagctgcggccggtcgcgggtgacagtgtcgaggtcgaggcggtcaaggtcgtcactcggatgcataagacgctgatctgggaacggacccgggccgggcagcggttgcggcacgcattgcgggagtattttccggctgcgctggaggccttcgaggacctcgacgccgtcgacaccctggagctgctggccaaggcgcccgacccggcgagcgcggcgcggttgagtaccgcgcagatcagcgttgctctcaaacgcgcccgccgccgtgacatcgcggtgaaggccgcgacgatccaggcggtgttgcgcgcgcagcacctcgggcagcccgcgttgatcaccgccgcctacgccgtgtcggtccgcgcgttggtcgccgtcctgggcaccctgggcgagcaggtcaagatcctgcaagggcaggtcgaggcccattttggccagcacccggccgctgagatcgtgctgtcccagcccggtctcggggcggtcctcggcgcccgggtgctcgcagagttcggcgacgaccacgaccggtacgtctcggcgaaggcccgcaagaactacgccgggaccagtccgatcacccgggcctcgggcaagaagaagaccgtcgcggcccggttcgtgcacaacgaccggctcatcgacgcgttgatgacccaagcgttcacgtcgctgcgtaactccccgggcgcccgcgcctactacgaccggcaacgcgcccgcggcgccagctacaacgccgcgctgcgccagctcgccaaccggctcgtcggcatcctgcacggctgcctcaaaaccggcacgccctacaacgaggcgaccgcctggtctcaccacctcagcaaggctcctgcttgacattcaagctcctgggatgt

SEQ ID NO: 646 - DNA, 1436 bp, unidentified
  source 1..1436: mol_type = unassigned DNA; note = element_080ba4b
  misc_feature 1..2: note = core
  misc_feature 3..235: note = LE
  misc_feature 236..1405: note = CDS
  misc_feature 1406..1436: note = RE
  misc_feature 22..200: note = bridgeRNA
cttgtatgttgtccactcatcggcggactccgagaatggacaccgacggaaccgggagagggtcgccgcggcagcgcttgaagcacaggcttcggcaatgagattggcgccctcgaccggtgctgaaggtccgaacggtatcccgaggccggctgcgccgcgtcctcgcatgcacaagcgtggacagcagcaccggctccgaggctcccgatttcctccgtcgccaggaggtcgcatgcgcttcgccggaattgacatcgcctcggagaaacatgtggtggccatcgtaaacgccgacggtgctgtcgaattgaaggccactgtatttaccgaggacgccgcgggttacgagaaagtgctggcgcttcttggtaccccgaatgaagtgctgatcgccatggaggcaaccggacacttttggaagaatctgttcgcagtgctggctgcagccggacatgccattgcattggtcaatccgctgcgcacccatcgcttcgccggcgtcgacctcgagagaaccaagactgatgcaatcgatgccatgggcatcgcccgcttcgctgctgaaaaacggcccgccgtcaccgcactgcccgatgcactcgccgaggaactgcgcgagctcgtgcatttgcgtgaccgactgctgcaggatttcggcgaccgcgtgcggcaattgcaccgcttggtcgatctcggctttcccgaattcacccgctacgtgcgcaccctggacagcgagctcgccgtcgccatcctgcgcgactatccgaccgcagcagccttccgtggcgtgtcggtacggcgtctggccgccttgcgctacgacggccgccaccaagtcggccttgacctcgccagaaccctcatcgaggccgcacgccgctccgtcggccaacatcacagcgcgacctaccgactgcagatccgttacgcctgcgatgacctcaatgtactgcgtcaccgtctgcgcgatatcgaccgcgacatcgggggcaaactgcgtgagcacgagatcggccgcctgctcaccacgatcgacggcatcggcaccaacaccgccgcctgcgtgatcgctgaagtcggcgaccccgcccacttccgtagcggtagcgcgctcgccgcctacgtcggcgccatccccgccctcaaacaatccggcaagcgtcaatttgcccgcggcgcgatgacacccattggcaacgcccgtttgcgcgccgccctgtggatgccaacccttagcgccgttcgcaataacccgtggctgcgcgcctattaccagcgccttcgcgctcgcggcaagctgccaaaggtcgccttggttgcctgcatgcgcaagctcctgctcgccatctacagcgtggccaagcatcggcgcccattcaccgtggaagtctcgccatgacccacaaaccacttgacggacgtcacggtat

SEQ ID NO: 647 - DNA, 1676 bp, unidentified
  source 1..1676: mol_type = unassigned DNA; note = element_0811741
  misc_feature 1..2: note = core
  misc_feature 3..327: note = LE
  misc_feature 328..1551: note = CDS
  misc_feature 1552..1676: note = RE
  misc_feature 12..347: note = bridgeRNA
ctcctacaatatagttacggtgaaaggcacggcagccagccgtgtcttttgtcgactcaaagctgaagctgtagaatgagggagtaaatggcctgacaccgctgaccttgggccaacacgcccgatcaagagtccgtcagccgcctctctcattcgcagcgttcgatttgcgcaggtagagccatctcgtcggggtaaacttcacccgttttgccgggtggggtttggcgagactccagatgtggtgcgctcgggtcagtcaggagattgaataagcggcgaggaacagaggcggaggccattggtcaatcacacaggagggaaaccatgaacgcagtaggaattgacgtatccaaggggaaaagcatgatgatggctctgcagccaatgaatcaagttgtgttgaagccaagggaatatccccataccgaggttggtctggagcagatggcccatgacatcttaaggctgggagaagacacgcgggtgatcatggaggccacaggccgttaccatgagccggtagtggcagtcctgcacgagcatggcatccgtgtcacggtgatgaatccgctgttcattaagcagagcggcggtggttctatccgaaaggtcaagactgacaaagcggacgccagaaagattgccaaatacgggcttgataattggacggatctgcgggaatatacacccatggaagcaatcagagagcagttgaagctgatctcacggcagtacgatttgtacatgaagaacgtggtggcactgcaaaataacctcatctctctcacggacaaggtttttccgggggtaaacgagatgttttccagcccggaccgtgccgatggtagccaaaagtgggtggatttcatcatgaccttctggcactgtgaatgcattgccctgatcagcgaggccgcttttacagagcgttaccgcaagtggtgcaagcggaagggttatcatttcagcggctccaaagcggcggatctgtacatcgacagcatcgggcatattacgaccctgcccaagaacagcaacaccaagctgattattatcaccgcagccaaagaactgacctcagccaaggctgcgctggctgtcctgcgcgctgagatggaccgcctggcccggcagctgccggagtacaaaaccgttcgggctatgtacggcgtgggtgagaggactgctcctcagctgatggctgagattggcgacgtgcgccgcttcccccgccgcagctccattgtgagcttcgccggcgtcgatccggcagtggacgagtccggcaaacacatttccaagagcaatccgaccaccaagcggggttcgccccacctgcgcaagacgctctatcaaatcgtctgcacctatctgctcaaggcccccgctgatgagccggtctaccagttcctggacaagaagcgggccgaaggcaagccgtatttcgtctatatgaccgccgcccagaacaagttcctgcgtatctactatgcccgcgtgaaagagtgtctccttgcggctgacgcccgggaatattctgagagttaacccgtgctaaaatccacagctcgtgtggcctgcgaaaaattccgcttttgcaggcttggtttgttatacccttttttaccccctcaaaattttctcattttagggcttgacatttatttgcagga

SEQ ID NO: 648 - DNA, 1401 bp, unidentified
  source 1..1401: mol_type = unassigned DNA; note = element_0817244
  misc_feature 1: note = core
  misc_feature 2..83: note = LE
  misc_feature 84..1103: note = CDS
  misc_feature 1104..1401: note = RE
  misc_feature 1162..1396: note = bridgeRNA
caatgaaatggactcctccctcctacggcgtcagtgcgccagactggaggtgttagcaaccggtcccagagggaggagtcgagatgaaacttaaacgaattggcgttgatctggcaaagcaggtttttcaggttcacggcgtagacagccatgagcaagtggtttgccgcaagcaaatcaagcgttccgggctgcttgatttcttcaggcaactggagtcttgcctggtggtgatggaggcctgtggaggtagtcattactgggcgcggcagttccaggcgctggggcatgaggtgcgtttgatcgccccgcagttcgtcaagccctacgtcaagggtggcaagaacgacgccaacgatgccgaggcgatttgcgaggccggtagccgtccgacgatgcgttatgtgccgatcaagagcgaggagcagcaggctgccctgtccgtgcaccggatcagaagccgggcgatcagggcgagaacggcgctggtcaacgaggtccggggtttgctgggcgagttcgggctgattgaggtccgcaagggcgtggcggctacccgcgcattgctggctcgggtgctggacgaaaacagcggcctgccggtcgccatgcgcgagcttatgggtgaactgcaggatgagctccaggaaaaagataatcgcatcgcccttctggatcgcctgattcaacagcaggcacgtcaggatgagcgggtgcaacgcctgatgcagatcgagggccttggcccgatcagcgccacggccatggtggcggcggtaggcgatgcacgccagttcaagtcgggccggcagctggcggcctggctgggactggtgcccaaccagcactccagcggtggcaaggagcgtctgggcagcatcagcaagcgaggcgatacgtacttgcgcaccttgctgatccatggagcccgggctgccctcaacgcgagtgcgaaaaagaccgacccacgcagtgtctggatcaatgaggtgaaatgtcggcgcaacacgaacatcgccacagtggccctggcgaacaagaatgcccggatcatctgggcgctcctgagcaagggcgagagctataaaaacgctgcgtgctgaacgcagtaaccgagcaacaggcaacaccgcagcaagcgcaacaccgtagaagatccaccacgattgcacagtgacagacagtgatgacgaaccggtcgaaccggcatgtgtgaacgcttagagccccggaggccccctgtatgacaaggccgctaatccgatcagctacacatgagcgactacttcatcaaggctcgaagtgacaaaaccacttcagtagaagccggatatacggtagcagtcgtaccttggttcaaaagcactgttttttactggcaaaacgggaggagtccatata

SEQ ID NO: 649 - DNA, 1369 bp, unidentified
  source 1..1369: mol_type = unassigned DNA; note = element_0817348
  misc_feature 1..2: note = core
  misc_feature 3..84: note = LE
  misc_feature 85..1101: note = CDS
  misc_feature 1102..1369: note = RE
  misc_feature 1113..1355: note = bridgeRNA
tgatggggtggacggccccagctgcggcatctgagtgccaagatgaggtcgttgatcgcgacaccccatctggaggagccgtccatggagcaagttagcacgattgggttggacctagcgaagagcgtcttccaggtccacggcattgatgcggcaggcaaggttctggtgcgcaagcagctgcgccgtgccgatgtcctacggttcttcggcgggttgtcgccgtgccttgtcggcatggaggcttgtgcctcggcccatcattgggggcgcgaactgacgaagctgggacatagggtccgactgatgccgccggcttacgtgaagccctatgtgaagcgcggcaagaccgatgctgccgatgccgaggcgatcgtggaagcggtgagccggccgacgatgcgctttgttgcggtcaagaccaccgaccaacaggccgtgctgatgctgcacaaggtgcgcgaccttctgatccgtcaacgaaccatgcttatcaatgcattgcgtggacacctggctgagttcggcatcgtcgcggctcgcgggcctggtggggtgactgcggcaatcgaggcgctccatgagagccaggacagtctgccggagttggccagggttgcgttgcatggcctcattgatcagctgcgtatcgttcgagacgagatcgccaagctcgagaagcgcatcgtggcatggcaccgcgccagtgaagccagtcgccgactggcgacgattccagggattggtccgatcacggcgagcgccatcgcggcggctgtgccggatgccacgcttttccgatcgggccggcaatttgcggcctggctcggattgacgccgcgtgcccacagcagcggcggaaaggagcgactggtcggcatcagcaagcagggtgacggttatatccggcgcctgcttgtcatcggcgccaccgcggttatccgtttcgcccgccaaggcgatgccagtaaggcttgggcggccaagctgctcgagcgcaaaccggcaagacttgtatcggtggcgctggccaacaaaaccgcgcgaatcgcctgggcggtgctcgcgcgtaaccagtcctacagggctccggccctgtaaccaaggtcccgctcggctggcggcactacgctggccaaggggggagcgcaagggtggtgagaggtgatggcaaaccggtcgagccggggatcgggcaaaccccaggggtgctggcgcttcatgcgcgctggagtgattgggacccgatccgcggacttcatcagggccagcggtcatgagcaccgcgtcaacaggccggacacatggctgcacccgaccgcagcggcatcaccgattttccccttgcaccaggggggccgtccacaca

SEQ ID NO: 650 - DNA, 1221 bp, unidentified
  source 1..1221: mol_type = unassigned DNA; note = element_0819ffe
  misc_feature 1: note = core
  misc_feature 2..134: note = LE
  misc_feature 135..941: note = CDS
  misc_feature 942..1221: note = RE
  misc_feature 978..1218: note = bridgeRNA
atggtatggacgcctcccacttcgaacgtgaagtaagaggtgagcttgggaagaagtggacctccgggccgacggcatcaaagtgtgcctgaggtggaaggtgttcagtcttcacaggcaacggagggtccgacatgaatcgtatcgtggttggagtggatatcgcaaagcgggtgtttcagttgcattgggtggagcccgagacgggcgagattgtggcgctgcagcttaagcgggagaagtttttggagcattttgcgaaccgttcgaactgtgtgatcggcatggaagcgtgcggcggctcgcagcactgggcacggtcgctgcagaagctcggtcacgaggtcaaattgctgtccgggcggatggttaagccctttgtgggcggtaacaagaacgatgcggcggatgcgcgcgggagctggacggcgatgcaacagcctgggatcaaggcggtggcggtcaagagcgaagagcagcaagcggtgttggcgctgcatcggatgcgtgagcagttggtgaagtttcgcaccgcgcagatcaacggtctgagggagcgcatagcagcgatccccggcgtggggctgctgagtgcgacggcggcggtggcgacgatgggcgatgcgaaagcctttaagtcgggccgcgagtttgcggcctggctcgggttggtgccacggcaaaccggtacgggcggacgagtgcgattacttggcatcagcaagcgcggcgataaatatcttcgcacgctgctgatccacggcgctcgcgcggtgctgacacacagtaaatcgccgcccgagtggttgagcgaattagtgaagcgtcggccgaagaatgtggccgtcgtcgcgatggcgaacaagatggcacgcacgatctgggcgctgacggcccatgaacgtgcgtatcaatctgggtacgtgagtcggcccgcctagggttgcacccacggttgattaaatcttaacaaaggaaggtacgctaaaaggttgcgcaaggactacaacgtgtgatggcaaacaggtcagaccgtgacccgccaagcctgaatagtcgtccgagcttcgagctctgaggagaaatgaggcgtgggtcagcagcggaatccatcggggcccgcgggctttggcctgcaaaacaggccggatataaacctgcagcctaatctgtcgctcatcacaccgaagaagaccttgcacatcgggaggcgtccatata

SEQ ID NO: 651 - DNA, 1585 bp, unidentified
  source 1..1585: mol_type = unassigned DNA; note = element_081cf84
  misc_feature 1..2: note = core
  misc_feature 3..80: note = LE
  misc_feature 81..1103: note = CDS
  misc_feature 1104..1585: note = RE
  misc_feature 1352..1579: note = bridgeRNA
tgatgggatggacgccccccggatctggtgagtgatcctacctgaaggggatcagccctctggaaacggagacccttcccatgcagcccacgatcatcggcctcgatctggccaagtcggtgtttcaggttcacgctgtcgacgagcacggcacggtcatcctcaccaagcgtctgcgccgcgatggggtgcggaccttctttgccaacttgccggcctgcatcgtcggtatggaagcctgcgccagtgcgcatttttgggcccgcgagatcagcaggctcggtcacacggtgcgcttgatgccgccccagtacgtgaagccgtacgtcaagcgccacaagaacgaccaagcggatgccgaggcgatctgcgaggccgtccagcggcccagcatgcgcttcgtgccgatcaagaccgaggagcagcagagcacgctggtcatccaccgggtgcgcgagacgctggtccgccagaagacgcagctgatcaacgctctgcgcggccatctggccgagttcggcatcgtcgctccgcaaggggcccagaaggtcacccagttgatcgcgcaactggctgaccctggagatgagcaggttcccgcggccgcgaaggcagtgctgcgggtgctggtcgatcagctccgggagaccgagcgccgggtgagcgatctggatggccaactggcggagcaggccaagcgggacgaaacctgccgccgcttgctgaccatccccggaatcggaccgatcgtcgcgaccgcgctggtcgccaccatcggcgatgcgaacgccttccgctcgggccgtcatttggcggcttggctcggcttggtgccgcggcagaactccagcggcggcaaggagcgcctggggggtatttccaaagccggcgacggctatctgcgccgcatgctggtgcacggggcccgggccctgctgcgctggtggcgcacctcgtcgccgtgggtggccaagctgctggagcgccgaccggtgaacgtcgcggtcgtggcactggccaacaagacggcgcgcatcgcctgggcggtgatgacgcgcggcgagacctaccggcgtcccgagccggtgccgacgggagcctgacgcgggtgaccggggtcccgaccaccgccagcgtagcgccgggctcgggcttggcaaggccaagccgctggcgcggcggcccgcggggccggccttgccaagcccggcgcgcggcgctcctgaggacagtaggccgggacggagaggtggtcccggcggccaaacaaagaggtggccggatgagacgatgatgatgaccacggcgcgggtcgccggatcggcgccctcagcgcgacacccagctccccttcggttgcgagggcgatggacgacgtgatggcagcataggtcggaccgggatcggccaaacccgcctgcaccaacgaaccgccgagttcgcgatgttgattgggtgtcgatccgcggatctcatcaaggccagcagctcgagggctgcacccgtaggccggatagatggcagcaaccgacttcgcacgccgtcacgttgaaaacgctcttgcagggcggggggcgtccataga

SEQ ID NO: 652 - DNA, 1355 bp, unidentified
  source 1..1355: mol_type = unassigned DNA; note = element_0833d73
  misc_feature 1..2: note = core
  misc_feature 3..70: note = LE
  misc_feature 71..1096: note = CDS
  misc_feature 1097..1355: note = RE
  misc_feature 1122..1351: note = bridgeRNA
ttaatgagatggtcacccccaccctacacgcgggtaacgcggtagggtgttttcattttggagggccatcatgcaaaccgtgacgctgataggaatcgacctaggcaagcatacgtttcaccttcatgggcaggatcggcaaggcaaagccgtgtttcgcaagagggtgagtcgcaagcaactggtcgagtttttcgcgacatttcatgcttgcacggtggtcatggaggcgtgtgccggagcccatcatatggcccggcaactggcaggctttgggcatcaagtcaggctcatctcgccgcaattcgtgcggcctttcgtcaaaagcaacaaaaacgacttcgtggatgccgaggcgatttgcgaggcggcatctcgtccggccatgcggtttgtgacaccaaagaccgaatcgcagcagacgctcggggcattgcatcgggtgcgcgaatcgctgattcgggatcggaccaagacgattaaccagctccatgggtttttgctcgaattcggcatcagcctgccgatcggtcaggcagtcatcaggcgtttgcctgcggtgttggccgagtattcgctgccgccacggcttatcgctgtgctcgagcgattacacgctcatcacaagtacctttgcgagcaaatctgtgaaatcgaaaaggagctgacgcgccaacttgccgaggacgatctggggcaacgtctgctgagcatccccggtgttggaccgatcaccgccagcgtgttggccactgagatgggcgatggcaagcaatacgcatgcagccgcgatttcgcggcagccacagggcttgtgccacgccagtacagcacgggcggccgtgcgactttgctgggtataagcaagcgtggagataagaacttgcggcgtttgttagtgcagtgcgcccgagcgtatatgcagcggcttgaacgccagacaggccgcctcgccgactgggtgcgcgcgatgctcacacgtaggcattcgaacgtggtggcctgtgcgctagcgaacaagctggcacgaaccgcatgggcgctggccacacacaacacgatattcgatgcggggccgagcgccatgccaacttgagcgcccactccccaactattttccgagaaacacccacctggttttgcgacgactgaaattggatgacgtgaacggcacaccggcctgacgaacaacctgataaaacaattggctcttgaagccgaggggttttttaggagtgtcaggcgcgactctcatcgtggcgcggggagaaactccccacatcgacgccggatagatttaggcaagccaaacactgcatcaaatcagtcttgcaaaaacgggggtgaccatagat

SEQ ID NO: 653 - DNA, 1337 bp, unidentified
  source 1..1337: mol_type = unassigned DNA; note = element_0835f97
  misc_feature 1..2: note = core
  misc_feature 3..83: note = LE
  misc_feature 84..1103: note = CDS
  misc_feature 1104..1337: note = RE
  misc_feature 1078..1323: note = bridgeRNA
gatgaggtggatggctcctgctccaccggcatcgaacgtgccaaagtgcagttgttatcgactgctaggaaaggagccacccaatgacagtaaagactgtgggccttgatttggccaaggacgtttttcaggtgcactgcgtttctgcgacgggacgcaagatcatcaacaagaagatcaaacgcgcaaagctgatctctttcttcgagacattgccgcgatgtgtggtcgggatggaggcttgcggctcgtcacaccattgggcgcgggaactcagcaggctcggccatgacgttcggttgatgcctgccgcctatgtcaaaccctatgtgaagcgcggcaagacggatgccgctgatgcggaagcgatctgcgaagcggttcgtcgaccaacgatgcgtttcgtcgagatcaaatcagaagaccagcaggctgtacttgccatccatcgtgcgcgagacttggtggtccgccagcgcacccaggtcgtgaacatgatccgcagcatactgcgggagttcggtcatattctaccaactggcatcgaggctgcgtcgaagtttgcccgggaacacggcaccgaagaacagttaggcatgccagagatcgcggacgggattctcggcgtgatgtgtcatcaactgaacgggctcaatgcgcgggtcgacgggctgaccaaactgatcgagcagcacgcttggctcgacgccgatgcaagacggttgatgcgcatgcctgggatcggcccgatcacagcctcagctgtcgtcgccaccatcggcgatgcaaaacagttcgagaccggccgcgatttggcggcctggctgggcctaacaccattgaacaagtccagtggcggtcgagagcgcctcgggcggatcacaaagaagggtgaccgttacatccgaaaactactgatcatcggaatgacgtcgcgcgcgctcatggccaagaacagcccagagaaagccgacacctggaccgcgaagttactcgaccagaaacccttcaggctggccacggtcgccatggccaacaaatctgcccggatcatctgggcaatcctgacaaagggagaagaataccggcagccgatcgcctgatcctgccaagagatgcaagacgattgatgtgatgatgcgaaacgaagtcaaccaagagtaaggacactccgacgaatgtcgcggcctccgaggtcgtttagccgataggaaccttgctcgcggaattcatcagggccagtggcaactgccacgcaaacaggccggacacacgactgtactgacagaccatcgcaatctcagaaatcgcttgcaatgcaggagccatccacacag

SEQ ID NO: 654 - DNA, 1543 bp, unidentified
  source 1..1543: mol_type = unassigned DNA; note = element_0839a2d
  misc_feature 1..3: note = core
  misc_feature 4..405: note = LE
  misc_feature 406..1434: note = CDS
  misc_feature 1435..1543: note = RE
  misc_feature 7..259: note = bridgeRNA
attcgtaatatataagtgagggttttaacagccttcacttttcttttatactgaaggtgattggctaacggaatttctaattgggataccacgcccggagataaatgtgttagccagccttcatgttcctgcattcgattcagcaagttgtgacagttgatctgctcccgtttcactaacgaatatgaatggaccttgaagcgttggaaccagtcaaatctttattaggaggtatcactatgattgctgttggaattgatgtttcaaaagcgaaaagcaccgttgctgttcttaactcagatggcagcatacgtgccaaaccatttactatgcatcataccctttcggatatggatgcaatggtaaaaatatttaaatgaccttgatgaatcttttactatcctcatggaatacacaggacattatcattatccagtattaaaaaagcttcaagaggaaggatttcctgtatgtctcgtaaatccatatcaaatgaaaaaatatggagatgttgaaatccataaggcaaaaactgacaaaaaggatgccttgagaatcgcaaaatacgctttggagaagtcatatatgcttactccctacacttccttagagcaaaaatatgaagacctgaaatttctttcccgtcagtacaatcaacgtatttcaatggtaagctatacaaaaacacagctgacaaatctccttgatgaaaccatgccagggatcacgtctctgttaaagctgaaaagccgcaaacccaatgagtgtgcattgttactttttattaagaaatacggttctttcgatcgggttaaggcaatgggcaaatcaagattcttgtcttcctatgccacacttatgaaaaagagccatgatagatatgctccacaaaaaagcttatctatctatgaattagcctgtgacagtataacaactcgtggagacaatgactacataattgccgctcaaaatcagttggttgatttattggccactgtacaaaacgctgctgatgaagaaatcgctcaaatgcaaaacattgcagaaacaatacccgaatacaggattttacgtgcaatgaacggcgttggggataggttaggtcccattattctggctgaaatcggagatatccgccgtttccacagtgcaaaggctctcaactcttatgctggaaacgatgcgcctccctatcagtcaggacaatttgaaagcaggaaccgccacatatccaagcgtggcagttctgctctcagaaaagcttgttttgaggtcatgcaggctctcaaactgacaaaacctcaagatgatcctgtttaccttttcatactcaaaaaggaacaggaaggaaaaccttacaacgttgcaaaaatggctggcgttaataagtttctccgaatttactatgctcgtgcgatggagctttataagtaaatcatcttaattttatacttcttttttcaaatctacaatacggtagatttattaaggttaccctttttcatctgaaaaattcaaaaaatggttgacaaacattagcaag

SEQ ID NO: 655 - DNA, 1358 bp, unidentified
  source 1..1358: mol_type = unassigned DNA; note = element_0843fd6
  misc_feature 1: note = core
  misc_feature 2..86: note = LE
  misc_feature 87..1115: note = CDS
  misc_feature 1116..1358: note = RE
  misc_feature 1106..1344: note = bridgeRNA
tgatggggtggacggcccctgctcaccggcgtcgcgatgcgccaaagtggtggttgtcgaaactcaccgcatagaggaggccgtccatggtcgaggttagcatgatcgggcttgatcttgcgaaaagcgtctttcaggtccatggcctggatgccgccggacaggtggtgcttcagcgacggttgcgccgtaccgacgtcatcaagttcttcaccaagctgagcgcatgcgtcatcgggatggaagcgtgcgcatcagcccactattgggcccgaacgcttagcgaactggggcatgaagtgcgcttgataccgcccgcccacgtcaaaccctacgtgaagcgcggccgcaagaacgatgccgtggatgccgccgccatcgccgaggcgatggcacgcccccacatgcggaccgtgccgatcaaaaccgaagaacagcaagcggccctgatgcttcaccgcgtccggcgcctgctgatgtcccagcgcaccaggctcagcaacgcgttgcggtcccatttcgctgaattcggcatcatcgaaccggcgggggatggcggattgagccaattgataacagccgcgctggatatgccgggtaccgccctgccccagcctgcgcgcgaggcgctggcattgctggccgcgcaatggcgcgaaaccagcgccaagatcgatgcgctggaccaggagatcctggcatggcatcgcggcaacgccgacagccgccgtgtcgcaaccatccccggcatgggcccgttgatcgcaagcgccatcgtcgccaccgtcggcgaccccgggcgcttcaagaccagcaggcaattcgccgcgtggctgggactggtcccgtcccagcactcgtccggcggcaaaacggtactcggtgccatcaccaagacaggtgatcgctacctgcgatccctcctggtggtcggtgccaccagcgtaatggcgcgccggggcaagaagcagggaacctggctcgccgccttactggcgcgtaaaaccccacgccaagtctccgtggccctcgccaacaaaatggcccgaaccgcctgggccatccttgtcaaaggcggaacttatgaggagaccgccagcgcaaccgtcacctgaaacagaggatcacaggacacaccattgccagggcgatgaaagcatgatggcgaccagtcaatccaacggacgatagcccttgagaagtcatggccccccgaggccgttctgctgataggaacgttccgcggatcacatcatggccagcggtcggtgaccgcccaaacaggccggacacatgactgcacccgacaggccgacatcattgccgattccccttgcaacgcaggggccgtccacaca

SEQ ID NO: 656 - DNA, 1210 bp, unidentified
  source 1..1210: mol_type = unassigned DNA; note = element_08498b6
  misc_feature 1..2: note = core
  misc_feature 3..223: note = LE
  misc_feature 224..1195: note = CDS
  misc_feature 1196..1210: note = RE
  misc_feature 37..190: note = bridgeRNA
cttgtatctagatcctcacgagagtttgcacagattctgatcggggcgccagctcgatgctgtctgggtgggaaacaccgtgcgttagccggagcggcgcgttcgatctctcgtcgcacagagcccgaacagttgcgggggccgacctcgtcgagcccgaattctgacaaggacgggcgcgggcgacattaccggggtacctgccttacgcaggagggtgtgcatgcttgttgggatcgatgtcgctaaggcggagctggtggttgcagcgcgaccgagtggcgagcggtggaccgtggcgaatgatgagcgcggggtgcgcacgctcgtcgatcgcttccggatcgaccggccagacctgattgtgctggaagccactggcggctacgagctgctctgcgtcggcgccctcgcgtcggcggggctcccggtcgtcgtggtgaacccgcgtcaggtgcgcgacttcgcgaaggcgacggggcaactggcgaagacggatcggatcgacgccgacgtgctcgcgctcttcgccgagcgcgtccgccctgaggtgcgcccgctgcctgatgcggccgcgcaagagctcgaggcgttgctcgcccgtcggcggcagctgctggagatgctgcaggccgagcggaatcgtctcggtcaggtctttggtcgaggcaagcagcccgtgaagaagagtctcaagggccacatcgcattcctcgagcgcgaactccggatcacggacagcgatctcggcgagatgatccgccagacccccgcctggcgcgaacgagacgatctactgcagagcgtgcccggcgtcggtccaatcctgtctcggacgctgctcgccgatttgcccgagctcggtcgcctctcgcggcgcgagattgcgaagctcgtcggcgtcgcgccgctgagtcgcgactcgggcacgatgcgcggccggcgcttcgtccagggcggtcgcgccacggtgcggggcgtgctctacatggcggcgctcgtcgcgacgaagcggaacgccgtcattcgcgagttctatcagcgattgctcagggctgggaagccgaagaagctcgccctcgtcgcgtgtatgcggaaactcttaacgatcctgaacacgatggtgcgaacggcggagccttggtcggtgacgtggtcggcgaccaacgccgatcgcctgcgcattcttgcttgacttcccagacagttg

SEQ ID NO: 657 - DNA, 1389 bp, unidentified
  source 1..1389: mol_type = unassigned DNA; note = element_0878cc2
  misc_feature 1..2: note = core
  misc_feature 3..83: note = LE
  misc_feature 84..1109: note = CDS
  misc_feature 1110..1389: note = RE
  misc_feature 1155..1376: note = bridgeRNA
tgatgtggtggacggcgcccgctcccggcgacgaatcgccgtaaggtgatcgttgctacaaaccacatcagggagccgtccacatgcagattaccacaatcggtttggatatcgccaagaacgtattccaggttcacggcatcgacgcggccgaaaaagtcgtcgtcaggaagcagcttcggcgcggtcaaatgatgaagttcttcgaagctctgccgccctgcctcattggcatggaggcctgtgccaccgcgcactattgggcacgtgagttgaggaaagtcggtcaccaggttcgtttgatgccggcgaaggacgtgaaggcttacgtgaagcgtaacaagaacgatgcggccgacgccgaggcgatctgcgaggcggttcgccggccgacgatgcgatttgtggaggtcaagtcggccgagcagcagggccggctgatgcagcatcgcacgcgcgatcttctgctgcggcaacggacccaggtgatcaatgcgttgcgagcgcatctggccgagctcggtattgtggcagcgcaaggacgcgaggggctcaaggagttgctggcgatcattgcggacgaaagggatgcccgcctgcccattgatgcgcgtgcgagcctgatcgtactggcgacgcagcttcaggcgctgcaaacgatgattggatcaatcgagaaacggattatcgtgcaacatcgtgcgagcgaggagagcaaacgagttgcgaccgttcccgggatcggcactctgggcgcgagcgccatcaccgctacggtcacggatccgagcgcattccggtcggggcgtgattttgccgcctggatcggattggtgcctcgacaggattcaaccgggggcaaacagaagcttgggccgatctcgaaacagggcgaccgctacctgcggcgtattcttgtggtcggggcgcattctgtgctgcggcgcgccaagcaaaacccacagaaatatccttggctgacgcagctcctggcgcggcgaccgttcaaagtcgtggccatagcgcttgccaacaagatggcccgcattgcctgggcattgttggccagtggagagcgctaccgggcgccgtggcttgcggcagcgtaacaaggggcttgccgaagggaggatgaggttgcgtcggtgcgttcacgaactgcaagggtgatgatgacgttgatgcgaaacggtcgagaccgtcgatcggaaaacccgtttcgtgccacgcgaggaaagaacgcgtgcttgtgtttgggaccgatcagcggatcacatcagggccagcggccacaacggctgcattcaaaggccggatacatggctgcacccgaacgcttcgcggaaacgtcagattcttttcccttgcaccgcgggcgccgtccataca

SEQ ID NO: 658 - DNA, 1377 bp, unidentified
  source 1..1377: mol_type = unassigned DNA; note = element_0881c0b
  misc_feature 1..2: note = core
  misc_feature 3..238: note = LE
  misc_feature 239..1270: note = CDS
  misc_feature 1271..1377: note = RE
  misc_feature 7..218: note = bridgeRNA
ctcctatgtttgttatcaaataataaattagcatcatgaagtgaaaaggaatgagagcaggtgacgaccccaacaatcatacgatatgttcagagagagatactgcctcatttctttttaccctttagagtttgaacagaatgtaaggaatgttgcttagcaatatatccaggatatccaaccaggagaaaagacgaagaagggttattcacttttgatatattaatcaaattaagtgatgacaaagattttaaaacaggtagtgggtattgatgtagcgcaaaatgagttagtggtatcattaggcaggatggatcaatctcttgataaggatgtatatgcctacaagacatttgctaacaaggcatcctggtttggagctttattggtgtggctaaagaaacattcagatcatacggtaggtgttcgttatgtaatggaggctacgggtgtttatcatgaaaaactggcttattatctctccgatcagggttttgaggtgagtattgtattaccgaataagataagtagttacatgaagacactggagataaaaacggttaccgacaaaacagcatcacaggccatatgtcagtttggtttagaaagaagtcttgaactatggcaaccccctaaaaagctaatcagagatttaaaacagctgacccgtgaacgtgaccagatagtggctgaccgcacaatagctaagaaccaactgcatgcagaacaggcagaagcttttcccaatgacaggagcatatatcgggcaaatcaaagagttaaactactcgttgaacaggaaagagagattaaaaaagagatagctgaatttgtaagaaccgaccgggaattgcataaaaagatagatcttgttaccaccataccaggggttggcagtttaacagcggtaatagcaatagcagagactaatggctttgagctgatcaggagcaagaagcaattggtaagcttcgcaggattggatgtagtgggaaaagattcaggcacatcagtcaaaggaaaacccaggatctcgaaaaaagggaaccgtcacctaagaagagccatgcatatgccagcgttaacagcaatcaggaatgatgaacgcttcaaagctatatttgtcagactagtatccaaacatggtatcaaaatgaaggcagcggtagctgtacaaagaaagctgctggaaatgatctatacgatctggatgacagaaaagccatatgacaaacaatatttacaaaaagcaaatacagctgtagcttaaaaagagttagggcgaatataacagaaagtcatatcgccctaaacaggctgacataaagccgccttaagaaaacaaaagtaaaaaacatttgataattaacacagaat

SEQ ID NO: 659 - DNA, 1170 bp, unidentified
  source 1..1170: mol_type = unassigned DNA; note = element_08855f8
  misc_feature 1..2: note = core
  misc_feature 3..209: note = LE
  misc_feature 210..1157: note = CDS
  misc_feature 1158..1170: note = RE
  misc_feature 19..215: note = bridgeRNA
cttgtaatagcgcaatcggttatcgtcggcctgttccgaaaggaatggcctgccgtggacggccatccacggcaggccgctggcgatcggatcgaacccatcctgagcagtttgtggctgccccgtagcgtgatcgcgccagcaccttcatcggacccggatggttgccggaacaacttggttcgcttcacaaggcggggtcgacgaagatgacacagactatcataacgacggctggaatcgatacatccaaggccaaactggacgttgctgttcatgatcggtccgagcgctggcaggttgccaatgctttacctggctggcgcgccttggcggccaacctgtccaaagccggcgtgacgcgcgtcgggatcgaggcgacgggcggctatgaacgcggtgtggtggagtatttgcgcaaggcgggcttcaccgtgctggtgctgcagccgacccaggtcaaggcttttggccgggtccatctgcgtcgcgccaagaacgatgcgctcgatgcgttcttgatcgcggcttgcacagcgacactcgatcagccgaagactgcgccagatcctcgactggcacaactggctggatatctgacctttctcgaacagatcgaggaagacatcgcgcgtcacaagacccggctcgaacatatcgacgaacctggcctgcggcgcattgttaacagcgacatcgtccggctgaaggcacgacgggccgcgcagatacgcgacattgccaagcgacttcgcgccagtgacgatcttgccatgcgactcaatctggtgctgagcattcccggcatcggagaacgcacggcgctggcgcttctgatccgcatgcccgagcttgggcaagtcagccgcgaggaagctgcagccttggccggcctggctcccttcgacgacgacagcggaaaacataaaggcctacgtcgcatagctggcgggcgaagtcgcctacgccgctccctgttcgcggctgccctcccagcggccttccgctggaacaaggcactcgtcgcgctctatgcccgcctgacggccgctggaaaggcccacaccgcagcgctcatcgcttgcgcccgaaagctcctgatctacgccaacaccgtggtccagcgcggtacgccgtggaccgaaaaagccgcctagctcttaatggttg

SEQ ID NO: 660 - DNA, 1508 bp, unidentified
  source 1..1508: mol_type = unassigned DNA; note = element_08a6c05
  misc_feature 1..2: note = core
  misc_feature 3..272: note = LE
  misc_feature 273..1472: note = CDS
  misc_feature 1473..1508: note = RE
  misc_feature 22..246: note = bridgeRNA
ctcgtataatatatttatgggtaatttaaagagaacccacatgaaaactcttgtttatcgcacagaaaagtgagataataaatctgtacagtcagagggtgctgatcacttccttgaagtttggcttccaacgaaagagtagcacctctgctttacggacagatacgaatgagctggatcgcattcaagtgctgaatctctaacgaggttgtatttccgtaaaatacagaggatcacctttgctgtaacaaaactttacgaggtgtatcacaatgttttactgcggaattgacatcgcaaaatacaagcacgaagcttctgtcatcgatatgtccggcaaagctttgagtaatagtatttcttttgcaaatgacagacaaggctgtgaaaaggttcttgccatctttgaaaaatcagaaataacacctgacaatgttgtcatcggaatggaagcaacggatcattactggctttccgtatatacctttttccttgagcttggatatacagtcaaagttatcaatcccattcagtctgaagcgttcagaaaaatgtacatccgtcaaactaaaaatgactcaaaagattcctatatcatcgctcagatcatgcgttttggagaatactctgcaactacactttctgaggacaacatcattgcattaagacagctttcacgatatcgccttgctcttgtagatgcctgcggcgactgcaaaagacgtgttatcgctctgcttgaccaaatatttcccgagtatgacaagctattttcagatacattcggaaagacctcttcagagcttttactcaactgtcctacgcctgaggatatgcttgcggtctccacaagaaagcttacgaatattttgaataaagcaagccgtggacggtttggcaaagaaaaagcagaagagcttaaagatgctgcaaaaaacacctttggcattgcttttgcaaaagacgctttttcctttcagataaagcagctgattcagcagatcatctttactgaaaagcagctttctgaactggaggaacaaattgcgaatctgcttcacgaaactaatcagtatatcaccacgatcacaggcatcggtgatgttctcggtgcaattatcgtcagtgaaatcggcgatatcaatcgctttgaacgtccgaatcagcttgttgcgtttgctgggcttgatgtgactattaagcaatcaggtgaattttcaggtacgaaaaacagaatttcaaaacgtggttccccttacttaagaagggcaatctggcttgccgcacagcgtgccgctttttgtgatcctattttatctgaatactatcagtctctcaaagcaagaggcaagcatcatctgactgctgtcggtgctgttgctcgcaagctttgcaacattatttttgtgattctcaaagagaacagaccttattttcctacccctccaaaaaagtctcaaaatttatcttgaattttacttttggggtattgactttttatagctggt

SEQ ID NO: 661 - DNA, 1502 bp, unidentified
  source 1..1502: mol_type = unassigned DNA; note = element_08b7549
  misc_feature 1..2: note = core
  misc_feature 3..245: note = LE
  misc_feature 246..1481: note = CDS
  misc_feature 1482..1502: note = RE
  misc_feature 6..242: note = bridgeRNA
ctaatgggcctcgtcgggccgtgagggagactacggtccgtagccgccagcgggtgagcacttcgttcgccggagccgttcaaagctctgctgtcagaccgtgcccccgctggtcggccgggaggcctgacttctgatgggatggcgtgcccgccgagcggttcggcgtgagcactggatccattagggcgacagccgtgccttccgctggctgcgcaaggtccttaccaaggcgaagggttggggtgctggtgctgttcatcggcgacgattgggccgaagaccaccacgatgtggaattgcaggacgggactggccgcaagctcgccaccgcgcgagtgccggagggcgttgaagggatcgcgaagctgcacgctctcgtcgcgcggcacggcggcgaggagccgatgcccggtcaggtggtggtggggatcgagaccgaccggggtccatgggtgcaggcgctgatcgcggccggctaccgggtctacgcggtcaaccccaggcaggccgctcggttcaaggagcggtacggcacctcgggggccaagagcgacaagggtgacgcccacgcgttggctgacatggtccgcatcgaccgtgaccagcttcggccgatcgccggggacagcgaccaggcccaggccgtgcgcgtggtcgcccgcgctcaccagacgctgatctgggagcggacccgcacctttcagcggctgcggagcacgctgcgtgagtacttccccggcgcgctgaccgcctatgcgggcctggagctgaccagcaccgatgcgatggaactgctggtcaaggcccccacgcccgaagaggccgccaggctgacgaagccgcagatcaccgcggtcctagctcgtcatcggcgccgcgaccgggaccagaaggccgccgcgatccaggccgcgctgcgcgagccacggctcggcctgcccgcgccggtcgccgccgcctacggtgcggccgcgatcgcgcacgcgaggctgctgatcgcgctgaacgagcagatagccgtgctggaagaacaggtgagcgcgcattttctcgcgcacccggacgctgagatctacctgtcgatgccgggcatcggtgagatcaccggtgcccgggcgctggccgagttcggcgacgaccccacccgctacaccaccgccaaggcccgcaagaactacgccggcaccagcccgatcacccgtgcctccggccggacacacgccgtccaggcccgcttcgtccgcaacaaccggctggccgacgccttgcaacgccaggcgttttgctcactgcagcgatcacccggcgcccgccgctactacgacaagcagcgagcccgggagctggactacaaccccgccttgcgccagctcggcaaccgcctcgtcggcatcctccacggctgcctcaagacccgcaccctctacgacgaggccaccgcctggtcacatcatgcgaccctcccagccacagcttgacgccgctacggcatgggatgt

SEQ ID NO: 662 - DNA, 1471 bp, unidentified
  source 1..1471: mol_type = unassigned DNA; note = element_08c0275
  misc_feature 1: note = core
  misc_feature 2..228: note = LE
  misc_feature 229..1452: note = CDS
  misc_feature 1453..1471: note = RE
  misc_feature 7..231: note = bridgeRNA
cgttaccttgtgagcaccccgaaggacggggtctggtcgctcgaccgggtatggctgtgttgccctgccatagatggtccggggggtgttgccgcccggtcgagagacacgcgttgaccgctgatagggacacggcccaggacgccctgaggtctcttcgtaacgtgggtgccggcatcgggtgtcaagactgcgaccagcagtgatgcgttcaaggaggacgacatcatgacttctggattcgccgtcgtgatcggcctcgatgtcgggaagaccgggcatcacgcctgtgctctcgactcggccgggaccagactcttcgacaaggcgctgccacaggacgaggcccagctgcgcgagctgttcagcgctctgcaggcctatggggctgtgttgatggtcgtggatcagcccaacaccatcggtgccctgccgatcgctgtcgctcgtgatgtcggctgcgaggttgcgtatctgcctggtctggcgatgcgcaaagccgccgacctctatcccggcaggtcgaagaccgatgccagggacgcgttcatcatcgccgacaccgcccggaccatgccccatacgctgcgggccgtggaccgtgacagcgacgtcctggccgcgctgaaggtccttgccggattcgatgaggatctggcgcatgagaccacgcgggcgctgaatcggatccggtccttgctcacgcagatccatccggctctcgagcgcgtcttcactggcggcacgctggccaccgggctggtgctggacttgctggagaagttcggcgggcccaccgggctcaaggcggctggacgggcccgggcgctgcggttcgcccgcacgcactcacgccgcgatcccgaggccctgatcgatcgggtcttcaccgcgctgagcgagcagaccgtggtcgttcccgcgactgcagcggtggagctggtgatcccgagagtcgctggccaggtcaaggagctcaaggctcagcgagcgaccgtggcccaggaagtcgaggccatgctggaggacttccctctcgcctcggtcttgatgagcatgccggggatcggcatcaagaccgccgcgcagatcctcctggcgatcggtgacggcaccgcgttcgagacagccggacatctggcggcctatgccggaatcgcaccagtcacgcgcaggtctgggacctcgatccgtggtgagttccccgccagagcaggcaacaagcggttgaagaacgcgctgttctactcagcctggatcgcctcgcactccgacccgatctcgaagacctactacgatcgcaagcgcgctgaaggcaaacgccataacgccgcggtgatctgcctggcacgccgacgctgcaacgtcatcttcgcgatgctgcgaaacggcacctactaccagccgccaaccaccaatccctcacctgagtcgaccgctctcgcggcttgactcagaacatagggacacc

SEQ ID NO: 663 - DNA, 1228 bp, unidentified
  source 1..1228: mol_type = unassigned DNA; note = element_08c58bc
  misc_feature 1..2: note = core
  misc_feature 3..241: note = LE
  misc_feature 242..1213: note = CDS
  misc_feature 1214..1228: note = RE
  misc_feature 6..212: note = bridgeRNA
cttgtatctcgactaacgctccgccaggagcgatagctctcgactgatcatcgagggagggacttggaagccgcgcagctccttaggctttttgcctgtgacgtagatcgtgctccagccctccacactcactcgtacagttcgcacggtatcttgggcccgcctccggcgagagcccgcattcgcaaggttggacagagtgaagtgatgatcgcaacagggaacaagtggagaaacgatcatgtctggtttcgttggcgtcgacatcgcaaagaacacctttgatatcgctacacacctgcccaacggcaagcacaaaaccaaggccaagctggccaacgacccaaagggctttaaagagtttgaggcgtggctagaaaaaaacgccgagcgttcggccctgatcgtgatggaagccacgagcgtctaccacttggagctcgcggagttcgtttacaacaaaggcttccgggtctgcgtcgtgaacccggctacgaccaaagcgtacgctgacagcgaactgcgccgcatcaagactgataaaagtgatgccaaactgatcgctgactttgcccgggaaaaggatcaaaaacttcacccatgggcgcctgagccgctgaaataccgccagttgaaagcaatggtgcgccgcctggatgaccttcaggaaatggaacaaatggagcttaatcgtctggacgtttccgacgaaaaggtcaaagactcgatcaactctgttctgcgccatatcgaaaaagagatcgtggaaacgcataaggcgatcaaaaaacacatcgatgacgacccggatatgcgtcagatgcggaatctgatcgtaaccatcgacggcatcggacaaaaaacgcttgaacgattgctggccgaactgggtgacttgcgcaaatacagtgaccctcgccaactggtcgctgctgcggggctcaatccaaagctgcaggaatcaggaaagctcaaaggtcataccctgatctcaagagtagggtcagcacggctgcgtgcaggcctctacatgcctggcatggtggcgctgaaacacaataaggcgatcaaggcgatgaaagaacgcctggaagccaacggcaaggctcccaagcagatcatctgcgcagcaatgcgcaagctgctgcacttcgtttacggagtgctcaagtcaggactgccatatgacccgaaacttgcacttgcccggtaaggctcaagacggtat

SEQ ID NO: 664 - DNA, 1188 bp, unidentified
  source 1..1188: mol_type = unassigned DNA; note = element_08c7f5e
  misc_feature 1: note = core
  misc_feature 2..80: note = LE
  misc_feature 81..938: note = CDS
  misc_feature 939..1188: note = RE
  misc_feature 972..1183: note = bridgeRNA
caatgaaatggactcctccctcctacggcgtcaagcgccagactaatggtgcagccacaagtcccggagggggagtcagcatgaaccttactcgcattggtctggatctggcaaaacaagtattccaggtgcacggcgttgatcgtcacgagcatgtggtatgtcgtcgccaactcaagcgggcacaggtgcgggatttctttcgccaactgccgccgtgcctggtggcgatggaggcctgcggcagtgcgcactactgggcgcgcgagttgcgggagctgggccacacggtacgcctgatcgcaccgcagttcgtaaaaccctacgtcaagggtgacaagcacgatgcacacgacgccgaggcgatctgcgaagccgccagtcgtccggcgacgatggccttgctcgaaacggtcatggctaccgaaccggcgtccttgccggccccgatgggcgagctgttgcgtgaattgaaagatgaattgcagacgctggaggcgcgcatcgctcgactggagcgacagattcaggctcacgtacgtggcgatgcccgcatccagcgcctgctggcggtggaaggtatcggcccgatcagcgccagcgccgtggcggcatccgccggtgatgcacggcaattccgcacgggccgccagtttgcggcctggctgggcctggtgccacggcagcactccacgggcgggcagcagcgcttgggcaacatcagcaagcgcggcgatacctacttgcggaccttgctcatccatggcgcccgtgcagtcgtgcgctgttgcgccaacaagaccgatgcccgcagccgctggctgcaaggtctgctgcaacggcgtcctgccaatgtcgtcgccgttgccctggccaacaagaatgcccggatcctttgggccttactcagccgggagacatgctaccggcccggttgagcgttcctgccacaccgtagttgaaacatccaccacgattgctcagtgaatgacaatgatgacgaaccggtcgaaccggcctgcatgaaacctggtttatacgtgggctccctgctgcagtgaagcaaagccgttagggcgatcaggcatgtaggcgcgcatttcatcagggctcggcggatatacggatgcagtcgtacccaggtttgaaatcaagacaaacactggcaaaccgggaggagtccatata

SEQ ID NO: 665 - DNA, 1235 bp, unidentified
  source 1..1235: mol_type = unassigned DNA; note = element_08cead7
  misc_feature 1..2: note = core
  misc_feature 3..221: note = LE
  misc_feature 222..1211: note = CDS
  misc_feature 1212..1235: note = RE
  misc_feature 52..211: note = bridgeRNA
atggtaagtttgcattaaacttcattgattcttaaattagttaaaaaaattaactaaaagaaaagcagcaggataaaggcagacgcttcaatgatacttagatatcgtccctgatattattcccctgctgctgttttcttccaaatccggatagaacattgttggtaaaaacttttaccatgatggatcagaagaaaacctctttataaaaaagatttatgatgacaaaattaccaaaaaaagtgattggagtagatgtaggcgcaaagattttaacaatgagtttccaggattctaataatcaggatcaggtttgtaatatcgaaaacaatcagcgctcaattttatcatttttaaagaaaatatcgtcagatgattattgtctggttatcgaagctaccgggaattacagcagcaggatacttcatctttctttaggaaagcgttttgaaacgagcctgatcaactgtatgtctgtcaagcattttgcaaggatgaagaacatcattgcaaaaactgacgccgaagatgctaaattaatcagactttatggtgagatgttccgtccagagaattatattcccaaaagtactgaaattgaatatttggatcaggagattaagcttttgaacgatttggaggaagaaaagcgcaggtatgcagtaaagctaaaagcgcttcgttttaatccttatctcaatcccaacacggaaaagcattatgaaaggcggctgaagcaattggaaaaagagattaaagaagtagagcttcgtcttccacagcttcaggatgaggaatttaaagaagtaaaggatttaatacaaagtgtgtccggaattggagagaagacctcattacaactgatgacagccacttcgggttttaagaattttgattcggcaaaatcattggtcaaatattttggattggctcccaggatttaccaatcgggcaagaaatcttattcgcccggaaagtgcagaacatcgaaaacccatatcagaagtctgctatatgtatgttcctggactgcaatgaaacataatgttcattgtaaggagctctaccttcgtctactggcaaaaggcaaaccaaagaaattagctttgatcgctgtttgcaataaacttttaagaatctgctttggtgtagtgaaaaatagaattaaatatcaacaagattatcagaaaaactttaaaattttaacttgaagaatttgaatattaacatagaac

SEQ ID NO: 666 - DNA, 1386 bp, unidentified
  source 1..1386: mol_type = unassigned DNA; note = element_08d66d1
  misc_feature 1: note = core
  misc_feature 2..87: note = LE
  misc_feature 88..1119: note = CDS
  misc_feature 1120..1386: note = RE
  misc_feature 1152..1378: note = bridgeRNA
caatgggatggactcctcctcacctatcggcgtctaggcgcctaaactgggagttaccacacaaccagttaagagaaggagtccacgatgaagattatccgcgtcggcgtcgatctggccaagagtgtctttcaggtgcatggggtggatcgttgcgaaaaagttgtttggcgtaagaagctgggccgtgcagagtggttatcggcgctgctggagaagatagagccaggctgcgagattggcatggaagcctgtggcggtgcgcaccactgggcgcggcaattacagaaacgcggcttcaccgtgaaactgattgcgccccagttcgtgaagccgtacgtgaagagtaataagaacgacgccaacgacgcggaggcgatctgcgaggcgatgagccggccgagtatgcgctatgtcgccgtcaagtcagtcgagcagcaggacctgcaggcgatccaccggatcagggcggagctggtgagtcagcgttccgccaagggcaaccagatccgtgggctgtgcagcgaatatggcttggtggctcccagggaaatgatccaactgcgcgccgccattccgctgtggctagaggacctggaaaatggattgacgcaacgtttccggcgtatgcttcgcggcttgtggctcgatctgttgaacctggaactgcgagttaaagaactggatcaggaaatagaaatcgcggcggccacggatcctgtcgccaccaggttgcagcaactgcgcggcgttggcccgatcatcgcgaccgcgcttgtggccaacgtcggtgacgccaagcagttcagcagtggcaggcagatggcggcatcgttggggctgacgcccaggcaaaatagctcgggcgggaaggagcgattgctggggatcacaaagcgaggagatgcacagctacgcacgttgttgattcacggtgcccggtccgtgttgcgcacggcggccagcaagaatgaccggatgagtcgctgggtaacgcacatcgcccagactaggcatcacaacatcgcggcggttgcactggccaacaagatggcgcgtattgcctgggcgatgatgaccaaagggaccgattatcagcctgggctggtggcggtctaaatagtagcgtaatcagtacgtaaaaaagagtatccaaccacgattgcgaaacatgccgatgatggccaacaggtcgaaccggcgctggcagaacccgagaatgtctgcggccttcgagcccgaagaagcgatagggagccagcgcgcgaatagcccattatggtcattgcccgaaagcgggcaatgtagttagagaccgaatatacgtgagcagtcgtacctgaaagtcaaagacggaatgtttgcaaacgaggaggagtccatata

SEQ ID NO: 667 - DNA, 1370 bp, unidentified
  source 1..1370: mol_type = unassigned DNA; note = element_08e1286
  misc_feature 1: note = core
  misc_feature 2..108: note = LE
  misc_feature 109..1032: note = CDS
  misc_feature 1033..1370: note = RE
  misc_feature 1058..1312: note = bridgeRNA
gaatgaaagggacttcccgtcccgagctagccgcgatttgcggcgaacggcatcgaagtgccacgatggggttgcgaatctcatccactcactcggaaggggaagtccatggccattattgcgattgggatcgatctcgccaagaacgtgtttgcggtgcacggggtggatgcagcgggcaaggcggtgctggtgcggccagcggtgcggcgagatgcgctgctggagctgatcgccaaactgccgcagtgcctgatcggcttggaggcgtgctctggagcgcaccactgggcgcggcagtttcagcagtttgggcaccaggtgcgcatcatggcggccaagttcgtggcgccataccggctcagcggcaagcggggcaagaatgacgcggccgacgcgcaggcgatctgcgaagcggtgcagcgcccgcagatgcggttcgtgccgatcaagggcgaagacgcgcaaggccgcttgagcatccaccgcgtgcgccaagggttcatcgaacagcgcactgccacgatcaaccgcatccggggtttgctcagcgagtacggccatgtgctgccgcagcgcgccgaggtggttcggtgcgaagccggccaatgcctcgaagacctgccgggctgggccaacaccgcaattggcgatttgctcagcgagctgcaccggctcgatgaacgcattgccgagtacgaccgccacgtcgagacgatggccaaggcggacgaccgctgccgcaagctgatggcgatacccggtgtgggcgacaagacggccacggccctgatggccagcattggcagcgcgcacgacttcaagtgcggcaagcagcttgcggcgtggctgggcctggtgcccagccagtacagctctggaggcaaacaaaggctggggcgaatcaccaaagccggagacggctacttgcgcatgctgctgatcctgggcgcgcgagcggtggtggccaagaatgcgggcatggcctgggcgatgctcagcaaaggcgaagcgttcaggccgttgacctgacgactgcctgagagtgcccgtgtgacgattcatggcgtgatgccgcgttgatgagaaccaaggttggacctgcgcggggaaggctcggataacctgtgaaggcgccatatggcgaccttgactaacgaatggagcccccgcgtgcgtctttcatcagggtccgcagcaccttgatgctgcattgaagaccggttgtagtgttgccgtccttatcccttggttgctgtccgcgcgtctgatccctgggttggtgtttgatggtttgaaggtcccaggtgaatcgccttcggcgaatcacccggggatggttttgcttgacagatggggaagcccttgta

SEQ ID NO: 668 - DNA, 1472 bp, unidentified
  source 1..1472: mol_type = unassigned DNA; note = element_08eb7e9
  misc_feature 1..2: note = core
  misc_feature 3..402: note = LE
  misc_feature 403..1455: note = CDS
  misc_feature 1456..1472: note = RE
  misc_feature 9..221: note = bridgeRNA
ccgttaccgtggaagagtcctcgaacgtcggggatctggtcgctcggtcgggcatggctgtctcgccctgccattgatggtccggggggtgttgccacccgaccgagagacactcgttgaccgctgatagggacacggcccagcattgctgaggtctcaccgtaacgtgggtgccggcagtgggtgtcacgactgcgaccagccagaaactctcattgaggagagccaccatgcaagacaccatttgcaatcaccattggcctggacgtcggcaagaccgagcaccacgcctgcgcgctcgatcccaccgggaagaagatcttcgacaaacccctcccacaagacgagaccaaactccgcgcactgttcaccacgctactcgaccacggccgagtactgctggtggtcgatcaacccaacacaatcggcgcgctcccggtcgcagtcgcccgtgacgctggctgcgaggtcgcctacctgcccggtctggccatgcgcaaagccgccgacctctatcccggccgggcaaagaccgataccaaagacgcattcatcatcgctgacaccgcccgtaccatgccccacacactccggcaggtcgatcacaacagcgaaactctgtccgcgttgaaagtcctctccggcttcgacgaagacctcgcccacgaatgcacccgcgcgctgaaccggctccgttcgctgctcacacagatccaccccgccctcgaacgggtcttcaccggcaccaccctcagcagcgaactcgcgctgaacctgttgatcaaatacgccggccccaccggtctcgccacggccgggaagacccgcgtcctgcgctacgcccggacccaccgctaccggaatccaggccagctcatcgaccgcatcttcaccgcactcgaggaacaaaccgtgaccgtccccgccacccgcgccgtcgagagcatcatcccccgcatcgccgcgcaagtcgtcgagctcaagacccaacgcgccaccgtcgcacaagaagtcgaagccatgctcgccgacttccctctctccaaggtcttgatgagcatgcccgggatcggcatcaagaccgccgcacagatcctcctcgccatcggcgacggctccagcttcgccaccgccagccatctcgccgcctacgccggcatcgcccctatcaccagacgctccggctcctccatccgcggtgaatacccatccagagcaggcaacaaacgcctcaagaacgccctcttctactccgcctggatcgcctccacccgcgaccccgcatccaagacctactaccaacgcaaacgtgccgaagggaaacgccacaacgccgccatcatctgcctcgcccgccgacgatgcaacgtcatctacgccatgctccgagacggcaccccttaccaaccaccaacaccctcgcccaaccccaaacccgtcaccctcgcagcttgacaaacaacatagggaca

SEQ ID NO: 669 - DNA, 1613 bp, unidentified
  source 1..1613: mol_type = unassigned DNA; note = element_08ee89e
  misc_feature 1..2: note = core
  misc_feature 3..72: note = LE
  misc_feature 73..1236: note = CDS
  misc_feature 1237..1613: note = RE
  misc_feature 1264..1480: note = bridgeRNA
agaagctatggggagagcggcgaggtcgtgaaatggtccaccgtcgttcgatgaaacggatggaggtgccccatgagccaagtcagtgatctgagccgttcccttgttccctttgatcaaaatatcactctgacggtggtcgttgagctgagcgaggccagctggctcgtcgctgggttgattcccggtgtcgatcgccaacccgtgaagaagcaggaaccggagccggtcgcgctgctgcggctgttggagcgttggcgggtggaggcggtgagggctggcaggacaattggacggattgccctcgcctttgaggcgggccgcgacgggttctggctggcgcggtggctacaggctcgcgacatcgaggtgcacgttgttcactcaaccagcgtcgccgtgtcacgcgagcatcgccgagccaagaccgatcggctggatacggcgatgctcatgcgtgtgttcctgggatggctgcgcggcgagcgcgggcactgccggatggtggcgatcccaacgctcgagcaagaggacgccaagcgtccgagccgtgaacgggaaagcctggtcggcgagcgcacgcggatcgtcaaccggatgaaggcagccttggcccggctcggcatccgcgggttcaaaccgacgttgcgcaaggcgccgcagcggctcgacgctttgcgcacgccggaggaggtgtcgattccaccgaacacgctcgacgagatccgacgcgacatggttcggctcgcggtggtgcgagaacagatcgatgtgatcgaacgggcccgcctcgcgcgcctggaacaagcgccggcggcggggccacacgccatggtgcgcctgttggcccgcgtcatcggcgtcggcctggaaacggcggacatgttggttcaggaggtattgtcccgaaaccttcgagaccggcgagcggtggcccgttatgttggcctcacgggttcgcctgacgagagtggcaggcggcgacgggagaagggattggccaaggcaggcaatgcccgcgtgcgccgcggcctgatccaactcgcctggcggttcttgagattccagagggacagcacgcttgcgcaatggtaccggacgcggaccggtggcccgaagggcgcgcgcaagacaacaatgatcgtggcactcgcccgcaaactgctcatcgcgctatggcggatggtcaccatcggcgagatcccggcgggcgtcgcgctgcggcaggtgatctgaacacgcggcatggtcgtcgcgcggcggatcgactgtcgcgaggaggccacgtgtagcgattcgaggtggcggtgacccgaacaactccatggctccaatgccgtcgacagaatgggcccgccgcctcggagccttgctgctgaagccattgactgcttcatggtccgggtccgatacgaatccaaccgaatacaaggtcgcgcgcaatgctttgcgcccaatggcaggctcccctcggattgctcgcacagtggtctgatcgggccaacgcccgcctcaccctcgcggtcgatcgaccccggccttttggccaggcgcaggccgtcagggattcaagaaagaggaggctgagagcttgacaaataaatccccataca

SEQ ID NO: 670 - DNA, 1565 bp, unidentified
  source 1..1565: mol_type = unassigned DNA; note = element_08fd24e
  misc_feature 1..2: note = core
  misc_feature 3..253: note = LE
  misc_feature 254..1432: note = CDS
  misc_feature 1433..1565: note = RE
  misc_feature 3..232: note = bridgeRNA
ctcgtataataagcatgtacccaatatttactttattctagtatttgggtatgcttgttacagacgatgctgtggattggttacggccccttaccgctggacggtttttctgtaggctccaaccacagacttctgttcttgaatgttaattagttggataccgcccgacggttcatctctaacgaggatacgtgcgaacagatttcctgtggcttcttcagcagcatcgaatttttatcaggaggatatgtccatgatttatgtaggtatcgatgcagccaaacggaagcatgactgttgcatcttagacacgcagggaaagccatatccagtcttttcattttcgaattcccacgatggttttcaagctttctttcaaaaattgttttctatctgttccgacaaaggccaaataaaaataggcctggaagcaacgggcccttattcagaaaaccttttcaacgccttagtggaccgcagtttacccgtgctgcgtataaacccactccttgtgaagaactttaaaagctccatgagtttacgtaggaccaagacggataaggtagacgcacaagcgattgcgcaaatggtaaaagaaaaaggggactcgcttcagacctattctacttcattgtaccacatggaagaattaaagtcacttacccgctaccgttcaaaattagtggcggaacaatcgaaactgcgtgtgtctgtctcccgtctggtaaccatcttgttcccggagttagaatcactcgtaagcagcctgcatttagcttctatccaggcactccttatagaatggccgggccatcagcaactggcagactgcaacctgaagcgcttaaccaatctgttgaaaaagtattcccgcggtcaattcggtaagcccaaagccatcgccatccagcaggctgcccggcagtcgattggaagggtttcgccttctaaatcactggaacttcggcagaccctcaaaaaagtggcctatgtacagcgggatcttgacgaagtggaagcccagatcaaggacatggtggattcactgcattcgcccattctggatatccccggcatcggctacactacgggagctatgatcttagcagaagtgggagactttaaccgctttgccaatgcggataagttgctcgcattttctggcatgtccccttcgaaatatgaatctggcgagtttaaagggactaccggtaagatggaaaaacggggttcctcctacctccgctatgcactctacaccgcggccaagctggtcagccagtttgcaccgcagttcaaaagctattaccaaaagaaacgagctgaacagaaaccttataacgtggcgctgtcgcatgtagctaaaaagctgacacgcgtcctttacaaactcggtacgacaggcgaagcctaccaaccacaggccgcctaattcgtacaaaagcaaacggattttttagcacctctagcgaggtgtagcttcgtgcacccatttttcaatgtccattgccaaaagatttttctttaaaaatgtttcaatttatgcttgacaatatatagttggt

SEQ ID NO: 671 - DNA, 1565 bp, unidentified
  source 1..1565: mol_type = unassigned DNA; note = element_090eaff
  misc_feature 1..2: note = core
  misc_feature 3..270: note = LE
  misc_feature 271..1449: note = CDS
  misc_feature 1450..1565: note = RE
  misc_feature 3..248: note = bridgeRNA
cttgtataatgaactcatagggaaattcactacacattttcctttcttgattattttctatataatcagttgtagacgctgtggattagttatcattcctacagcagcttccctataagctgactgtttcctttggaggctctaaccacagctctatgtttatttgttaattagttagataacgcacaacgttttatatatagcaaggatacattcaacatagagtttgtggaaacacagcgtaagtttattacaaaggagtgattctttatgttatttgttggcattgatgttgccaaatccaaacatgactgctgtatcattgattctgatggtgtcatcattactgattctcttcgtatttcaaacacaaaagaaggttttgatacactttacacctcaatcatctctgcgcttcactcaagtgatttttcaaacgtaaaaataggacttgaatcaacaggtcattacagcacaaacattacaaactatctgtattccaaaggctttcgtattaccgtactgaaccctttggtaacaaatgcttttcgtaaggctggaacccttagaaaaaccaaaacagataagtgtgacgccaaagtcattgcaactatgctcttttctgatgaatcaaaatcctattctccttcatcataccaaatccaagagctaaagtcactaacaaggcatcgttatcgtatgattggttatcgttcaaaactcaaactctctgtcacccggcttatcgatatcattttccctgaactgcctgattttgtatggtctatacaccaatcttccagttaccagttattacttgagttaccatgcccagacgaaatctgcaaatgtcatttgactcatttaacaaatgttatttccaaggcttcccgtggaaaatatggtcgtgaaaaagcacttcagctacgagaacttgcggctgattctatcggctcatccaatagagctttaacttttgaattgcagcagacaattcgattaattcaatccattcaggccgaaataaacactttggataaacagatcaaacttgttgtagatgaacttaacacgccgcttatgaccattcctggtataagatatacgattgctgccattattcttgctgagattggagatataaacaacttctcgtcaccagcgaagcttctagcatttgctggaatggaaccttctacttaccagtctggaaaatacaatgcagctaaaacccccatggttaagagagggtctacatatttgcgttgggctataatgcaggctgcacgattggtttctatgagagattctactttttctgcttatatggcgaaaaagcgatccgaaggaaaacactttaatgtagctcaaacccacgtaggcaaaaaactgattcgagtaatctactcactgttaaaaaacaacaccgcatttgttccacaaatgtaacaagtaaaatatcctttatgaaggcagcttccgttgccttatttgtcatgcaattttttatctataagaaaaactataaaatcttatcaatttttacttgacttcatatagttagt

SEQ ID NO: 672 - DNA, 1459 bp, unidentified
  source 1..1459: mol_type = unassigned DNA; note = element_0919758
  misc_feature 1..3: note = core
  misc_feature 4..138: note = LE
  misc_feature 139..1185: note = CDS
  misc_feature 1186..1459: note = RE
  misc_feature 1222..1455: note = bridgeRNA
agatggcatggacgtctccacctacccgctgctgcaagcgcccgcccaaagttcgataaagggtggggcctcgcggtaacggcatcaaagtgccaaagtggaggttcgtagcaaccacttaaaaccggaggccccaccatgcaatttacctcagcactgccagtcattggaatggatatcgccaagaacgtgtttcaaattcacgtcgttgatgtggaaacaggcgagatcgggcgacacaaactcaagcgcgaacgggtgactgcattctttgcaaatcgccagaaatctctagtcgccatggaggcttgtggcggagcccaccactgggccagaaccctgcaggcactggggcacgaagtgaaactgctgcctgccaagcacgtgcgcccctttgtactgcgtgacaagaccgatgcgcgcgatgcccagggcatctgggtagcagcccagcaattgcagatcaaagctgtgccggtcaagagcgaacagcagcaagcctgcctagctttgcaccggatgcgtgctcagctaatgaagatgcgcatcatgcaaaccaatgcgctgcgctgcctgctgtacgaatttggcatcgtgctgccagagggccaccgcatattgcttgaccgcattcagggcgaactgggaaaagcacaagagcgcggcagactccccgccgtggtggtgctcagtgtgcaagagcagctcaagcggatcgaaggcctgcaagcggacatcgaccaactggacaagcgtctggcatcactggccaaacacaatcaacaaatgcaggccttgcttgccatacccggcattggcccattgacggccaccgccgtggtgtccaccgccaccgatatcaccagctttgagtcaggcaggcagttcgcggcttggctgggcttgacgccccggcaaacaggtactggcggcaagactcgccagttgggaatctccaagcgaggtgatgcgtatgtcagaacgatgctgatgcatggagcgcgcgcagtcatcgccagaagccgccatggtggttggatagagagcctgctccagcgtaggccctacaacgtggtggttgccgcgctggccaacaagctggcgcgaaccgcatgggctgtcttggcaaagggcaaggcgtttgacccgctgcagtggaaccccactgaaatcacgcccgcataaggtcatccatcagaaaccgaacgacctaattgcagacaactttttaaaggagagctcgcaaaaagcgaagtgatgggtcaacaggtcaaaccggggtggggacaatccgatagggatgcagggctttgagctcgatatgcagataggaacctcacccgcgaatgccatcagggccagcaggacaacaagcctgcacaaacaggccgtatgtaagactgcaagccctttaaatcctcaccccgctaattcttgctttcctggagacgtccatgta

SEQ ID NO: 673 - DNA, 1353 bp, unidentified
  source 1..1353: mol_type = unassigned DNA; note = element_092822b
  misc_feature 1..2: note = core
  misc_feature 3..81: note = LE
  misc_feature 82..1092: note = CDS
  misc_feature 1093..1353: note = RE
  misc_feature 1085..1340: note = bridgeRNA
tgttggggtggacggccccctacggcatcgagtgtgccaggctgtgaatgtttgcaatcgcagccaagggaagccgtccacatgacaattatcagaatcggcctggatacgtccaaacatgtctttcagattcatggggttgacgagaacgagcacgtggtgttgcggcgccagattcggcgcagcgaggtggcaaaattctttgccaagctggcaccgacgcgaatcggcatcgaggcgtgcggcgcctcgcactactgggcacgggttctgcgaggcttgggacacgaaatggttttgctcccgccgcaatacatcaagccctatgtcaagcgcagcaagaacgacaagatcgacgccgaagcgatctgcgaagcgatgagccgaccgacgatgcgatttgtcccggtcaagagcgccgagcggcaagcggcgctgacgatgctcggggtgcgcgatctgctggtcaaacagcgcacaatgctgatcaacgccatccgcggccatgcggcggagttcggcctcaccgtggccaagggccccaagcaggtgaacgaactgctgcaacgcctggcaaacgaggaaggcgtgccggcgctggcacgcgagatgttcggcatgctggctagtcagctcgatggattggacgtcaaattgaaaacaatcgagaagcagctgatggcttggcaccggcaggatcagaccagccagtgcttggcgacaatccccgggatcgggccgatcgccggcgtcagttttgccctcaaggtggcggacccgcaggcctttcactcggcccggcactttgcctcttggatcggcatcacgccgcgcgagaactcgaccgccgggcggcagaagctcggcaggatctgccgggctggcgacgaggatttgcggcggttgctggtcatcggggcgaccgcagtgatccgcgacgccaagccgggccgcacctcgccgtggctgctggcattgctggcgcgaaagtcgaagaagctcgcggccgtggcgctggccaacaagatggcccgcatcgtccgggccatgatggtgagcggcgagacctaccgccagccggcacaggcctgagcccacccaccagcaaaacctggcacatctcaatctggcaaggacagcaaccgcaagatggcaatcggtcgatccgaggatcgggacaccccgtggcatcctatggtgctcagacatcactgccctgtttgggacccgatccacgtaacccatctgggccagcggtcatccgaccgcacctcacaggccggacatatgactgcaaaccgaccagaggtcatcgcagctgcacatccttgcgagacgggggccgtccacata

SEQ ID NO: 674 - DNA, 1389 bp, unidentified
  source 1..1389: mol_type = unassigned DNA; note = element_092badd
  misc_feature 1..2: note = core
  misc_feature 3..89: note = LE
  misc_feature 90..1115: note = CDS
  misc_feature 1116..1389: note = RE
  misc_feature 1159..1387: note = bridgeRNA
cgatgagatggtctcctcccctctgtactcggcgtcgcgatgcgccacgatacaggtatcggagtatcggcaggagaaaggaggagaccgtgtcccagattacgattgttggtgtggatttagcaaagaacagctttgctctggtggccctggatgtgcacgggaaggaagtgcagcgcaagaccctgcggcgcaagcagtggttgacgtacctggcgcagctgccgccgtgcacggtggcgatggaggcctgtgccagcgcgcatcactgggcgcggcggttgcaggcgttggggcatacgccggtgctgttgccgccgcaacatgtaaaggcctatcagcgcgggcagaagaacgacggcaacgatgcccgggcggtggccgaggcgcagcggcacggggcgatccggccggtgccgatccagacggtggcgcagcaggacgcgcgcatgtttctgaacttccggcgccaggtgctggcgacgcgcacacggctggtcaaccagacccggggggtcttggccgagtacgggatcgtggtgccgcggggcatcgcggcgctgcgccgggcgctgcccgagatcctggaggatgccgagaacgagctgagtccggcgatgcgcgccttgctcgagcgccagcggcagcggctggtcgagctcgacgccgaggtggcgtggtatgacgcccaggtcaaacaacgtgtgcaggaggaaccggcatgcaaacgtctgctggcgcttcccggcgtgggcccccttgtgggcctggcactgaagacctggatgggggatggccggcagttcgaccgtggtcgtgcggcctcggcggcactcggcatggtgccacggcaacacagtaccggcgggcgttcggtgctgctggggatcagcaagcgcggcgacccctgggtgcgcgctctggtgatccatggcgcccgggcggtggtcagccgcgtcgcgggcaaggacgacccgctgagtcggtggatccagcgcttggtggcgacgcgcggcttcaacaaggccgtggtcgcgctggccaacaagattgtgcgcatggcctgggtggtgatcgcgcggggtgaggagtaccaaccacgtaccgctgcctgaggccggctacaggaacgaacccaagaaccgatcgagtcacaaacccacccgaggttgcgaaggcgacagcccaagatgacacacaggtcagacctgcctatcggaaacctgctttttccgccggtccttgaggccgttagggcgatgaggacggtaggcgcggaactgcatcaaggccagaagccgcgagcttcgacaacaggccggatatacgacagcaacctgtccctgccatcccgaactggagccttgcaaacggggaggagaccatata

SEQ ID NO: 675 - DNA, 1442 bp, unidentified
  source 1..1442: mol_type = unassigned DNA; note = element_092e34c
  misc_feature 1..2: note = core
  misc_feature 3..83: note = LE
  misc_feature 84..1187: note = CDS
  misc_feature 1188..1442: note = RE
  misc_feature 1257..1376: note = bridgeRNA
taatcagatggactcgcccacgccgaggcgtctatgcgccacggtggcatcctatagatgtcaacgacagcgagggcgagtccatgagcaagaatacgtcgaaaaaaagttctctgtctgcaaccgatctttcagcctgcaccaccgtggcggtggatcaggccaaaaatgtattccaggtggccggcgaagatccgttagggcacgtggtctacgaaaaacgcatcaaatcgcgtgaagcctttgtcacctttttgggtcagttgccgcccggcatcacggtgttgatggagaccggtccgggtgcgcagtcctgggcccggatcctgcaaaaccaaggcaacgtccctcgtattctgccggcccagcacgtggctgatcacagcagtgggccgaagaacgatcgaaacgatgcactggctatcttgcgcgcaggccgagacatcaggattcatgctgtcccggtcaagaccgaagcgggtctggccatgcaggcgttgcacagggtccgtcagcgttatgtgaaacaacacacggccatcggcaaccagatacgaggcttgctgctggagcatggtttctccattgcacaaggcaaggtggcgatcagccggcgtgtcactgagctattggcagattccagccagccaatcccgcctcttttgcatgagttgatagctgaagtattaggcgaatggctgagtatggaggagcgtatcgaggtgatcaccaggcgtctggaacgtacggcccgtgaagaccagaccacgaaacgcctgatgacgatccggggcgtggggccgattctgtcgacggccatgatggccaagcagacggagccagaacgcttcaagagtgctcgcgattttgcagcctatttcggcacggtacccgagcagaagagcagtggaaacaagacccggctgggcaagatggccaagcgcggtgatgcgtacatccgaagtctggccatccagggtgcacatgctgtcttcaggcagctcaaccccaactcggatcatccggatgatcgtcgcctgcagcgctggctaggtcgacagggcctgaaaggtgctgcggtgcgcctggcaaaccgtaacctgcgaatcatctgggtactgctgcagaacgaagatacctatcgccgccaaccggacagggttcaggaggcagcgacgggcctatgatttaacgtgtttcgccaccgaggcgcttagccgtctcaccccttgctagagagtatcgaccccaggttagaccgtcgcggatagatgcctgcgctcctactggcccttgaggcctgtttgtaatcggcattccgcgagctgacccgatagtggccagaagcacatgtgcttcctcgaacaggccttatacatagatgcaaccgggtagcggtgttcaaaggcaaagcgggttgacagtgggggcgagtccataca

SEQ ID NO: 676 - DNA, 1438 bp, unidentified
  source 1..1438: mol_type = unassigned DNA; note = element_092f712
  misc_feature 1..2: note = core
  misc_feature 3..304: note = LE
  misc_feature 305..1423: note = CDS
  misc_feature 1424..1438: note = RE
  misc_feature 9..223: note = bridgeRNA
gctctaccttcttcctgggtccgccccagccattcgtagggttgtggcacccaggggagctgggtgtggctttcatgcggctgccggctgtggctcgggaggcttggccgcccagctccccacgacgactcggccgccgattgggaaatgcgaacaggtcgctgtgtagagcaatgccggcgatgtcgtccgtggtacgtactgcaagcacgagcggctggagcacgatgagccggatatgggccgggaccgactgcggcaagacccatcaccacaccctggtcctggatgccgaggggagaccttgctgtcgcggcgggtggccaacgacgaacccgagttgctgaagttgatcggggacgttctggacctcgccgacggccggaaggtcacctgggcactggacatggcgggcggcggccccggcctgctgatcgccctgctcgtcaaccacggccaagagctcgtctacatccccggcatcgtggtcaaccgggcctcggacagctaccgcggtgcgggcaagaccgacgcacgggacgcgcgagtgatcgccgaccaggcccggatgcggcgcgacctgcagccgatccggcccggcgacgacgcgggcatcgagctgaagctgctgaccgagcgtcgcgtcgacctggtcgccgaccgcacccgcaccaccaaccgactcaagggcctgctgaacagcatgttcccggccctcgaacgcgctctggacatcggcaccaccggagcactcctgctgctgacgggttaccagactccggcggctatccgccgcaccggcctgcgccggctgaccacctggttgcgcaaccgcaaggcccgcaaccccgaggccctggccgccaaggccgtcgaggctgccgagcggcagcacaccgccgtcgccggcgagagtgccatcgcgaaaatggtgcacaccctggcgaaggaggtgatggtcctcaacgagaagatcgccgagaccgacaaactcatcgagggccggtttcgcgagcacgaactcgccgaagtgatccagtccatgcccggcatcggcgccgtcctcggcgcggaactcctcgtcggcatcggcggcagcctggacgctttccccaccgcggaccggctcgcggccttcgccggtgtgactcccgcgccacgcgactccggtaaggtcgtcggcaatctccaccggccccagcgctaccaccggcgcctgcaacgggtcttctacacgtccgcgctggtgagcatccagttcgacccgaactcgcggaagttctacgaccgcaaacgcgccgaaggcaaacgccacgtccaggccgtgctcgccctcgcccgccgacgcgtcaacgtcctgtgggccctcatccgtgaccgacggtgctaccaagtcacaccgcccgtcgcgactgcggcttgacttcagcattgggaa

SEQ ID NO: 677 - DNA, 1474 bp, unidentified
  source 1..1474: mol_type = unassigned DNA; note = element_0937032
  misc_feature 1..2: note = core
  misc_feature 3..229: note = LE
  misc_feature 230..1459: note = CDS
  misc_feature 1460..1474: note = RE
  misc_feature 59..228: note = bridgeRNA
agcccctcacccgtgaacggacccgctgcgcatgaaacacactctgtgtacagtacgccgcgtgtgtcggcacagaggtcggcctatcagtggtgccctgagcccgtatatcagtcggacccggagccccgcgagcaccccagactgcgtccaccgggtccacccggagagcgcgccttctagacttcgatcctgcgggctcctcgctgacacgccgtgaagggtggtcatgatggaagtactgtatgcccgctgcgccggactcgatgtgcataagcgtaccgtggtggcctgcgtgcgcctggcagcgagtacgacggtgcagcaggaggtgcggacgttcgggacggcgacgcgcgacttgctggcccttgccgactggctcaccagccatgggtgcacgcatgtcgccatggaatcgaccggcgtctattggaagccgatttggcacgtactggatggtcagtttgcgctcatcctggcgaatgcgctccaagtccgcagcgtgccgggtcgtaagacggacgtcaacgatgccatgtggatcgccgacttgctcgcgcatggattgattcggggcagctttgtcccgcccgccccgattcacgaactgcgggatctgacgcgaacgcggaagcagatggtccgcgaagtcgcgcagcacacattgcgtatccagaaggtcctcgaagatgccaatctgaagctcacgagcgtgctcagcgatgtcctcgggatgagtggccgcgccatgatcgaggccatcattcggggcgaagcggaccccgaacgcctcgccgacttgagccaagggcggctcaaagcctcccgcccggcggtcgtcgacgcactgcatgggcgggtgacggcgcatcatcgcttcctcttgcgcctgcatctgacgcacatcgacaccctggagaccaccgtgcgcgaggtggaggcgcgcgtgggcgacgccctcatcccgtttcaagccgccgtcgaccgactcatgaccatccccgccgtgcgccacaccgtcgcccgcgtgatcgtcgcggaaatcgggctcgacatgacgcggtttcccacggccgggcacctggtgtcttgggccggcctctgtccacgtctcgacgagagcgccgggaagcgacgctccacgcgtacgaggcccggtgccccgtggctgaaaaccgcgctggtccaagccgcgtgggtcgcggcccgcacccgaaacacctatcttcgcgctcagtttcttcgtctcaagagtcggcgcggccctaagaaagccatcctcgccgtggcgggctcgatgctcaccgcggcgtactacatcctgaaaaacgaaacgacctatgcggaactcggcgctgactacttcgaaaggcggaacaagacgcaggtggcacgccgcctcgtcaaacgccttgagtccctcggacttaccgtggagatcaagcccgcggcgtgacacctgtttctttct

SEQ ID NO: 678 - DNA, 1609 bp, unidentified
  source 1..1609: mol_type = unassigned DNA; note = element_09379ed
  misc_feature 1..3: note = core
  misc_feature 4..292: note = LE
  misc_feature 293..1468: note = CDS
  misc_feature 1469..1609: note = RE
  misc_feature 46..271: note = bridgeRNA
actcgtattatatagtagtagtgtttaaagaccctctccaaggtctttatgctattcctttcatagtcactctttaccttttctacaggtatggctatgatatttaagatgctgtggattggtgtttcctcgctaccacttgatggtttcagaaagtgtccaaccacagtctctttgtttgattgttaatcagttagataccgcatgacggtttatttagaacgagttcacaactgcgaagagcacctgtggttctaaaacagtatcaattttacttctaaggagaatttctatgatttacattggtattgatgttgcaaaagacaaacatgattgctttatcactaacatcgagggggaagtgcttttcaagccctttaccattcctaacaatttagatggatttaacgaccttttccaaaagatttgctctgtgtctgatgatttttccgaaataaaagtaggactggaagctaccggccactataatttcaatcttctggggtttcttgttgataaaggtcttcccacctttgtcattaatccgttacatacaaatctgtatcgtaaaagtcttagccttagacagacgaaaacggataaggttgatgcccatacaattgctcttatgatgatgtccggagtaaacttacagtcctactcagacacatcttatcacaacgaagaactcaagtcactaacacgataccgttttgataaggtaaaagaacgggcaaagctgaaaacttccatttcacggctcgtaactatccttttcccagagctggaaacgctggttccatccctccatctggtttctgtctatactttgctggctgaatttcctggcgcgtcagccattgcacaggcacaccttacaaggctttctcacctgttggaagtggcctcgcgcggacgctatggcaaagaaaccgccattctgttccgtaatgctgccagacaatccattggcttgaatctgcaagctaaatctttggaattgaaacataccataaaactcatcagggaactggatgacgagattgctgaaatcgaagcttctatcaaatccattgtagatgctatgcactcaccaattctgtctatacctgggatcagctaccggatgggtgcgatgatacttgcagaaatcggtgatttcagccgttttaactcccctgataagatacttgcctatgccggactatccccatccacttaccaatcgggacaactcgacagcagttattcccatatggaaaaacgtggttcccgctacctgcggtatgccttgtttaacgcgacaaaatttgtctgcatatgggatgacacctttgctgcctatcttgccaggaaacgtgcagagggaaagcactataacgtagccatatctcacgctgctaagaaactggtacggattatctaccagttagaaaaatcagggcaaacgtatcatcgagcggcttagcgcctggcatcatatctcctttttgagcaccggaaacgatgctctatttgtcatgcagttttcaaggtactgatttatctgaattgcgcttccgcaattcagataaaaaaattcattttagtcttgacttttaatagttag

SEQ ID NO: 679 - DNA, 1535 bp, unidentified
  source 1..1535: mol_type = unassigned DNA; note = element_093b78e
  misc_feature 1..2: note = core
  misc_feature 3..246: note = LE
  misc_feature 247..1425: note = CDS
  misc_feature 1426..1535: note = RE
  misc_feature 3..225: note = bridgeRNA
cttgtataatgaactcatagtaaattcatcatacttttcctttcttaaaataatttactataataacataagacgctgtggattagttacatcacctatagctagactattttttcgaggatataaccacagctttatgcttatttgttaattagttagataacgcatgacgttttatatagagcaaggatacatttagcataaagtgagtggaacatagcggactaaactagaaggagtgttcttatgatttatattggcatcgatgtagcaaaagagaagcatgactgctgtatcgttgattcagatggtgttattattaacgattctttacgtatatccaattctcgtgaaggctttgaaatactctattcaacaattctctctgctctgcctaacaaggatatttctaacgtaaaaataggacttgaatcaacaggtcattatagcactaatctacaaaactttctgtacgctaaaggcttcaagctcttcattcttaatcctttagctacaaatctcttccgtaaggctcagacacttaggaaaactaagactgacaaaacggatgcactagttattgctaaaatgctcttttctgatgatacaaaatcctattcaccagtatcatatcaaattcaagagctaaagtcactaactagacatagatatcgtttaatcggttatagaggaaaattaaaaatatcagtaacaagattaatagatatcattttccctgaattacctaaatacgtttggtcaattcatcaaaattcctcttattgcctcctatcggagttacctagtccgaaggatgttgctaattgccatctcactaagcttactaatattttaagtaaagcttctagaggtaaatatggaaaagataaagctatcgatttaaaagaagccgcaggcagttcaattggaactagcacaagatctttatcttttgaactacaacaaactattaggttaattcaatcagttcaagctgaaattgatgctttagaccttcaaataaaagaagtcgttaccgagattaattctccaataatgagtatcccaggtatttcatacactctagcagctataatactttctgaaattggagatatagaaaagttcacaagtccagctaaacttttagcctttgctggattagatccttccacctatcaatcaggtaaatatagtgcttcttatacaccgatggtaaagcgtggctctacatacctccgctgggctatacttactgcatctagaactgtttcaatgagagattcaactttctcatcatacttatcaaagaaacagtcagaaggaaaacattactatgttgccatgagccatgttgctaaaaagcttatacgtgttgtattttatcttttaaaaaccaataccgcatttgttccgcaaatgtaatcctaacttttttaaaagggcaactcagttgctttatttgtcatgcacttttttaaaaaactaaaaatattactttcctcttaaaattatcttgacttcatatagttagt

SEQ ID NO: 680 - DNA, 1422 bp, unidentified
  source 1..1422: mol_type = unassigned DNA; note = element_0940796
  misc_feature 1: note = core
  misc_feature 2..121: note = LE
  misc_feature 122..1144: note = CDS
  misc_feature 1145..1422: note = RE
  misc_feature 1184..1422: note = bridgeRNA
aattgaaatgaacgcgtcccacccgtgaacgtgagagcagagtgaagtggatcctcacgggccaacggcatcgatgtgcccacgtggaaaatagaatttttccaggcaaccggaggatccagtggtcaattgtgcggcagtgggtgtggacatcgccaagaacgtgttccaggtgcattacgttgatcgggaaaccggagagatcgtgaacaagccgatcaagcgagcaaagtttctcgagttctttgcaaaccgaacggcttgtgtgattggcatggaagcgtgcggcggtgcccaccactgggcccggcaactgaagaagatgggccatgagatcaagctgatgccggcggagttcgtgaaggcattcaacatccgcaacaagaacgatgcggcagacgctcgtgcgatttggttggccgttcagcagccgagcaaggcggtcgcggtgaaaactgagatgcagcaggcgatgatggctctgcaccgaatgcgcgagcagttggtgaagttccgcacgatgcagacgaacggcttgcgcggactgctgacggaatatggcgaggtcatgagcaaggggcgggcgaagctggatcaggaaataccggtggcatttgagcggatcgcagagcgcctacctgctgcgctggtcgacacgttgcgcgagcagtggagcggactggcaaagctggatgcacagatcgtggagatcgaacgccgaatgcacgaatggaagaaggaagataaggcggtcaaagcgatcagcgagattcccggtgtcgggctgctcacggcaacggcggcggtcgcgatgatgggtgatccgaaggcgttcaactcggggcgcgaatttgctgcgtgggcgggtcttgtacccaagcagaccggctcgggcggcaaggtgaatctacacggaatcagcaagaggggtgacacgtatctgcgcacactgttgattcacggcgcacgagcagtgttgtcgcatgcgaaggagcccggcccgtgggtcgagcagatcacgaagcggcggccaaagaatgtcgtgatcgtcgcgctggccaacaagatggcgcggacgatctgggcggtactcgcccatgactgcccatatcgaaaggactacgtaagcgcgaagccggtctgaacagcttacgcgaggtagaagatcaacgtttaacacagggtgaacgtcgaaaggttgcgcagcaatcgagtgtgatgacaagccaggtaggaccgggactcgctaaacctgtatatcgcgacgagcttcaagctcgctaggagaatgaggtgcgagtcagcgaatttcataggggcccgcagcggcagtaccgactgcaacaaggccggatatagagctgcagcccatcctgtcagtctgaacacacgaaaactgttgcaaacgggacgcgttcatat

SEQ ID NO: 681 - DNA, 1433 bp, unidentified
  source 1..1433: mol_type = unassigned DNA; note = element_094289b
  misc_feature 1: note = core
  misc_feature 2..134: note = LE
  misc_feature 135..1055: note = CDS
  misc_feature 1056..1433: note = RE
  misc_feature 1192..1432: note = bridgeRNA
atgatatgaacgtcccccacccgtaagtccggtggggaagttgaagaaagggtggatcctcacgggccgacggcatcagagtgccaaaggtgggagatcatggcgatttcccaaggcaaaccggaggatccgtagtgaactatacgacagtcggcgtggatatcgcgaagtccgtgatgcagttgcattgggtggagccggagaccggcgaaatcatcaacaagccggtcaagcgggccgcgtttctcgagcactttgcaaaccgcgcgccttgcctgatcggcatggaagcttgcggtggcgcgcagcactgggcgcgccggctgattgagatggggcaccaggtgaagttgatgccagcgaagttcgtcaaggcgttcgtcatgggcaacaagaacgacgcggcggatgcacgtgcgatctggatggccacgcagatgccgggcaagtcggtggcggtaaagaccgaagcccagcaggccgtgctggcgctgcatcgggttcgtgagcagaaggtcaagtaccgcacggcgcaggtcaacagtcttcgtgggctgctgaccgagtatggagaggtgatgggcaaaggccggagcgcgctggacaaggcaatgcccggcgtacttgagacgttgacagagcggctgccggcgatgctgatcgactcgctgcgcgagcagtggaacgggctgacagatattgacaggcagattgccgacatcgaacgacggttgaaaacctggatgaaagaggacaaggcgtgtcaagccgtcgcagaaattccgggtgttggcctgctgaccgcgactgccgcggtcgccacgatgggcgatccgaaatcgttcagatctggacgcaagtttgctgcctgcatcggaatagtgcccaggcagacgggaacgggcgggaaggtccagctgggcggtatcagcaaaaggggtgacacgtatctgcgcacgttgctgattcatggtgcccgcagcgtgctgtcacacgcgaaggagcctggcccgtgggttgagcagatcagcaagcgccggccaccgaatgtgtgaccgtggcgctcgccaacaagatggcgcggaccatctgggcggtgctggcccatgaccggccgtatgaaaaagggcatgtgagtgtcaagccggtttgagcggtttgcactccgtggagattcacttttaacacaggatgatacgtcgaaaggttgcggtggcaatcgtatgtgatgactaaacaggtaggaccgggactcgcaaaacctgaatcgttccaagggcttcgagctcgctgaggaaatgaggtgcgagtcagcggatttcataggggcccgcagcgtatcaggctgcaagaaggccggatataaagctgcaacccatcctgtctatgtcggaacacacgaaaaaccttcgcaaacgggggacgttcatata

SEQ ID NO: 682 - DNA, 1587 bp, unidentified
  source 1..1587: mol_type = unassigned DNA; note = element_09475c8
  misc_feature 1..2: note = core
  misc_feature 3..261: note = LE
  misc_feature 262..1470: note = CDS
  misc_feature 1471..1587: note = RE
  misc_feature 29..281: note = bridgeRNA
ttagtaccataaaagtgtaagtgtaaggcatttcattagtgctttaacatttgcacttatttttttataataagggagtaattggtctggcgaggggctttttgggttattacatccgtcacaaaaacagtcagccatcccttattataaacattcgtttaagcaagttgaaacggtaatgctttcgtgtaaagaactaaaatgaattgtaataagtgtgaatggtaaacaattacgattaaaattttgggaggattgcaaatgattagcataggtattgatgtgtcaaagggtaaaagtatggtatgtattttaaagccttatggagaggttattagttctccatttgaagtggaacatacagaaacagctatgcatgaattagcgacaatgttgcttaaatttgatgatgaattaaaggtaattatggaagctacaggaatatatcatcttcctatattgacttatttagcagataaaggcatatttgtatcggttattaatccatatgaaatgaaaaagtatcgtacgcagggattaagaaatgtaaaaactgataagcaggattcaataactatagctaattatggcatagaccattggtttagattggaaaactatagatttacagatgaactgtactgtgagttaaagctcttaggcagacagtatatgcactatatgcgtatgagagtagaaagtttattaaatttaacacatttattagactatactatgccaggaataaatgaattgttgaatgggtggaatgaaacatcaaacaaggataagctttcagattttgttgaaaaatattggcattatgacaatattataaaaatgagtgaagaggagtttataaaagaatatgctgaatgggcaaaaagaaggggataccatacaagtcccaaaaaagcaagcaagatttatcagagggcgattgaaggtatccctacactttcttccaataccccatctaccaaaatacttgtactggaagctgtcagagttctacgagaagtagataacactctgtataagattataacacaaatgcagggattagccaagatgctaccagaatattctgtggtaagaagtatgggaggagttggagatatacttgtagctaagcttatagcagaaataggagatgttaaaaggtttcacaacggtaaggcattgatagcttatgcaggtatagatgcaccaccatatcaatcaggtaaatttgtaggaacacaacgcaaaatatctaaacgtgggtcagctacattaagaaaaataggatacgaagttatgaggtgcttaaaaacacataaaccaaaggatgatgtggcagtatatgactttatagtaaaaaaagaacaagaaggaaaaacaaagaaatcagctaaaatagcaggattaaataaatttttaaggatttattacgcaagagtttcggaggtatataagaacttagaatgattgaaagtttacacaaatttaagaaagaccagttttatgctggtcttgttgtgatgcaacaaaatatataaaaatttttaaaaattaaaaaataagacttgacttttcttagcaagt

SEQ ID NO: 683 - DNA, 1439 bp, unidentified
  source 1..1439: mol_type = unassigned DNA; note = element_094e3da
  misc_feature 1..3: note = core
  misc_feature 4..44: note = LE
  misc_feature 45..1169: note = CDS
  misc_feature 1170..1439: note = RE
  misc_feature 1206..1439: note = bridgeRNA
aaatgtaatgaacacatccctccattaaagtgaggagcactgtgatgaatgaagaggtatatctgaaggtgtggagcctcacagatttccggcatcatagtgcccaatacgggatgcataaagctccctcagactggagactccacagcatgaaatatacaccggttggcgttgatatcgcaaagcatctgattcaggttcacttcatcaatgagcacacaggtgaagtggtcgataagcaactgcagcgtcaggattttctgacattcttcagtaaccgggaatcctgcctgattggcatggaggcatgtggaggatctcagcactgggcgcgagaactgcaaaagctggggcataaagtccggctgatgcagggacggttcgtcaaagcgttcgttatgggcaacaagaacgacgtgatggatgcccgcgctatctggatggcggtacagcagccaggcaaggcgatagccgtaaaaacggaagagcagcaatcggtattggttctgcaccgttcgcgcagacaactggtgaagttcagaactgcacagattaacgcgctgcacggaacattactggagtttggcgaaaccatccataaaggccggtcagcgatggacagggagctaccggcagcactggagcggttgaaaacgaagctgccgccgtatctcatcacggtgctggaagaccagtaccacaggctgaatgagctggacatactgatagatggccttgaaaagcagcttatcagcgtggcgcggcagaatgaaacctgtaaacggttgatggatatccccggagtgggaccgttaatcgctacggctgcgattgccaccatgggagaagcatcagcgtttaaatccgggcgtgagttcgctgcgtatgtcggtctggtgccgaagcaaactggctcaggtggaaaagtccgtctgctagggattagcaagcgtggcgatacttacctcaggacattattcatccacggggcaagggctgcatctctgcgcgcaaaagaacctggtccatggataacagaactcaaaaaacggcgtccggcaggtgttgctatcgtggcaatggctaacaaactggcaaggacgatatgggcgattgcagcccatgagcgccaatacgataagaatcatgtcagtatcagaccgtattaattgtttatacctataaatattaaattttaaaaatagtgaatgccaaaaggttgctctggcggccagcgtgatgacaaagacaggtaagaccgggactcaccaaacctgaatatagtgttgggcttaaagcccgtctgataaataaagcgtgagtcggcggattacataggggctcgcagctttaaggctgcaaaaaagccgaatataaaactgcaacctaccgtcaatgtcaaaacaatggatgccgttgcaaacgggatgtgttcatat

SEQ ID NO: 684 - DNA, 1379 bp, unidentified
  source 1..1379: mol_type = unassigned DNA; note = element_095e39a
  misc_feature 1..2: note = core
  misc_feature 3..87: note = LE
  misc_feature 88..1116: note = CDS
  misc_feature 1117..1379: note = RE
  misc_feature 1142..1365: note = bridgeRNA
gatggggtggatggctcccgctcccggcatccaggtgccaaaacgtggttgctgtcaaaagcgccacaatgagggaagccatccgccatggagattagcacaatcggccttgatctggccaagagcgtttttcagattcacggagtgagtgacgcgggtgatgtcgttgtccgcaaggccttgcgtcgatcgcaggtgctgccgtttttcgcgaagttgccgccgtgcctggtcggcatggaggcgtgcggcacctcgcatcactgggcgcgcgagattctcaagctgggtcacgaggtacggctgatgccgccggcgtacgtgaagccgtatgtgaagcgcggcaagaccgacgctaatgatgcggaggcgatctgcgaggcagtcacgcggccgacgatgcgcttcgtaccggtcaagtcgcccgagcagcaggccgcgctggcactgcaccggacgcgcgatctgctggtcaagcagcgcacccagctggtcaacatgatccgcggactgcttgccgagtttgggatcgagatggcgcgaggactgcaccacgcactcgcgctggcgaagcgactaacggagggtcatgcggcggacgtgccggcgctcgcgcagcgcgtcgttgcaagcctcgcacggcagatcggcatcttgcaggaggaactggccacgctggagaaggagctgctgacctggcatcgctcgagcgagctgtcgcagcgactggcgacgatccctggcgtcggcgtgatctcggctacggcgcttgcagcatcagtaagcgagcccgagcgcttccgatccggccggcagtttgcagcatcgctcggcctcacaccgctgcagcaatcgagcggtggcaaggagaagatgggacggatcactaagatgggtgaccgctatctgaggcgcttgctggtggtcggaatgacctcgctcgtacggcgggcgagaaccgcaccggaatcggtggatccgcgcatcccggcgatgctggagcggcgtcccgcccgcgtcgtcacggtcgctgcggccaaccgcacggcccgcatcgcctgggccatcatgaccaggggcggcagctaccgcagaccggcagcagcaatcgcatgaatgactagctgaggagaccagctcaacgaagttgtgaggacgatgagaagtgatggcgcaccggtcagaccgggagccgggacaacccgcgctagtgtcgaggcaatcaaaagcctgcaaagcagagtgggacccagctcgcggataccatcagggccagcggtcgcgagaaacgccgcattaacaggccggacacaagactgcacccgaccagccgtcagaacgtcaaatcgtcgcttgcaacgcgggagccatccacacaa

SEQ ID NO: 685 - DNA, 1568 bp, unidentified
  source 1..1568: mol_type = unassigned DNA; note = element_09620de
  misc_feature 1: note = core
  misc_feature 2..250: note = LE
  misc_feature 251..1444: note = CDS
  misc_feature 1445..1568: note = RE
  misc_feature 6..225: note = bridgeRNA
tcgtattatgaggttagccagttatatttctggttgacctcatatttttattggtcttattctttaggtagccggggtagaacgtaagggccagtgggacttgatctcgtccgcaaaactgttcaccctctacttgtagaaacatgtgtgaggctggttgggacgtagatctcgtataacaagcgaagaaatgacactacaagggaaattagaggtaccggcaatgagatagtgagagggagtgttaagcatggatccagtcattggtctggatattgcaaaaggagaaagccaagttcaagcctttttacaaaggaaacatccatacaaaaagagttttaaatttgaacatcatttagagggtctagatgtattttacaagttttataaagagatagaagcagagactggaaaggatccggttgtcatttttgagtctacaggtcattatcatgaacctatcgtgcaattccttgaaagggaaaagatcgtctatatcatggtgaatcctattatttctcatggagctaaaaaatcgagtatgcggaaggtcaagacagatgctattgatgcttcccatttatgtgagctgtactataaagaggatttagaaccttatcataagaagagtattcaagttttgaatctacgtaatttaactaggatgcacgatgcgataactagctcttatgtgcagatgaagttacaatttctagctactttagatcaagtatttccagagtacaagaaagtgtttagcgatacgtattctagggtttctttaaggacattatatttgtttcctactgcagaaaaggtgttaaacaaagatgttaatgacttggctgaggaaatgaaagggaattgtcaaaagaggtcttataaatgggcattaaaaaaggctgaagggttaaaggaggctgctttaaaggatccttttcaaaagaatctttatgacagcaacttagtcagtctaaaaatgtatattaatcttttattagaatatcaggcgcatttatcaaagttaaaagacgagatagatactttagcaaatgaaatagaagattaccatatcattcgttctatccccggagtaggagataagattgcggcaacaatcatctccgaaattggggaaatagaacgcttttcgcatccgaaaaaactagtagcctttgcaggtatagatccaagggttcatgaatcaggcaagtttaaagcaacatataaccgaataactaaaagaggttcaagtagactacggcaaatattatatagtgctgtattatgtggtttaaggaattctcgaaatagtaaactaatagcattttatcagaaaaagcgagaagaaggtaaaccacacaaagttgccatgattgcttgtgcaaataagctcactcaatggattttctacattttaaaacgtaaagaggattttagataaatatttactaaaagaccatgatcttccaacagttttaggaaggtctatttggtatgataaaaattattataacacggaaatttatttatttttaaattaattcttgacctcctagtagctggta

SEQ ID NO: 686 - DNA, 1356 bp, unidentified
  source 1..1356: mol_type = unassigned DNA; note = element_0970db8
  misc_feature 1: note = core
  misc_feature 2..72: note = LE
  misc_feature 73..1104: note = CDS
  misc_feature 1105..1356: note = RE
  misc_feature 1106..1346: note = bridgeRNA
tatgggatggcccgccccttttccccggcatcggatatgatgctggtgcttgaagaggaaaggagcggaccgatgtctattgtgatccttggcgttgatttgggcaagaatgcctgcagtgtggtgggcgtggatgcggcgggagctgtcgtcgtacgcaggtcgatgcgccgccagacgctggtcgactacgttgccaagcttcctgtgtgcgtggtcgcgatggaggcatgttgcggtgcccattatctggggcgcctgttcgccgcgcacggacatgagatccggctgatgtcgccggagtacgtacggccgtatgtcaaagcacagaagaacgatgaccgcgacgccgaggggatcgccgaggccgcctcgcgtccaacgatgcgcttcgtcgaactcaagacccaggagcagttggacatccagacgctccaccgggttcgctcgcgcctggtggctgagcgcaggagcctgaccaaccagttgcgggcgatcctgctggagcgcgggaccattttcccggttgggcggcgcaagctggaactcggcatcgatgccctgctggccgatgaggatacgaccctgtcaccgcgtctgcgccagttggtggccgaactgcgtgccgaatggcgcgaactcgataccagggtggaagcgctaaacggcgagtttgtcgagctggcgcgcaatgacgcggctgcccggcggctcacatccatccccggcgtcggggtgctgaacgcaactgccctgattgcagccgtgggcgatgccagcagctttgccaaagcccgagacctgggtgcctggctcggtctggtgccccgtcagcatactaccggcggcaagccgcggctgctcggcatctccaagcgaggcaacacctacttgcgcaccttgctcatccacggtgcccgagcagcattgccgtcgctggcgcgaagcgagaccccgttggggcgctggttgacaggaatgatcgagcgaggagtccaccgcaatgctatcgtcgtcgcgctggccaacaagctggcgcggatcgcatgggcggccttgcgcaaggacgcgacgttcgaacgcggctacccagtcgcggcataaccggatcggccgcacgcatcttcgtgcataggccaacgatgtttgcaggaaggatcgtgaagatggcctgacagtcgatcggcgtctggaaagcccggccaaaaaaatggcactcgttgccggcgtctttattgtggctccagacgtgcggatgtccatcttggccatggggtcacccatgagaccgcatacgttgacgcagactgatcagaacacttcaaaatcccccttgcagacggggcgggccatacg

SEQ ID NO: 687 - DNA, 1554 bp, unidentified
  source 1..1554: mol_type = unassigned DNA; note = element_09808c5
  misc_feature 1..4: note = core
  misc_feature 5..515: note = LE
  misc_feature 516..1448: note = CDS
  misc_feature 1449..1554: note = RE
  misc_feature 46..262: note = bridgeRNA
tcacgtataattaaaaccatctcgaaaggggtggttttaattatttctcctttcctcgaaaagttatattgcaggagtagctacctgctttataatcagaacaagcactgcggatttgtatctatagaattacagctcagactgtttgggggtgactcagaccgcagtggtttgtctgaattggtgattagttgggtaacgcttgacgttttatttgcgtgaatacatggacaagccttctgtggaaacagcagtgctaaaatacaaacaagaggaggaaaccatttgtactttgtaggaatcgacatttcgaaattcaagcacgactgcaccatcattgatgaacttggcgatgtcatcacaccctcgtggtcgttccagaatgaccgcgagggattttctttgcttagggaactgcttgatgccctcgagggagaaaagaagatagggcttgaatctaccggccattatgggcaaaacctaaagctgttcctcgaaaacaacggcttcttttcatggagttcaattcgcttctggtcaaccgatttgttcgcagcaaatcgctcagaaaaacaaagacggattccataggcgctctcatgatagcccaatatttgatgacggtagagtacaagccctatccaccgtcattttacacgctcgaaaagctaaagtcactaacaagatttcgagacagtctgattcggcagcggagcaagcaattggtggagttaactaacgtcctagacaaggtcttccctgaattcaagccctttttcaaaggaaaattatcagtaacagcgttgtatattctttcccattacacttcaccggagaaaatatccaacatgaattccaagtcctatgaatcactgcgacgcctttctcggggtaaattctccatggtggattttgtagaactcaaaactctggccagaaatacagtcggttcaaccagagattatctgcttcaggaaatggagatcatcatcgacatctacaaccaattgcaaagcaaggtggaggaagtcgagcagctgataaacgactgcgtcctcgtgcttgatccacccatgctgaccattcctggaatcggtgtgtcctctgcagccgttatcctttctgaattcggggatctttccaaatttgacagtccgtccaagttgctttcctttgccggactggaacctggatattttcaatccggcatttcggaaagcgtgggcaaaatggtaaagcacgggtcttctcatttgcgctacgccattatgaactgtgctcagacggtaattaataacgagccaacatttgctgcctactacgccaagaaacgcgccgagggtaaagaacaccgcatcgctctgacccatgttgccaagaaacttttgcgggttatttatactctccagacgaaagaactgccctataacccggatctcattcgctgatccataaccagtttgtttttgaagtcctcggaagagggcttggtttcgtgcaccctttttgaccagataaaaattcttcaatttcctcttgacttcttatagttgg

SEQ ID NO: 688 - DNA, 1403 bp, unidentified
  source 1..1403: mol_type = unassigned DNA; note = element_0989c3d
  misc_feature 1: note = core
  misc_feature 2..78: note = LE
  misc_feature 79..1134: note = CDS
  misc_feature 1135..1403: note = RE
  misc_feature 1164..1394: note = bridgeRNA
taatgggatggtccggccgtgctcctgccccactggcaagcgaaccttggcaggggcgccaaagtcaaggagcacgccatgtctcagcaactcaggacgacgatcaccgtgattggcatcgatattggtaagaactcgttccacgtcgtgggtcttgatcagcgcggcgccatcgtgctgcggcagaagtggtcacgtggccaggtggaatcacggtttgccaacatgccgccctgcctgatcgggatggaggcttgcgtcggggcacatcatctcagtcgcaagctcaagggtcttggtcacgatgcccggctgatgccagcgaagtacgttcgcccctattcgaggggacagaagaacgacttccgcgacgcggaggcgatcgccgaggcggtgcaacggccaacgatgaagttcgtggcgacgaagaccgccgatcagctcgacctgcaggcgctgcatcgggttcgagagcgattggtgagccagcgcaccggcatcatcaaccagatccgcgccttcctgttggagcgtggcgttgccgtgcggcaagggcagcgcttcttgcgcgccgagttgccgcgcatcctagccacgccccccgatgtcctgtcgccgcgcatggtgcgcgtcatcgaggacctggctggcgactggcgccggctcgatgagcgcatcgatggcttgtcgggcgagatcgaggccatcgcccacggggatgccggttgtgaacggctgatgagcgtcccggggatcgggccgatcatctccagcgcgatggtggctgcgattagcgccggggatgcattctccaaaggtcgcgactttgccgcttggctcgggctcgtccccaagcagatctcgactggggatcgcaccattctcggcaagatctcgaagcgtggcaatcgctacctgcgggtcctgttcgtccaggcggcatgggttgtgctgatcaagcccaagagctgggagcgccacgggctcaagccctggctcgaggcggccaagaagcggctacaccacaacgtgctcgccatcgcgctcgccaacaagctggctcgcatcgcctggagcgttcttgctcatggccggaacttcgaggcgaggaaaatcccggcagccacccaatgagctcgcgatgaggtaacccgaggcttctaacccgccgaggtctgcgagaggatgagacgagatggaggatcggtcttcccggcgcatgcgaacactggtgacccgaatggcccgttcgaggcctgtccgctaaagagctcgcacgcgcgctgatatccatgatggcccggagccaaatgcgctccaatcacaggccggatacattgatgcaagaccgcacatccgccagatcgacgaaaacctcttgcgacgcacggccggaccataca

SEQ ID NO: 689 - DNA, 1301 bp, unidentified
  source 1..1301: mol_type = unassigned DNA; note = element_0997e61
  misc_feature 1: note = core
  misc_feature 2..262: note = LE
  misc_feature 263..1255: note = CDS
  misc_feature 1256..1301: note = RE
  misc_feature 53..247: note = bridgeRNA
cctttggtctaaagataataattaatagcaattgttattgttgaaaacggggggtgcaggggggtgttaaaaactaaagagtttgtggataagttataaaaaaggcagggtgaacttttgtcattcctggtttttagaaccaatcgtcgtattagttccctgcctttttaagattgcccaaggcccagctagaataattccattgatttatcaaaggtgattggcaaaaggcaattaaattaattgatcaaaacacaaacgtatgaaaacatggaatgttgttttaggtgtcgatgtatcaaaaaagacggtcgatatctgttggtcggagcgtaagctgttcgttcacatcgataacaatagtgaaggattcggcaagtttaaaaaatggtgcaaaaccaacctgatcgatttacgggaaacgtttatcgtactggaatataccggcggttatgaataccgtttcatccagttttgcgagtcacagtctatagcttatcggcgggtgcctggactagagattaagcaatcgatgggtatgatcaggggcaaaagcgatagggccgacgcattccggatcggtcagtatggagaagataagatcaagcgtcttgaaccatctaagttgttggataataaaatcttagagcttaagaccttgctttcattccgtaaacgattggtacgggaaagtgctggatatcagagctctgttggtgagcggaaacatatgtatgaggtaagtaaccaggatatgatcgtccgtatatctaacgaaaaaagagatgccaattcggaatatatcaaggagctagaatcgcggatcatggaactgatcaaaagcaatgagcagatgtatctgaattaccggatcatcaccagcattaaaggcataggcgcagtgaatggttggatgaccatagcctacacggagaattttacaagctttcctgacgcgaggcactatgctgtatatgtaggggtgattccctttgagcatacctcgggaacaagtaaaaaaggacgaaggcgaacaagcaacctagcgcaaaaggaattgaaacaggaacttaaccaggcagctaaaacagctatgcagcatgaccccgaaatcagggcatacgcagagcgcaagatgcagaataaagaatatgggttggtgctaaacaatataaaattcaaactgatactacgaatgttctccttagtgaaaaggggagaaatgtatgttgaaaactatcgaaggtcagcttaaaatatcttttttaaattaaatttggaattgttcgaaacctagaata

SEQ ID NO: 690 - DNA, 1715 bp, unidentified
  source 1..1715: mol_type = unassigned DNA; note = element_09a16a5
  misc_feature 1..2: note = core
  misc_feature 3..333: note = LE
  misc_feature 334..1560: note = CDS
  misc_feature 1561..1715: note = RE
  misc_feature 30..307: note = bridgeRNA
ctcgtataataagtttcaaagttaataaatcaggtatcagcaggccctgagatgcccgtgatacaatagctgtaggacagcagggtcaagttctttcccccccctggtcgagccgcaaggctgcttcatttttagtcagttcccctgagctggaagttagctgcaaactcattggctgtttgccggaagcaaggccgccctttcagcagtgagggctatcgcattggccttctccggaatgattctgatacgcgaggttgcggatgctccggttatcatgggtatctcaaagtctgctggtctgaaatctccatgcgagtaggaggtgaaaatgtgaacccactatttgttggcattgatgtgagcagcagaaacaatgttgcctatctgatgaaaccggacggcagcaagcacagcagcttttccgtgcaaaacaaccttggcggtgctaaactgttgtcagagagaatcgtgtcggcactgcattccatgcagctctgcgatgtggtgattggtctggaggccacttccatctacggagacagtctggtttatgcactccgggaggatggcggcctgagccagttccagcggaagatccatgtcctcaatccgaagcaggtcaaaaaattcaaggaagcatatccagatctgccgaagaacgactgggtggacgcctttgtgattgccgaccatctccgtttcggccggatcggcaaggaggtctacatggacgattaccgctacaaagcgttgcggaccctcaccagagccagatttgacgtcattcaaaacatgacccgtgagaagcagcggtttgccaactacctgtttctcaaatgctccggcatggcccagaacaaggatattgcaaactccagcgcaaccaccatcgcgctcatggagcggtttgaaactgtggacgagctggctgacgccgatttggacgagctgacggcattcattaccgaagctggtcgtgggcggtttgctgactcggaggccgctgcaaaggcaatacaggccgcagccaaaggttcttaccgcctgcctaaaacagtgaacgataccgtcaaccaggcaatgtccgtctcaatcgcctctatgcgagctttgaaggcgcaggtcaaggttttggagaaagccattgagcagcagtttgaaattatcccaaacaccctgacatccattccgggtattggcaaggtctactctgccggtatcatcgccgaaattggcgatgtccgccgcttcaactcccaggcctccgttgccaagtacgccggccttgtctggacgcagcaccagtccggtgatttcgaggccgaacatacccacctgatcaaatctggcaaccgctatctccgctactacctgctggaagccgccaactccgtgagaagatgcgactccgagtttcggcgctactacgacctcaagttccacgaggtcaaccagttccagcacaaacgcgcactcgccttaactgccagaaaactggttcggttggtcttccgactgctgaaggacaaccgcctgtatatcccgccggagggctgagctgacgcttgctgctctgatgcataggccctgtttcaaaaatcttcaggggcagggtttagtttggtgttgcctttttgtttcctacatgaccgtttcggcacgcttttcctcagatttttcttctatcaccctcttgacttcataccattgga

SEQ ID NO: 691 - DNA, 1200 bp, unidentified
  source 1..1200: mol_type = unassigned DNA; note = element_09aa040
  misc_feature 1..2: note = core
  misc_feature 3..225: note = LE
  misc_feature 226..1185: note = CDS
  misc_feature 1186..1200: note = RE
  misc_feature 6..206: note = bridgeRNA
cttatgtcttgatcttatccgctccggcggagaagatccccgactgatcatcgggaggttaccggtgagcatcacccagccctggtgcccctgagcccgtgggagagattatgccccggtaacctgtttccctgtcgcctaaagaccgaacggtatcctgtgccctgagcacccacatataaggatggtccggcgatattattcataaggttacggagtaccatgatgaatcctgttcctgtcggcgttgatattgccaaactcaaatttgatgttgctgtcctgctgccaaatcagaagtacaaaaccaaaaaattctccaatacgtctgccggatgccgtgaattcctgaactggctggcgcgttttggcaactgccacgtctgcatggaagcaacaggttgctacagcactgaactggccaccctgctggccgataatggctgctgcgtcagccttaaaaacccggcacgtatccatgcgttcgcaagcactgaactggcccgcaataaaacggacaaaagcgatgcggcgctgatagcgcgctactgcgccctgcatcagcccgccccctggtatcctgctccgctgagcgaacggcaactgacggctctggtacgccacctgcgtaacctggaagagatgcgtcagatggagataaatcgtcttgaagcagcggatgaagtcattgttccttccctgaatgaacacgttgcgatgctggacgaactgattgaagaaacgcgcaagaaaatcacccggcacatcgatgacaacccggacctgaagcgggaccgggagctactgaagagtatccccggcataggagacatgctgagtgtgagcctgctggcgttcgcaggtaacctgcgacggttcagcgacagcaaggcactggtggcgtatgccggcctgaatccgcgtcgttgtgagtcagggatgtggaaagggaaaagcaggttgtcgaaagtgggccatgcagagctgcgcagcgcactgtatatgccagcggttgtggcaggaagatgcaatgaggtggtgaaaagcctgatggacaggcttgcagcccggggaaagacaggaaaagaacgcgtatgcgcaggaatgaggaaattactgcaactggcttatggtgtggtgaaatccgggcacaaatttaatgctgaaataccgcttgccggataaccggcaagacggtat

SEQ ID NO: 692 - DNA, 1396 bp, unidentified
  source 1..1396: mol_type = unassigned DNA; note = element_09ae6fa
  misc_feature 1: note = core
  misc_feature 2..65: note = LE
  misc_feature 66..1100: note = CDS
  misc_feature 1101..1396: note = RE
  misc_feature 1164..1387: note = bridgeRNA
taatgagatggtccgccgccgagtacgataaacggctcggcagtttcacataaggaggatcatctatgcgcatcgcatccattggcatcgatctgggcaagaccacctttcacctggttgcattgggagagcgcaacaaggttgtagttcgcaagaagttctcccgtgggcagctgctggcctacaccgccaacctaccgtcgtctttaatcggcctcgaggcatgcgccgggtcgcactttttgggcacggtgctgcgccagcagggacacgaggtacggcttatccctgcccagttcgtaaaaccctaccgaaagtcgaacaagaacgatttcctcgatgcggaagcaatcgcggaagctgtcaccaaggagaacatgcgctttgtgcagatcaagtcccaagatcagctcgatctgcaagcgatgcaccgagttcgggaccggctggtgcagcgtcgcaccgcactgatcaacgagattcgcggatttctgctggaacgtggcatcatcttcgcggctcaccccatccacctgcgcaagaacctccccggggttattgaagatgccgagcagaacctgagcccgcggctgcgctggttgctggatcggctatggcaagagtggaaacagatcgagagcgacgtgcaggcgatcagccatgagattgagcgcatcagtgatgaggatgtgcgctgccggcaactccgccagattccgggcttcggtccgctggtctccaccgccaccgtggccgccatcggcaacggagcggcctttcgccgcggacgcgacttcgcagcctgggtaggcgtcgtgccccgacagttctccactgggggtaaagcgagactgtacggcatcagcaagcgcggcaacatttatctgcgtcgcatgctgatccacggtgctcgcgcggtcctgtatcgcatcaagcatgacacgggaggattcgggcagtgggtgcaccggctcgcacagcgtgctccacgtaacaaagtcatcgtagccatcgccaacaagttagctcgcatcgcctgggcagtgctctctagtggcaaagattatcgacatcagccgctgcaggcggcagcagcttgaaacgacgctgcgctcaggaaaaacaaaacacttttcacgtccacgaagaagcttggaagtaagttccaccaaggtctgctgaggagagaagaagacgagacaacagcccaacggcgtgccggaaaacctggacgctcaaacgtgtccctagtgaccgagggattttgaaggaccgacacgcgcggatcatcatcgagtgcccggagagtgattctccactagaggccggatacatttacgcggactgtgccttcgccaacttcaaaacctcttgcagtctggcggcggaccataca

SEQ ID NO: 693 - DNA, 1382 bp, unidentified
  source 1..1382: mol_type = unassigned DNA; note = element_09b4eda
  misc_feature 1: note = core
  misc_feature 2..83: note = LE
  misc_feature 84..1115: note = CDS
  misc_feature 1116..1382: note = RE
  misc_feature 1141..1370: note = bridgeRNA
tgatgcagtggacggctcccacccgccggcatttaggtgccaaaatggtggttcattgaaccacagggaaacaggagccgaccatgaatgaagttatcaccatcggagttgatcttgcaaagaatgtctttcaggttcacggcgttgacgcggagggtggcgtggttttccgccgccagttgaggcgaagccagatgctgcctttcttcaagaaacagcctctctgtttggtgggcgttgaggcttgcgcaacgtcgcatcattgggggcgagagatcgaagccctggggcatcaggtgcgcttgatgccaccgcgctacgtgaagccgtatgtaaagcggaacaagaacgatatggcagatgcagaagcgatctgtgaagcggtgacccgcccgaccatgcggtttgtcaagatcaagacacaggagcaacaatccgtcctcatgctgcaccggacccgtcacctgtttatccgtcagcgcaccatgctgatcaatgccctgcgtgcccatctggccgagttcggcattgtcgcaggcattggtcgtaacgggctggagaagttgctggaggttatcgaagatggtgcggatgaacgagttccgtccacggcgcgtgactgtctcctggccttgcgtgatcagctcgaatttgtgaagcgtcagatacttgatgcggatcgccgcgttctcgcctggcatcggtccagtgaactcagtcgacgccttgatgacattcccggtgttggtcctctgattgcaacggcgctggcggcctctgtgcccgatcctcacgccttcaaatcaggccgtgatctgtcggcctggattggcctggtgccaaagcagcactccactggcggcaaggagcgcctcggacacatctccaaagcgggcaaccgttatctgagatcgctacttgtgatcggcgcgctcagtgtgatccgccgagccaagcaactaggttacagccgcaggccctggttgatgaagcttctggaacgtcgatcaacaaaggtggctgccatcgctttggccaacaagatcgcccgcaccgcctgggcgatgatggcgcacggaacggtttatcaggagcctgtatcgcaggccgtttgagacaagcgcgaaattctcgcgctgacgaagttggaaagggcaacagacgaataatgcacccagccggtcgatccgaagatcaggacaccccactttagccagtgcagcatcttgactgcgtgtttttgactgggacctgatctgcggagagcattatggccagcggccatgtaacagcgccgcatcaacaggccgaacacatggcagcaccgatcagctcgcattaaagtcaaaaaaaacccttgccaacagggagccgtccacaca

SEQ ID NO: 694 - DNA, 1361 bp, unidentified
  source 1..1361: mol_type = unassigned DNA; note = element_09b4f09
  misc_feature 1..2: note = core
  misc_feature 3..77: note = LE
  misc_feature 78..1100: note = CDS
  misc_feature 1101..1361: note = RE
  misc_feature 1076..1348: note = bridgeRNA
cgatggggtggacgccccccgacggcatcgacgtgccaaagtggaggtgttgagcacaccacttgagggaggcgtccgtgggcgacgttaccaccatcggccttgatctggcgaagtcggtcttccaggcgcatggcgcggatgcgtcaggcgaggtggtttttcgtaaaaagcttcgacgtgacgatgtgctggcgttcttcgccgcccagccggcgtgcctggtcgcgatggaagcctgcgccagcgcccatcactggagccgcgagctcgcggctctgggtcacgaagtgcgactgatcccgccggcctatgtgaagccgttcgtgaagcggcagaagaacgacatggccgacgctgaggccatctgcgaagcggcgcagcggccgacgatgcgtttcgtggcgaccaagagcgcggaggcgcagggcgcggcggtgatctttcgcacgcgcgacctgctggtgcgccagcggacccagctgatcaacgccctgcgaggtcacctgggcgagttcggctacatagcccgacaaggcgctggccatagcgcgcggctcgtcgaggtggtccgcgatcccggctcagacctgccggtcgaggcgcgggccgtgctgctcgtgatcgtcgaagcgcttgaggcgctccatgcgaaggtgtcggcgctggatcgggcgatcgccgcacgcgcgcggcagaacgaagtcgcgcgccggctgatgaccatccccggtgtcggtcctgtcgtggccaccgccatggtcgcgctggccccgccggcgagcaccttccggcgcgggcgcgacttcgccgcctggctggggctgacgccgcgccagcactccagcggcggcaaggagcggctcggccgcacctccaagatgggcgagcgaagcctcaggcggctgctcatcctgggcgccagctccgcagcgcggatcgctgcacggaccggggccaaggacccctggctggagcgcatgctcgcgcggaaaccgcggatgctggtgaccatcgcgctggccaacaagatggcgcggatcgtctgggcgctgatggcgcgcggcggatcctacagagctccggcccgggccgtgtaaccaccgtcgggcttgaggctgtcgaggaggcaggaaggtcgacaggaggtatggcgcaacgtcagtgagacaggaccgggaaaaccagtgaaatgtccgagcgcctcgagcgcgccttagcgggatggacctggtccgcgatctccatacaggccagcggccgtgtgcagcgccgcatcaaacaggccggacacacggaagcacctgactgcgcgccgcacctactcagaatcttcttgcatccgcgggggcgtccacaca

SEQ ID NO: 695 - DNA, 1582 bp, unidentified
  source 1..1582: mol_type = unassigned DNA; note = element_09b556e
  misc_feature 1: note = core
  misc_feature 2..248: note = LE
  misc_feature 249..1457: note = CDS
  misc_feature 1458..1582: note = RE
  misc_feature 6..226: note = bridgeRNA
tcgtattataggttcaaccagatctttctggttgaaccttttttcatttgcttagaggattaaggtagccgagtcgaacgcacctgcccgtgggacttgatcccgagcgctataatgttcacccctacttgtcatgaccatgattgaggctggttgggacttaagatcccgtataacaagcgatgctatggagcgacaagaataaatcattagggctctcggttaatctacaaaaagggagagattgaatgaatccagttatcggtttagatatatctaaagaagaaagccatggacaagcctttatagagcgtggaaaaccatacagaggaactttcaaattcgagcatactcaagaaggacttaagaaactgcttcaagttgttcaggacctagaacattcgtctagacaacgtcccatgcttattttagaagctactgggcattaccaaagccccgttgttcagtttctggaggagcatcactatctttacattgtcattaatccgctaatctcaaatcggctcaggaagtccaaccttcgcaaagtaaagacggatactgctgatgcttaccttttagcagaactttactacaaagaagaattcgagcctttcaagaagagaggcgttcagctgcttaatttgcgctatctaacgagacaatacgaggctctttcaaagatgtgcgtacagacaaaactgcaatttcaagcagttttagatcaagttttccctgcttataaaggtgtatttggggctatgtattctaatatttcacttcagtttttaaatgagtttccaacttcaaattcggttttgcaaacggatgaagatacactcaaagctaaaatgaaagagttgctttcttcaaaacgagggcggtccgaggactggattcacctacgtgttcaacggttactggatgcggctaaagaaaacccatttcagcgaaccatgtacgcaagtcacttggtcaatctgaaagttcttattagcctcattctccagtaccaagagcaccttgctggattggaacaaaatatagatgccttggctggagaaatagaagaatatgatttaattcagtcgatccctggtattggccataaaattgcggcaacaattttatccgaaatcggagaagtcgaccgatttgatcatcctaaaaagctagtcgcctttgcaggtattgacccgagtgtctttgcttcgggtaagtttacggcaactcgaaatcggataacaaaacgtggttccagacagcttcgatacgccctagttttggctgtccagtgtggtctcattcgctctcgtaatacacgaatcaaggagttttacgatcgcaagagagccgaaggaaagccgcataaagtagctcttgtcgcatgtgccaacaagctagttcattggctgtatgccatcttaaaaaacaagaagatgttccgtccagcttaataaaaatattggtataaccttccaacacaattatgaattggagggttatttgacatatttatttttattataccagatcatttataatcactttactgggaatcttgacaagctattagctggta

SEQ ID NO: 696 - DNA, 1339 bp, unidentified
  source 1..1339: mol_type = unassigned DNA; note = element_09ba0df
  misc_feature 1: note = core
  misc_feature 2..251: note = LE
  misc_feature 252..1301: note = CDS
  misc_feature 1302..1339: note = RE
  misc_feature 81..238: note = bridgeRNA
ctctaagtttgcgacatgaaaaaacaggattaaatctttttgcttactaaggttggcttattacctttgttgttaaaaggagagccagcctgcagggaagggaaactttgaatgaaacggggcttcaagcccataattcgctttagtcctccctgcacagttgcaaagacctgatagaaagttaaggcttcgagcctatttagagttttgagtccgttgcaactttagccggttcctgtaattgcaaagttatgaagaaaatttttattagcattgacttttcaaaagaaaagtttgatgcgaccatcatcaaggcggaagatttgagcgagatgctgtctgtagggcaccaagagtttatcaacaaagtttcaggctatcgtaagatgctccgttgggtggacagcctatgcggtgccgacacatgtgaggactggcttttctgtggcgagaatacaggcggatacagccagatgatgagcgactatctatattcaaaaggctatgatctttggatagagaatgccttgagcatcaaacgtgctttcgccatgaagcgtggaaagagtgataggtctgattcgctgatgatagccgagtatgccatgcgctatcaggacaaggcccgtctatacgagcccttgagcccagcgctctcacagttacgtgaggtattcctctaccgacacatgctcgtcaggcataaatgcagttttgaggttagacgcattgagaagcgcttcacgcaacagaagtcatccgcaaagacgatgatatcgcagagttctcgacacatattaaccgaacttaagcacgagattcaaaagtgcgaccagcggatacaggagctcttacgctcagacgaggaacttagtcgcatcttcggcatcattacttccatgcctggcgtgggaacgattaatgcggtgtgtctgatggtcttcaccaacaatttcaccaagttcgactacaacgctcgcaagatagcctgctactacggtgtggcacccttcgcccgtgactctgggaccagtgtgcactcggctcccaaggtagggtatttggctaacaagatgattaagtcgctactctcgcaggctgctttggctgccgtgaacttctgtccagctatgagcatgtattaccatcgactggtagacaaaggcaaaaaaccaatggtagcattgaacaatgttaagaataagatgctgacaatcatcacagcaatggtaaaaaacgactgcaagtatcagccagaatacatctctatcaatgctcgaagtgaaatgttaaataaatagttaaaatcaaaaaaacagaagaataataacatagaaag

SEQ ID NO: 697 - DNA, 1179 bp, unidentified
  source 1..1179: mol_type = unassigned DNA; note = element_09c43cc
  misc_feature 1..2: note = core
  misc_feature 3..213: note = LE
  misc_feature 214..1164: note = CDS
  misc_feature 1165..1179: note = RE
  misc_feature 18..190: note = bridgeRNA
cttgtatgtttattttggatgtatgaaaacatggtcaaagccaaacagggcggggtagaccgtaactaactcggtcgcagaggccgttcaatagcatgggtcatcccgtcctgcctcctcaagagctcgaacagttgcctgggttggataagcccgcatcattcgcaagaccgagccgtagtggaggcgtttagagaaaaggaggactcgattatggaagatgtgctcaccttcgttggcatcgacgtatccaaagcccggcttgatgtggcatcgcacccagctggtgccacgcagtctgttgccaacgacgaaacgggaatcaagaccttggttgagcagctgcgtgcgatcaaacctgcatcgatcgtgctggaggccactgggggcatcgaaaggtccgtggtgcgtgctctggttgcggccgagttgcctgtcactgtggccaatccgcgtcaggtgcgcgactttgccaaagctacggggcagttggctaaaactgatgttcttgatgctcagatcttggctcgctttgccgaggcggtgcgcccggtgctgcgtcccttgcctgatgaaatgactttggaactgcgggcgttgatcgtccgccgacgccaaatcaccgaaatgttgaccgctgagaaaaaccgactgagccgagcccctcgacgagtgcagaaacgcattgaggcgcacattcgttggctcgagggggaactggagcgctacgatgaggaccttgaccaaacgatccgtcaaagtcccatctggcgtgagcaggaagatctgctcaaaagcgtgcctggcatcgggtccgtcatcagccgtactatgctggccgagttgcctgagctgggcaacttgaaccgcaaacagattgctgcgcttgttggtgtggcacccctgaattgggacagcggcctgatgcggggacgccgcgtcatttggggtggtcgagctcatgtgcgcactgcactttacatgggtgctttgactgccagtaggcgtaatcccgtgatccgagacttttacaaaaggctgcgtgcggcgggcaaaaaaccaaacgttgctctggttgcctgcatgcgcaaactgctggtcatccttaatgcgatcctcaaacatcgcgttccttggcgtccagtggtcgctcagatctcttgaaaccggacacagttg

SEQ ID NO: 698 - DNA, 1582 bp, unidentified
  source 1..1582: mol_type = unassigned DNA; note = element_09c6b57
  misc_feature 1: note = core
  misc_feature 2..133: note = LE
  misc_feature 134..1456: note = CDS
  misc_feature 1457..1582: note = RE
tcgtattatgagatcagccagttatttctggttgatccctttttatttgggtttgaggattaaggtagccgggtcgaacgttcctgcccgtgggacttgatcccgagagctataatgttcacccctacttgtcatgaccatgattgaggctggttgggacacgagatcccgtataacaagcgatgctatggagcgacaagaacccttaggggctaccggtaaatctattcgtatagggagagatctaatgaatccagttatcggtctagatatttctaaagaagaaagtcatggacaagcctttttagagcgtggaaaaccgtacaagggaactttccatttcgcacatactcgagatggactggaggaactgcttcaagcaattcaagaagtcgaacatgcgtccagactgcgtcctttgcttattctagaagcaactgggcattaccaatgtcccgttgttcagttcctagaagagcatcgctatctatatattgtcattaatccgctcatctcaaatcggcttaggaagtccaatcttcgtaaagtgaaaacggatgctgctgatgcttatcttttgggagagttgttctacaaagaagagtttgaaccttttaagaaaagaggtgtgcaactgctcaatcttcgctatctaacgagacaatatgagtctctttcaaagatgtgtgtgcagactaaattgcaattccaagctgttctggatcaggttttcccagcatacaagggtgtcttcggagctatgtattcaggcgtttcactacgatttttaagtgaatttccaacctcatattcggttttgcaaacggacgaagaaacacttaaagctaaaatcaaagacatgctttcaacgaaacgaggccgttcaaaggactggattaacgagcgagtaaagcggctgcttgatgcggcaaaacaaaatcccttcgagcaaaccttgtacgctagccacttaataaatttaaaagttcttattactctcattcttcagtaccaggagcatcttgctgagttggaacagaacataaatgccctggctgaagaaatcgaagagtatgatttaatccagtcgattcccggtattggccataaaattgcggcaacaattttatcggaagttggagaaatcgaccgatttgatcatccaaagaaactagtagcctttgctggtattgatcccagtgtttttgcttcaggtaagttcaccgcaactcgaaatcgaattaccaaacgtggttctcggcagcttcgttatgcgctggttatggctgtccagtgcggacttatccgttctcgcaatatgcggatcaaagagttttatgaccgcaagagagccgaaggaaaaccgcataaagtagctctggttgcatgtgcaaataagcttgttcattggattcacgccatcttaaaaagtaaaaaggcatttcgtcaggcttaacgaaattatattggtataaccttccaaggcacagattaactggagggttatttggcgtgcctattttaactataccatatgatttaggttctcgttcctgggaatcttgacagctattagctggta

SEQ ID NO: 699 - DNA, 1587 bp, unidentified
  source 1..1587: mol_type = unassigned DNA; note = element_09db0de
  misc_feature 1..2: note = core
  misc_feature 3..217: note = LE
  misc_feature 218..1474: note = CDS
  misc_feature 1475..1587: note = RE
ctactacaataggattatggataaggtacatgacagccagtcatgtccatatccttcttattgctcaagctgttagaatgaaggggacaatggtatgactgcttcccacttggacttcgcgtccgtccggtagaatgtcagccagccctcattcgcagcattcgttttacgcaggtagatccattacgttcgtgtcaaccagtagttagaataagcaatgagtaaagccgaccttaccattgatcaaacaccaataaaggagaactcaatgaatgcagtaggtattgatgtatcaaaaagcaaaagcacaatcgccatcctccgtccattcggagagattgttgctaaaccatttgacgtgaaacatacattctctgacataactcatctaatcagccagttaaaaagcttaaatggtgatacaaggattgttatggaacacaccggcagatattacgaacccatggcacaatggctgtcagatgctggtttatttgtaagtgccgttaatcccaaactgataaaaaactttggcaataattcgcttcgtaaagtaaaaactgacaaggccgacgcactaaaaatcgcacgttacactctcgacaactggtgtgatttaaaaccctacaacagcatggatgaattgcgccgtcaattaaaaaatatgaatcgtcagtttgacttctatatgaagcagaaaacggccatgaagaataatctaatcgccctacttgatgaaacattccatgaaataaacaccttcttcgatagcccagcaagaaatgatggaagccaaaaatgggtggattttgctactacgttctggcatgttgattgtgtccgcaaacaatctatttcttcattctccgaacgatatcaatcttggtgtaaaaagaaaaaatataatttccagccccaaaagccaaaggaaatatatgaatttagccaagatcttatcgcaacactaccaagagacaacatgacaaaacttttgattaagcaagcaattgatcagctaaatatggcttcaaaaaatgtggaatcacttcgtctacttatgaaccagaccgccgccaagcttccagaataccctatagtattgggtatgaccggagtcggaacaacactgggcccacagttaatagctgaaatcggtgatgtgtcccgcttttcccacaaaggcgctctaacggcctatgctggagttgatccaggtgccaaccaatctggagactatgagcagcaaagtgtcagaacctctaagcgaggaactccacaactcagaaagaccttgtttctaattatggactcacttatgaagctggcaccgccagatgatccggtatacggatttatgatgaaaaagcgtgcccagggtaaagattattatgtttatatgaccgctggagcaaacaaatttctccgtatttattatggacgagtcaacgagtaccttgtgtcactgaccacttagaatcagttttttattctcttaatttacggccagcaatatttggtggctttattgtgttaccattttttcctattaaattttagaaaaataacacttgactttttctttgcagg

SEQ ID NO: 700 - DNA, 1412 bp, unidentified
  source 1..1412: mol_type = unassigned DNA; note = element_09ddd96
  misc_feature 1..2: note = core
  misc_feature 3..78: note = LE
  misc_feature 79..1125: note = CDS
  misc_feature 1126..1412: note = RE
  misc_feature 1124..1400: note = bridgeRNA
tgttgaggtggacggctcccaacggcatcaaatgtgccagaatgagttcgtcgaaatctcaatcgagggagaccgtccgtggaaaagattattcgcattggtatggatacgtcaaagagcgttttccaattgcatggcgtgaatgcaggcgagcaaccggttcttcgcaagaagctctcgcggaaggaaatggtgaagttcttcgagaaggcgccaccgactgctattgcactcgaggcatgtggcggttcgcatcactgggcaaggctattgagctcgttcggccacgaggtgaagctgatcgcaccacaactggcaaagccgtatgtcaaacgcggcaagaacgatgctgcggatgcagaagctttgtgcgaggcgatgagtcgaccgacgatgcgcttcgtgccgatgaagactgcagaccaacaagcagccttgatgctggtcggggtgaggcagaggttgctccacaatcgcacgcagcttgccaatgctattcgcggctttgcgatggagttcggtatcgtcgctgccaagggtatgtgccgaatcgaaccgttgttggagcggatcgccgccgatcagtctctaccggaactggcgcgcgagctcttcgccatgcacggtgaggaatatcgagatctgcttgccgaaatcaaaacagtcgatgagaaactgattgcgctgcaccgctccgatgaatgcagcaagcgtctggccgaaatcccgggtgtcgggccgatcggcgcatcacttttaatgatgaaggctccggatccgaagatgtttagatccggacgtgattttgctgcctggattggccttactccgaaagatcattctaccgccggcaaagtcaggcttggtgttattacgcgtgctggggatgaaatgttgcgaagcatattggtggttggtgcgacttctcttcttcagcacgtcagaacaggtcgcagcaggcatgcctctcgatggcttctcgagctcctgcaacgaaagagaccaaagctggtcgcggtggcgctggccaacaagattgcccgtatcgcctggaagctgatggtaagcggccaaccataccgaaaatcacaagacgtacagcagcccgctgggctgacagcatgacagattggccatcacgctgagcagcaacgaacgctagcgtgttgagctgataccgtgaacttgcaagaaagcagcagatgtgtgtgcgatcgatcgatccgagacgcgtgaaactccgttaagcccactggccataacaggtcggccctgtgtttggaactcgcgccgcggaaaccatcttggccagtggtcacgtgcgaccgcattcaaaggccgcacatatggaagcaagcgatccgatcaaaaatatctgcagaaaacacttgcaagcgggagccgtccacata

SEQ ID NO: 701 - DNA, 1111 bp, unidentified
  source 1..1111: mol_type = unassigned DNA; note = element_09e16fe
  misc_feature 1..2: note = core
  misc_feature 3..163: note = LE
  misc_feature 164..1105: note = CDS
  misc_feature 1106..1111: note = RE
  misc_feature 1..165: note = bridgeRNA
ccctgtgtctggaaagtctgtcatgatggcggtgggcgggaagccgttgggtccttggcgcttgacgccgtgagccggctcggtctcccgcccgttccatctatcaacctgaacagttgcacgaggctgcgccaacagacctcgcatcacagggacaggcaccgtgatcataccccttcgttgcgtcggaatcgacgtctccaaacatcatctcgatattttcgatgaggccatcggtgtatcggaacgcatcgacaacgcgacacaggccatcacacagctggtggcgcgttggcgatgcgatgcgctggtcgtcttcgaggctacgggggtctatgacctcgagcttcgccaggcgctgcgtcaggccggggttcgcttcgcccggatcaatccggctcgtgcccgcgactttgcccgcgccagcggccaactcgccaagaccgatccgatcgatgcacggatgctggcggcctttgcccgcgccatgaaacccgccaccgagcaggccgctacacccgcccgcaacgcattggcgaggctggcgaaacggcgcgaccaattggtcgccatgcgcgcccaggaaaagaaccgctgcagcgaagccgaggaccgcgccatggcggaacgcatcggtcgcctcatcgaggtcctcaatgacgagatcgtcgaaatcgaggccgagatcagcgcgctcgtcaaagccgagccggagcttgcggacgacgcaaagctgatgcgctcggtgcccggcgtgggacctgtcgcctgcatgcaactccttacccagatgcccgaactcgggcatctcgggccgaaggaggtggccgctcttgccggccttgcccccttcaacgtcgatagcggggcttaccgtggcaagcgcaagatcggcggcggacgaaagcgcgtccgcgacgccctctatatggcagccctcaacgccgtgcgtcgtgccgatcgctttaagatcttttacgagcggctccgcaacgccggcaaaccggccaagctcgccctcatcgctgtcgcaagaaagctgctgaccgtcctcaacgcaatgatgcgcgaccgaaaaccctatacaatcgccccatcaacataacagttg

SEQ ID NO: 702 - DNA, 1601 bp, unidentified
  source 1..1601: mol_type = unassigned DNA; note = element_09e72c7
  misc_feature 1..7: note = core
  misc_feature 8..379: note = LE
  misc_feature 380..1591: note = CDS
  misc_feature 1592..1601: note = RE
  misc_feature 146..377: note = bridgeRNA
ctcattggttaacctcagcggttatccacaggcgacgcgcgggcgcctcacacgcaaccgagcgcgcaagcctgtgggtaaccgcgtgcccgcagtccatgggattatggcttcggcgcgcaaacacttcgattcgagcgttgacgaatgcgaagccctttgatgggctgatggacagacttccgtgcaccttctgcgacagccttagtcgctggccgctcgacggcccaaatgagacccgctgcgcagaaggggccggaaggctcagacggcttacaggatgttgcgccaggcagctgaagccagagcgcctttcaatgagcttgccgcccggccttccggcacgcgaagtcttactccaacaccagggagattgtccatgacttcgttttcttactttgccggcatcgactgggccagccagtcgcacagcgtgtgcgtgctcgatgctgccggccgcgtcgagctgcgcctggagatcgcgcacagccaggagggcatcgagcggctgatccgccagctcaagagcttcaccggcatcgtcatcgcgatcgagcggccttcgggcctgctcgttgacgcactggtggaagcaggccttcgagtcgtgcccatccatcccaacgtgctcaaggcctcgcggtcgcgctatcgcggcgccggcaagagcgatcccggcgacgcctacatgctcgccgatgtgctgcgcaccgatggccaccgcttccgagccctggagcctcagagcgacgagatccgggcgctgcgcgcgctggtgcgcacccgcgacgatctggttgccgagcgcgtggccctcgccaatcagctgcgaagcctgctcgagtccttctggcccggcgccgccgaaatcttcagcgagatcgactcgccgatcgcgctcgccttcgtggcccgctaccccacgcccgacagcaccacacgcttgggcgagaaacgcctctctggcttccttgcccagcatagctactgcggccgccgcccggtcggcgtgctccttgagcgcctgcgtgtcgcccccaccggccgcgccggcgagctggaggccgaagcgaaaggcgagctcgtgcgcagcctcgcctcgatcctcgagcgcctggtggccgagctcgccaagctcaccgcacgcatcgagcacacggtcgccagtcttgctgacggccagatcgtcatgtccttcccgcgcagcggccgcatctgcgccgcgcagatcctcgccgagctcggcagcgtgcgtgagcgctttcccaatgaagcacagctcgccgccgaagccggcgtcacaccggtcacctacgaatcgggcaagcatcgcagcgtcgtgttccgctttgcctgcaatcaccgcttgcggcgcgcgatcacttgcttggccgatcagacgcgacatgcccatccttgggccgccgacgtctatcagcgcgcgcgctctcgcggctgcgaccacccccacgccattcgcatcctcgcgcgagcttgggtccgcgttctgtggcgagcttggttcacccgaaccccttaccagccgcatctgcatcgcagcgccgcggccttcactgccaccacgggttgacacaggatgt

SEQ ID NO: 703 - DNA, 1576 bp, unidentified
  source 1..1576: mol_type = unassigned DNA; note = element_09eff79
  misc_feature 1..2: note = core
  misc_feature 3..275: note = LE
  misc_feature 276..1205: note = CDS
  misc_feature 1206..1576: note = RE
  misc_feature 16..244: note = bridgeRNA
ctggtatattgtaattgacttatttaactgtcaattatgtataccttttcctttcgttaaattttatttagaattgaattgtgaatgtgtacttttatattttatcactgtagcttgactacctaggataggttactgccacatctttgtattttaattgtaatcagttagataagtctttgagcttgtatttcccaccaggatctttgatactctgtttgtggtttgatcacatatcactaacttatatactttaaagaaaggatgtgctttttatgttttacattggtatcgatgtcggcaaatttaatcactgtgcctgtgttgtctcttctgaaggtgaagttcttattgaacctttcttctttcctaataatcttgagggctttcagtcgtttatcaaaaccgtcaaaaaatataaatcacccaggcatattgttggtttagaagccactggtcactatggtgataatcttgtcagttttctagtaagtcacgattacgaggttgctttaatcaatccattgactactgatgctaagcgcaaatctaaaatccgtaaaaccaagaatgataaaaaagatacttttcttatctgttccgttctctttgacagagactatactaaagtcactcagcgtaaacttgatatgaaacaggctcgagaattaacccgttatcacgcctcaattactgaaggtatcaaccaaaagaaaaatcaacttcaaaaatgtattgatatcgttatacctgagtttaattcatggtttaaaactaagtattccaaggcttatatggctgttttaaaagaatttggaagttcttataatttagccagtgccaatcttgctcatcttaaaaaagttctcaagcctaaaagcagtggaagccgtgtggatatagatgcatcaactcttcgtgataatgcaaagaaatctattggcgaaaataacgaggttattactcttgaaatcaaaatgcttattgaaaatattgaacttttagccagccagcttaaaactgtagacaaaaaaatagaagaattagccatcaaactagattctcctatcttctcaattcccggaattgggatatattcgggaatgtctattttaagcgagattggcaatatccataacttcagctctgctgtcaaagtaatgggatttgcaggtgtagaccctggtacttatcagtccggttaatacagtgctcctcaaacagcattatctaaacgtggttcgcgctatctaagaaaaagtctataccagtgcatccttgcagtatgcaaatacaatctcactttcaataagtattataaactaaaacggtcgcaaggtaaatcccacagatgcgcccagggccattcagtccgaaaacttataagagtaatctataaactgttatctgaaaacatactgtttgatgaaaaactgctcatttaaaaacattgaattgaatatttttaaaatgctgcataaagcagtagttttcagtgtacacaaaattcacttttcaaagatctaaaaaatatttcagctaattatcaaaaataacttgatttatatatagttag

SEQ ID NO: 704 - DNA, 1169 bp, unidentified
  source 1..1169: mol_type = unassigned DNA; note = element_09f1a10
  misc_feature 1..2: note = core
  misc_feature 3..203: note = LE
  misc_feature 204..1166: note = CDS
  misc_feature 1167..1169: note = RE
  misc_feature 3..179: note = bridgeRNA
cttgtatgtttagacttgaaggggtgggcgggactaaaagctcgattccgactctagccagtacggaccgtgggagacttctcgtcccgccctttctacctaaagcgccgataaggaattcatcggtaaaaccgacgatagaggcaagccagcgctacggtagaccccgacaagctcttaaaccctagctccgaggattcgtcatgacaatccttacctcgccaacggtgattggtgtcgatgtggccaaagccgaaatcgtcgcttatcgcgaagatctgaaaaacattcaggtcatcaacaacgaccgtacgtctataggtcgttggctgaagaccctgcccgcacaaagctcgatttccctggaagccactaatctctaccacctggatacggccgaactggcctatggtatggggcatcgggtttacgtcgtggacccttaccgggtgagccattaccgcgaaagcatcggtcagcgtgcaaaaaccgacccttgtgatgcacgtcttctggcgcgttatctaaccagtgaacagcaccggctgcgggtctggagcccaccaccacggcactacacggtgttgaaaagtctgcttaacaagcgtgcgcagctgatgaaggcccgagtcagtatcatgctgagctggtcaaacgaacctctccttgaagatcttttggcccatgggttggagcatttcaaacagcttgatcaggccattcaggaattacttcgcaaagtcagccaagaggccggcattagcgaaaacatcagacgctgcaaagcgattgaagggattggtgaactcacggcaacgggactggcaactacgtacatgcgaggtgagttcgccagcgccgatgcgttcatcgcctttctgggaatggatttgaaggcaaaggactcaggcaagaaacacagtcctcgccacttgagcaaaaaaggtgacggggaattacggcgtcttgcacacaatgcagctatggcagcttgtcggtcccctgtttggaaaccgttctatgaatcctatctggcaagaggtctagccagaacccaggccttggtcatcctcgcccgtaagctttgccgggtggcattcgccctcatgaaaaatcagagcgaataccaacccaatttaaggttgcagggttcccctgcaacatagaat

SEQ ID NO: 705 - DNA, 1472 bp, unidentified
  source 1..1472: mol_type = unassigned DNA; note = element_09f1b8f
  misc_feature 1: note = core
  misc_feature 2..248: note = LE
  misc_feature 249..1457: note = CDS
  misc_feature 1458..1472: note = RE
  misc_feature 19..234: note = bridgeRNA
cgttactttattgagagtccttcatcggtgatgattggactgtcggccagctagtcctggcatggtgtcttgcccctgtctaaccaatgatccggggggtgttgccaccagggctagtcggcagtaagtgattgctgattaggggctcggcaccgacattggatgcctgtcgtaacgtggatgtaagactcactgccggtggttgaccgacaccaaaattgaacacaccactgcaacggaggaccgtcgtgatcaacgaagacatcgacatattcctaggcctcgacgtcggcaagaccgatcactgggcctgcggcgtcgaccggcaaggaaagcaactctggaaccggacgctacccaacgacgaaaccaaactcgtcgagctctaccaacagctctccgcgaagggccaggtcctggtcgtggtcgatcagcccgcaacgatcggcgcgctggccgtcgcggtcgcacagcacttggggttgccgatcgcttacctgccgggtctgtcgatgcggcggatcgcggacatgtatcccggcaccgcgaagaccgatcagaaagacgcgttcatcattgccgaggccgcgcggaccatgcctcacacgctgcgcgcgttgaccgtgagtgatgaggacgaagccactctggggatgttgaaggggttcgaccaagacctggcccggcaaatcacccaaaccagtaaccggatccgcggcttgtacacgcagatccacccacccttagaacgcgtgctgggaccctggctggaccacgacgccgttttggcggtggttgctgcatggccgacgcccgcacaattgcagcgtgccggacaagcgcggatcgctgcgaagctgaagaaacacggtgcccgtcggcacaccgcgtgggctggcgagattatgaccgcgttgaggaagcagaccgtcactgtggtcgggaccgaggccgcggcgatggtgctgccgcacttggcgaatcagctggtctcgttgcacgcgcagcgcgctgatgtcgcggccagcgtggagcgaatcgtggagcagcaccctctttatccggtcctgacctctatgcccggggtcgcggtcaggaccgcagcgatcatcatcgccgagacctctggcaagaccttcctcaccgccgcggcccttgccgcctacgcgggcctggccccgaccacccggcagtccggcacatcgatccgatccgaacgagtgagtcattccgggaacaaacgactcaaacgcgcgctgttcctgtcggcctttgcatcgatccgttccgacccgatcagtcgcgactattacgaccgcaaacgcgcccaaggcaaacgccacaaccaagccctgattgcgctggctcaccgtcgatcgacagtgctgttcgcgatgatgcgcgatggcactctctacgacgcaccggaaccccgaccgctggcattagctgcttgacaaatcacatagggg

SEQ ID NO: 706 - DNA, 1338 bp, unidentified
  source 1..1338: mol_type = unassigned DNA; note = element_0a0255b
  misc_feature 1..2: note = core
  misc_feature 3..74: note = LE
  misc_feature 75..1094: note = CDS
  misc_feature 1095..1338: note = RE
agatgggatgaagagtggcgtacctttccggtacgtgctcgaggcacagatattccatccgaggaaggtacgccatgcagacccacataggagtagatctacatcagcgattttgctatttgacggcagtcgatgcaagcgggaagcggttgaagcagtcgcaggtggccaacgagggagcggcgctgcgtgcgtggcttcggcagttgcctgggccgcgccaggtggtggtggaagcgagcgggttctggccggcgtttgccagagcggtcgcgccggaggcggacaagctggtgatggtgcatccgcagcgggtgaaggcgatcgccagcgcgcggctgaagaacgataaggtcgattccgagacgctggcgcatctgtcgcgggccgatctgctgcccgaggcctggatggcgaaccaacggacgcagcagaccaggctgctgacgcggttgcggatcacgctgggccagcagagagccaaggccaagaaccagttgcaggcggtgctgcatcaggaaggctttctgaagccggtctcggaagtgttcggcaagaagggccgggagtggctggcggggttggcgctgagcgaggctggacgcgtggtggtcgaggtctggctgaaggtggtcgatcagatggacgccgcgatcctggaacaggagacggcgctgaggaagatggcggaggcggatgcgcgggcacggtggctgcagacggtgccgggcatcggggcctactcggcgatggtgatcctgggcgaggtgggcgagatcgaacggttcggcacgaagagggcgctggccagctacgccggcttgacgccgagcgtgcgcgagtcggcaggcaagaggaagcgaggcgggatcggacatcacgggtcgggcacgctgcgatggatcatgctgcaggtggcccaggtggcgtgccgacactcgcccgcggcacgagcctggtatctgcggctgaagcagcgaaaacccgcgcaggtggcgctgatcgcactggcccgcaaactgctcaccggggtatgggcgctgctccggcacggagtctgcttcgacgagagcatcttcgcccaacgaggttagaagcacaggcaaagaagaaaaaaccgcctgtaaagtaaaagagttttaccgccggtgtttgcgacggttgcaaggtagcccggccagctcgctcatcctctgtgccacgagaaaaacctcaggagcacatcctcagatggagcggccgggaatcgaaccccccttgtgtgcccagagcacgaatagaagactgtacgcaatctattcgcaaacacctctggacaaccgcgccactcttcataga

SEQ ID NO: 707 - DNA, 1611 bp, unidentified
  source 1..1611: mol_type = unassigned DNA; note = element_0a0299b
  misc_feature 1: note = core
  misc_feature 2..278: note = LE
  misc_feature 279..1490: note = CDS
  misc_feature 1491..1611: note = RE
  misc_feature 13..298: note = bridgeRNA
cctgttacaataaaattacggttgaagacacggcagacagccgtgtcttttatcgacttgttgccagaactgctagaatgagagagcaatgggcctgacggtgcactccaaggactttgcgtccgtttttaagtcagtcagccattctctcattcgcagcgttcgatttgtgtaggtagagccaccatcctggtgcgttcgtgtcagcaaacagatagaatcggcaatgaggaagaatggtccgccaaattgtaaattctgtgataggagtgttgaatatgaacgcagttggtattgatgtctccaaagggaaaagcatggtttcgattctccgtccctttggcgaagtggtggcaaagccctttgaggtgcgccacaccgccagcgaactcaggcagctggcaaactacctgaaaagcctgaacggtgaaacgagggctattctggaacacaccgggcggtactatgagcctgtagctctgatgctctacgacgccggtgtgttcgtcagcgcggtgaatcccaaactgattaaggactatgggaacaattctctccgcaaggtcaagactgacaaagccgattcccggaagattgcccggtatggtcttgacaactgggtggaactacgtcaacatactcctatggatacgattcgttaccaactgaaaaccatgaaccggcagtacggcctgtactccaagacaaaggtttccatgaagaacaacctcatctccctgctggaccaaacctatcctggtgtcaacgcctttttctccagccccgcccgcgaggacggcagccagaaatgggtggactttgccgcgtccttttggcatctggactgtgtgcggggcataatcctcgccgcttttacagagcgttaccggaagtggtgcaagcggcacggctacaacttcaacagcggaaaggccgctgagatccacgaaaacgctaagaaccagattgctatgcttcccaaggacgctatgaccaagctgcttatccaccaggccattgaccagctcaacgccgcctccaggacggtggaattgctgcgcacggagatgaaccgtctggcacagcagctcccagaatatcccgtggtcatggccatgggcggtgttggcaagtccctcggcccccagctcatgtctgagattggggatgtgacacgttttgcccataaaggttcgctggccgcctatgccggcgtggaccctggtgccaaccaatccggtacgcacgcggccaagagcacggcttcttccaagaccggctctccagagttgcgcaaaacactgtttctggtgatgagcgtcctgctccagacctcgcttgtggatgacccagtgtatcagtttctggacaagaaacgcgccgagggcaagccctattacgtctacatgaccgctggtgccaataagtttcttcgcgtctactacggcagggtcaaggagtatttagcatctctggaaccgactgaataatctctacctcctcttgcatcaggccggcgctttagcggtggcttttttgtgttacccttttttatcacctttctacacctgcaaatacttctcaatctttgcttgactttttatttgtagg

SEQ ID NO: 708 - DNA, 1152 bp, unidentified
  source 1..1152: mol_type = unassigned DNA; note = element_0a0ae4b
  misc_feature 1..2: note = core
  misc_feature 3..204: note = LE
  misc_feature 205..1140: note = CDS
  misc_feature 1141..1152: note = RE
  misc_feature 12..210: note = bridgeRNA
cttgtcttatgaaggatctggcttctgggtgattggaagccactgcccgccacgccatttatggcgggcagtggcggcggtcggatcgcaatgggctaggtcgatagggaccgtttgtgagtttggtcgaccgccgtcttcaccaagggcctgaacggatacgcgtgtttgcggcacgcatgacaagcataggacacggcgaagatgactgaatataccatcggcatcggcatctcgaaatcccatctcgacgcctttcggcaggaagaccaggcgacacggcagttcgagaacacacccaagggcatccgggccctgatctgctggctcggcaagtcgccggtcgcccggatcgttttcgagcctaccgggccgtatcatcgggccctcgagacggcgctttcggggaagtttccgttggtcaaggtcaacccgctgcaagcacgccgctttgccgaggcctgcgggacgcggacaaagacagatgccgtcgatgcgcgcagtctggcccggatgggggccgccctgaacttggagccggacgtaccgatctcagaaaaccagcttgttctcagagatttgcaggtggcacgcacggcgctggtgaaggaacgcacgcgtctgcgcaaccgcagccatgtccaggtcaacccggtcctgaaacgccagatcaaggcgcggcttacgcttgtcgagcggcagcttgccgagctcgatgccgagattgcacgccatatcgacagcgatcaggccttgcaacgcaagcgtgagatcctggggtcaattcccggcctcggacccatcgcggcggctctgatcctgaccttcctcccagaaatcggcaccctcgatagaaagcaggccggaagtctcgccggccttgtcccccatagccgcgaatccggtcagtggaagggaaagtcattcatcagcggcgggcgtaaacccctgcgtgatgcgctctacatgcccgctcttgtggccatgcggttcaacccagacctcaaatcaaaatataccgcgctccgagaggcaggcaaaccggccaaagtcgccatcgtaaccctcatgcgcaagctgctcgaaaccgcaaacgctctcgtgaaagctgatcgaacttggacgccaaaatcagcttgatcaaaacggata

SEQ ID NO: 709 - DNA, 1444 bp, unidentified
  source 1..1444: mol_type = unassigned DNA; note = element_0a0d538
  misc_feature 1: note = core
  misc_feature 2..245: note = LE
  misc_feature 246..1244: note = CDS
  misc_feature 1245..1444: note = RE
  misc_feature 33..231: note = bridgeRNA
cttttatttttgcagtcggaaaagtttagattaactttgccaataaaagttaattgtttaaccataaaaccgagagaggccggtgacctttggctgcgcctagacaatatccagttgccgtattagtccgacctctctttttttgattgctcgctccatctataatacttggtgtctgctgcaagaccgaccaactaaaagtgtcaggggcaatcgagacggtttttaaaaccagtgcaaagataatggatttaatccacattggcatagacatttccaagaaaacattggacttgtctatctacggacgagagaggaggaacagcggatttctccatgtgacaaacgacaaaaaaggattcagcaagattctgtcttgggtaaaaggtctaaagattcagctttcccaggtttggttctgtatggaacatactggtgagtatgggtacgccctggctttgttcttcgatgagcatggtataacctattctatggtgtccggagctgacatcaaaggggcaaatccaagcaagaagggcaagaacgacaagcaggacgccgctatgattgcccggtatgcgcatgagaaaagagactcgcttgctccatcgcacttgaacatccgccctctgtatgagttgcgctgtctgctgaacgaaaggcggatgtatgtgcgccaacgtgctcaatggaaggcacaacgctcagagcggcgcttgttttcgacaaaacacagagactctcgcgtcaacagagcaatcaagactctttctgccactatccgagagatcgaggaggaaatcaggtctgtcattgccgtgaacgaggacatacggcgtaattttgagctgatcatgagtattccaggaatcggactgatcaacgcggtcaactttattgttgctacagccaacttctccactttcaacaatgccagacgctatgcatcgcacatctgtgtggctccatttgccgtcgtgtcgggaacaagcatcaacaagggcacacatacgagtaagataggcagacatgatttgaaaactgagcttcgcacgacagttctcgcagtactgaaggccgattctgaaatgcgcaaatacttcgaccgccgcaaagctgatggcaaaaaatataacgttatagccaacaacatcatgttcaaactgatatgtcgggtttttgccgttgtccgaaggggaacaagatttgttgagacccataaatatctgcaaaaaaaggaataggctaaacggacatatcacagagattgcctctgcgccaatggtgcagagcgactcagcgtgcataaacaaaaaatattatgaaaaacaccgaggggagcgccaagcggcaagggggcgagcagcccccgtcgagcgtccacaatcaattcattcaatttcacatttattaaccgtcaaatgcttgtgcatttcctataata

SEQ ID NO: 710 - DNA, 1343 bp, unidentified
  source 1..1343: mol_type = unassigned DNA; note = element_0a1490e
  misc_feature 1: note = core
  misc_feature 2..121: note = LE
  misc_feature 122..1108: note = CDS
  misc_feature 1109..1343: note = RE
  misc_feature 1117..1337: note = bridgeRNA
gaatgaaagggacttcccctactcgaagcgggccgtagctcgcacggcatcggagtgccaagattgaattgcacatcttcaatctgaaacgagaggggaagtcatggattagattactaccgtggggatcgatctggcaaagagcgtgttctcgctgcacggggtggacgctgcgggtcgggtggtgctgcggcgtacggtgcggcgcgaccagctggtggcgacggtggctggtttatcgccttgtctgatcggcatggaggcatgctccggagcgcacgagtggggccggcgattccaggcgctggggcacaccgtgcggctgatggccccgaagttcgtggccccgtacagaaagagcggcaagaacgatggcaacgacgccgaggcaatctgcgaggcggtggcacgcccgagcatgcgctttgtgccggtgaagtcggtcgagcagcaggcgctgcttgcgctgcaccgggtgcgtcagggattcgtggtcgagcgaacggcgctcatcaatcggctgcgcggcctgatgtcggagttcggggtagtgttgccgctacgctcgatcacggttcgccgccaagcctcggcgggcgccgaggggctgcccgagctcgcgcgccgggcggtcggcgatttgctcgagcagctgcgggtgctcgacgagcgcatcggcggctacgaccgggagatcgaagcccaggcgcgcctgtcggagcccgcgcagcgcctgatgaagatccgtggcatcggggccaccaccgcgctggcgatcgtcgccacggtgggcaacgcgcgggagttcaagaacggccggcagttcgccgcctggatcggcttggtgccgggtcagtactccaccggcggcaagccacgcctgggccacatcagcaagcggggcgatgcgtacctgcgcaacctgctcgtgcagggggcgcgctcggtgctcaatagtgccgcctctcatcaagaccacatgtcgcgctggatcctcgatctgcagccgcggcgcggctactaccgaacgctcgtggcgatcgccaacaagaacgcgcgcatcgcctgggcgctgctcgccaagaacgagacgctgcgcgcggcctgaacattcacggcttccacgactgccatcgacgatgacgaatcggccacaccggcgcccggagaacctgatcaaacacgacggcgaaatccaatgccgactaacgagcgaggaccgggcgtgcggctttcatcagggccagagcatccattgctcacaaacaggccggctatagtgacgcagtccgatcttccatcgtcacaaccgctaccgttgcgacagcggggaagtccctata

SEQ ID NO: 711 - DNA, 1340 bp, unidentified
  source 1..1340: mol_type = unassigned DNA; note = element_0a16753
  misc_feature 1..3: note = core
  misc_feature 4..77: note = LE
  misc_feature 78..1100: note = CDS
  misc_feature 1101..1340: note = RE
  misc_feature 1084..1330: note = bridgeRNA
tgatgatgtggacgcccccgcactgaccggcactgctatggtggtggtctcagcatgtgggatgaggagcgttcgagatgacgattgtgaccatcggattggatttggcgaagaacgtatttcaggcgcatggcgttgatgaagaaggaaatgcggtgctggccaagaagctacatcgcaagcagatgttgccgtttttctcgaagctatccccgtgcctgatcggcgtcgaggcttgcggcacggcgcactactgggcgcggacgctcgccgcgatggggcacgaagttcgcctgatcccgccggcctacgtcaaagcctatgtcaagcgcggcaaaagcgacgcgctcgatgccgaagcgatctgcgaagccgtgcaacgaccaacgatgcggttcgtgccgacaaagaccgttgaacagcagggcatcttgatgactcaccgcgctcggtccctgctggtgcgtcaacgcaccatgctcgccaatgccttgcgggcgcatctggcggtgttgggtctggtcgcgaaccctggcatcgccaacctcgcgaagctggcagagcaggcgatggccgacaaggatgccttgccgccctatgcccggtcagcactggagatactgatccgccagatcatgacgatcaacagcgaggtcgccgcgctcgaccagcaactgatcgcctggcatgccgcgagtgaggccagtcgaaggcttgccgcgataccggggcttggcatcatcacggcaacagccatcgccgccaccgtcaccgatccggatcagttcagatccggcaggcagttcgccgcgtggcttggtctgacaccgcagcagcactcgacgggcggcaagactcggctcggcggcatctcgaagcaaggtgaccggtacctgcgaaggttgctcgtcgttggggccacagccgtcatgcgccacgttaaggacaagccaacgccgatggccgactggatcaggaagctcagcgagaagaagccattccggctcgtctcggtggcccttgccaacaagctggcccggatcgcctgggtggtactgacccgcaaggagacatatcacccctacgcacatttggcctgatcacccaggtcacccgaaatggtagtggcagtcgatgatgagtaacgatcgagccaatggtgaagccaacccgtctgattcaatgcgcttcaacgcgcgagagcctgtttagggacctcaccggcggatttccatcagggccagcggcagcaacaatgccgcacaaacaggccggacatatgaaagcaaccgatcaaacccgtcgcgacacaatgcccttgccaagggggcgtccacata

SEQ ID NO: 712 - DNA, 1389 bp, unidentified
  source 1..1389: mol_type = unassigned DNA; note = element_0a1ce01
  misc_feature 1: note = core
  misc_feature 2..87: note = LE
  misc_feature 88..1119: note = CDS
  misc_feature 1120..1389: note = RE
  misc_feature 1170..1381: note = bridgeRNA
taatggaatggtcgcccctttctgatctggcatcgaagtgccaaagtggagatgcaattcaaccaccgatcgaaaggagcgaccgacatgaagattacgacagctgggatagatctggcaaagaacctgcaacaggtgtatggcgtggacgaacgcggcaaggcggtgctcaagaagcaactgaagcgcagtcaggtactttcattcttcgtgaaccttccgccgtgtctgatcggaatggaagcgtgcggcagcgcgcatcactgggcgcgcaagcttcaggagctgggacacacggtgaagcttatggcgccgcagttcgtgaagccgtatgtaaaaacgaacaagaacgatgtggcggacgccgaggcgatctgcgaagcagtgagccggcccaatatgcgctttgttccgatcaagaacgccgagcaacaggcggtgttggcgctgcaccgtgcgcggcaagggtttgtgagagcgcgtactgcacaggcgaatcaaatccgcggactcttgggcgagtacgggatcgttattccacagggaatctgccatatcagcaaacgcctgccgggcatcctcgaggacggcgagagtgatctgcccggtatgttccgtcagttgctgcaacgactcggtgagcacctgaaggaactcgatcggcaagtgggcgaactggaactgcagatccagctttggcaccgagagcacgatgccagccgcaagttggcgcagattccgggaatcggtccgatcacggcgagcgccctggtggcctccattggcgatgcgaagagtttcaagaacggacggcagctggccgcctggctcggcctagtccccaggcagcactccactgggggcaagtccacgttgctgggcatcagtaaacgcggtgacacctatctgcgcacgttgctcattcacggcgcaagatcggtgattcgcgtggccgagggtaaagtcggttatgcagagagctggcttgcgcgactgatcgggcggcgccacccgaacgtcgtcgcggtagctctcgccaacaagaatgcccgtatcgtctgggcgttgctcaagcacgaacgggactatcaacctgattaccaaccttcggcggcttgaacccgcgtgacggtacgccctgacttaacgaattgagataaagagaaactccaccgattgctcaggcaatcaagacgtgatggcaagaccgtggcaggtcaaacctatttgacacagggagcgaaaagctcgtgaggctgatcaggaacctgccagcatattccatcagggacagcggcatcgccgcaccaaagtccggatgtatggctgcaatctttaccttcttgccgttatgcgactgagtgcttggcaaactggggcgaccatgta

SEQ ID NO: 713 - DNA, 1347 bp, unidentified
  source 1..1347: mol_type = unassigned DNA; note = element_0a23330
  misc_feature 1..2: note = core
  misc_feature 3..84: note = LE
  misc_feature 85..1107: note = CDS
  misc_feature 1108..1347: note = RE
  misc_feature 1086..1334: note = bridgeRNA
tgatggcatggacgccccctttttccggcgtcggatgcgccatactttgaggcgtgttcacaacctcatataaaggaggcgtccatgacgcagattacagttattggcttggatttggcaaagcgtgtgtttcaggttcacggcgcggatggtgacggtcaaccggtgctgcgcaggaagcttcgccgcgctcaggtacggacattcttctccgaactgccgccgtgcctgattggtatggaggcctgtgcgagcgcgcatcattgggcccgtgaacttcaggtattgggtcacgaggtccgtttaatcccgccgcagtacgtgcgccctttcgtcaagaccaacaagaacgacgctgcggacgcggaagcgatctgcgaggcagtgacacgaccgacgatgcggtttgcaccggtcaagtcggcggaacaacaatcggttttgatgctgcaccgggctcgggaattgctggtgcgccagcggaccatgctgatcaacgcgcttcgcggccactgcgctgagttcggactgatcgccgcacaaggcatctccaaagtggttgatctgatacgtatcatcgatgacccggaagatacccgtcttcccgatctggcccgcgaggccctcggtctgttggtcgaacaactgaatgcggtgcagagtcggatcaaggcacttgaatcagaactcttggcttggcaccgctcgaacgcagcaagccggcggctggaaacgatccctggcgttgggatcattacggcgacggccctggtggcgacgatcggcgatggcagccagttccactcagggcggcaactctcggcctggctcggcctcgtgccccgacagcattcgagtggcggcaaggataggctggggcggatatcgaaacggggtgacggctatatccggcgtctgctcgtacacggtgcccgtaccgtattgcgctggcgccgggccaagccagataccgaggcgggatgggccgaacagctgttggcgcgacggccgaccaacgtcgtcctcgtcgccatggccaacaagacggcgcggatcgcctgggcgctgctcagacatcaacgcgattacatgccggcgacggcgtaactgaaagaaccaaattgcgagggtaactaggatttgatggcaaaacagggtgaaccgggagcgaccaaacccgaggcattgtccgagctcagagctcgctaatctgactgggcgtcgttccttcggattccatcagggccagcggtcatgtgccgcgtcaaaaggccggatacatgacttgcaaaccctatgcgcacatcaggtcaatcttccccttgcaagatcgggggcgtccataca

SEQ ID NO: 714 - DNA, 1596 bp, unidentified
  source 1..1596: mol_type = unassigned DNA; note = element_0a29990
  misc_feature 1..2: note = core
  misc_feature 3..264: note = LE
  misc_feature 265..1473: note = CDS
  misc_feature 1474..1596: note = RE
  misc_feature 11..284: note = bridgeRNA
ctattacaataaatttggttggaagtccggcagaccagccgggcttttttccatctcttgcccaagctacaataagaggaagcaactggttgaccgagccctccttggactttcatgtccgatacgaagactgtcagccatcctcttgttgtagcgttcggtttaagcaggttgagcctttgtgttcgtgtcaccaaatagattgaatcggcaatgagaaaaagatgggttccggttgcacaattctgtattggaggtatgacaatgaacgccgtaggcatcgacatctcaaaaggaaagagcgtggtcgtagtgatgcgtccctttggcgaggtcgttctctctcccttcgaggtgtctcacaccgacaaggatctgaacgatttggcgaagaagctcaaatccttgccgggtgaaacccgtgtggtcatggagtatacggggtattaccactcaccggtcgccgccgtgctccatgaggcagacatttatgtctcagcagtcaatgcattgctagtgcatgactatggaaacaactcattacgcagagccaagactgacaagaaagacgccatcaaactggcaaactatgcgttggatcattggctctcgctccctcggtatcttccggccggagacaccagactcatgctaaagacctgttaccgtcagtatgagcaattcagcaagatgcgcacgatgcagaagaacaatcttatctctctgctcgacatcacctttcctgacgcaaacaagctcttctccagcccaccaagagctgacggcagcgagaaatggatagatttcgtcgctcaatattggcactgcgaatgcgtcagcgagatgagcgtaagatcctttaccaagagctatgagaaatggtgccgcaagcatggttacaatttcagtgaggacaaggcgctcgaaatttacacttctgcctgcggagacatctgcatcatgccgaagtgcgaaaacacaaaactcatgatcaagcaagccgttgctcagcttcaagcgtcttcctctgcgttagttgccttaaaaacgcagatgctggacttggcatctactttgccagagtatcccgtcgtcatgcagatgtatggtgtcgggccttctcttgggccgcagctcatggccgagatcggcgatgtgcggcgctttcattccaagtccgcgctggtcgcctttgcgggaattgacgctcctccgtaccagcccggtcagatcgacgttcgcagccgcagcatctctaagcgcggctccgctaaactccgcagaacgctcttcctggtcatgtctgtattgcttcaaaaatcaccgctcgacgagccgatctaccagtacatggacaagaaacgagccgaagggaagccgtataaggtctacatgatggcttcagccaacaaattccttcgtcgctactacgccatcgtcaaggctcatttagacgagttggacggcgtctgattcgctgcgacaacttcaggctggccgtcgctttgaaaacaaggcgctcaacggctcggattgctatgcccttttaggctggctcaaagaacccgttttaagggttgacttttgttagcaggt

SEQ ID NO: 715 - DNA, 1357 bp, unidentified
  source 1..1357: mol_type = unassigned DNA; note = element_0a2c7b8
  misc_feature 1: note = core
  misc_feature 2..67: note = LE
  misc_feature 68..1102: note = CDS
  misc_feature 1103..1357: note = RE
  misc_feature 1114..1347: note = bridgeRNA
tatgggatggcccgcccgtctttccggcgatgtagtctcgccggagacttgaacggaggagcggatcatgaggattgcagtgcttggcgtcgatctcggcaagaacgtgtgcagcatcgtcggcctcgatgaggcgggcgcggttgtgctgcgtcgacgagccagaagagacacgctgatcaagttcgtcggcaatttgccggcgtgcatcgttgcgatggaggcctgttgcggcgcccatgatctcggccggttgtttgcggctcaagggcacgacgtgcgtctgatgtcgccggagtacgtccgtccttacgtcaaggcgcagaagaacgacgatcgcgacgccgaggggatagcggaggcggcgacgcggccgaccatgcgcttcgtcgaggtgaagacacaggcgcaactcgacatgcagacgctgcaccggtccagagatcgcctagtgggggagcgaacggctctgatcaaccagttgcgcgccatcctgctggagcgcgggattgtcgtgccccagggcaagcgcaaactcgaacattatctcgttacgctgatggaagagccggagggcgacgccttgaccgcgcggatgcggatgctgatcgccgacatgcaggcgcaatggcgcgatctcgatcggcggatcgccgcgttcgagggcgagttcgtcgcctttgccaaagaggacgaagacgcgcggcgattgacgaccatccccggcgtcggcgtgatgatcgcgtcggcgttgatggccgcgatcggcaaggccgagacgttcgagcacggtcgcgacctggcggcatggctgggtctggttccccgtcaatggacgaccggcggcgcgccgcggctgatgggcatcagcaagcggggcaacaagtatcttcggaagctgttgatccatggagcgcgcgcggctttgcctcatctggcggagcgcgacacctccctgggccgatgggccaaggggctgctcgcccgtgtccatcccaatgtcgccgtggtcgcgctcgccaacaagctggcgcgcatttgctgggcagtgctgcgaagcgggcggaatttctccgccaagggggctcccatggcggcatagctatcgccgaggcgcgcgcttgacgcgttgaccggccgacgatgtttgcgagcggtggaaacgagatggcctgacagtcgaacggcgttctggaaacctggttcggaaaatggcgctcggcgccgactcttttatgagggccaggacgcgcgtatctccatcttggccggggacgtgagcccgaggccggatacgttgaagcagactgaaattggcgcactcgaaaaatcgcttgcagacggggcgggccatacg

SEQ ID NO: 716 - DNA, 1353 bp, unidentified
  source 1..1353: mol_type = unassigned DNA; note = element_0a41a91
  misc_feature 1: note = core
  misc_feature 2..63: note = LE
  misc_feature 64..1113: note = CDS
  misc_feature 1114..1353: note = RE
  misc_feature 1126..1347: note = bridgeRNA
taatgggatggtccgctccgctcccccgccgcagaatggggcgtctggacaaggaggaccgccatgattcggaacaaaccgcgcgacgccgccgtttacggcgtcgacctcggcaagaacatcttccacgtggtcgggctcgacgccgcaggcatgcctattcagaaggtgaagtttcggcgcgagacgttgttgcaatttttcgcgcaagcgaagcaggcgatcgtcggaatggaggcgtgccccggctcacaatggttggcccgcaaaatccgtgcgatgggccacacggttcgcatcctgccggcgcaattcgtcaagccgtatgtcaaatcgaacaagaacgacgcgatcgacgccgccgcgatcgccgaggcggtcacgcgaccgacaatgcggttcgtggagatcaagacccccgaccagatggacatgcaggcgctgcatcgcattcgtgatcaattggttgcggcccgaaccggcttggtctgccagatgcgcgcgttttgtttggaatacggcgtcgccatccgtcagggcgtcggcgtcttcaaactcgatcttccccgcgttttggcggacgagcaaaatgacctcacgccaacgatgcgacgtcttcttggcgatctcttcgacgacttacgccgcttggaagagcggatcgccgccgtcacgaaggagaacgaggcggccgtcggacaagatgaagtcgccagacgactgatgagcgttcccggcattgggcctctgggggccagcgcgcttcgggcagccgcaggcgatgcgaggcaattccagaaagcccgagacctcgcggcgtggcttgggcttgttccgcgtcagcattccaccggaggaaagccgacgctcctgggcattagcaagcggggaaactcgtatgttcgccgattattgatccacggcgcgcgatcatgcgccatgcacctggatcgatcgagagaccgattggggcaatggatcgaccagcttgagcgtcggatgcacatcaacaaggtcgttgtggcgctcgccgccaagatcgcgcgcgtcgcatgggtcattatgaataggccggggtcgatttaccagccgcgctccctcagcgccgcctgagacgacccaggccgagtttgcgaggttcgaggaatgatgacgagacagtcgatcggcgcttcgtaagcccttcggggaaacagggcctcgcgcccgccgaaagtatttgggaacgaagcgcgcggatctcatcacggcctggctgcaaccgcagctcgctcgcgagaggccggatacatttaagcaaactgtcgacgccgtcaggaaccaaagccttgcaaagacggagcggaccataca

SEQ ID NO: 717 - DNA, 1407 bp, unidentified
  source 1..1407: mol_type = unassigned DNA; note = element_0a48840
  misc_feature 1: note = core
  misc_feature 2..304: note = LE
  misc_feature 305..1387: note = CDS
  misc_feature 1388..1407: note = RE
  misc_feature 118..273: note = bridgeRNA
ctttaactttgcagtctgaaataagagtcctcaacaactcttaaatattttaacgtctgttaatcgaataaaattgtagagatatcacagttttttcttacctttgttgtagaaaggaaggattaactgccggaggtcaacccaattgcccttgaaggccacgagcttatgccctgttgtaggccctccggatttcaagctgcaaattccaaataggaaggtaggctcgaaacctaattaaagtaatagacattcacagctttccttcagttaaccgcttcctgtaacattaaaacgcgaagagatgaagaaaattgtaatcggcatcgacatttcgaaggaaaaaatcgatgcaaccgcaatcgacgtgagagacagccagctgggagtcgtgaaactggactaccaggtgttcgagaaccgcccgaagggcttccgctgcatgctcgcctgggcaaggcggctggtcaagggcattggcctggaggaggtgctgttctgctgcgagacgacgggcagctacgaccgctgcctgtgcgattacctctacgggaagggccttgacatctggcgcgagggcgcgctgcagatcaagcgcagcatgggcgtgcgcaagggcaaggacgacaaggccgactcgctgatgatagccgagtacgccatgcgccatatcgacaaagccgtcatctacgagacgcccgacggggccgtacgcgagctgaaggcgctgttcctctaccgccacaagctcgtccaggagcgcacagagaagaaggtccgcgcatctgaactgaaggctacggccgccatgagtgactccatgcgcttcatcatgcgcgacgccatgaagagcgtccgtgcccttgacaagagcattcgcgactgtgagaagcagatactggcactcatcgccagcaacgaggaattcaggcgcaactacggtcacatcgtctccatcccaggcatcagcatagtcaacgccacggcattcatcacctacagcaacaatttcaagggtatcacaactgccaacaagatggcctcctactggggatgtgcgtccttccgcctgcaatcaggcataagcgtcgacaaaaaggcatacgtgaagtgctattccagctcactgctgaaggcgacgctgacacaggcggcagaatgcgcaatcaaggagcacggcatataccgcaactactacctgcgcctaaagaaggaaggcaagccatacggagtcatcgtcaacaacgtccgcaacaaactaatccacctggcattctcacttgtcaccaatgacaaggactatgaggagaaccacgagcttctaagagagaaaagaaagagagaacaaagaatacatgacaaattagagattattaaccaaaaataattgcaaattcccataggaag

SEQ ID NO: 718 - DNA, 1407 bp, unidentified
  source 1..1407: mol_type = unassigned DNA; note = element_0a5779e
  misc_feature 1: note = core
  misc_feature 2..305: note = LE
  misc_feature 306..1367: note = CDS
  misc_feature 1368..1407: note = RE
  misc_feature 121..274: note = bridgeRNA
ctttaactttgcagctgattactaagagtcttaacaactcttaaattgaaaacgttaaatagtacaattaaagaagagaagaataacagtttttgcttacctttgttgtataaaggaaggattaactgccggaggccaacctaagccgatgtagagacttgagtctatcctttgttgtaggccctccggatttcaagctgcaaattccaaataggaaggtaggttcgaagcctaattaaagtagtagcaactcacagctttccttcagttaatcgctccctatgatttaaaacaggtacaaagttatgaaaaaaatcgtaattggcatcgacatttcaaaagaaaaaatagatgcgacagcaattgatgttagaagtgggcaacttggtgttgtaaagttggattatcaagtgtttgaaaacaaaccgatgggctaccgccgaatgttagtctgggctcgcaaccttattgacggtgccagactagaagatgtgctattctgttgcgagacaacaggaggctatgaccgccgcttatgtgactatatctatgcaaaaggtcagagcatctggcgtgaaagcgccttgcagatcaagcgcagtatgggggtgcgcaaggggaaagacgataaagccgactccctgatgattgcagagtatgctatgcgtcacatggataaagccgtcatatacgaatcgcccaacgagacagtccaggagttaaaagctctgcttttgtaccgtcacaagttgatacaggagagaacagagaagaaagtacgcatggcgcaactgggagctacagcggctaagagtaaatctctaagtttcattctgcgcgatgctagaaagagcataaaatccattgacaagagtattcaggaatgtgagcagcagataattgaacttctcaaaactaatgaaacgctgaaaaagaattatgaccatatcgtttccgtcaatggtataggcattgtcaatgctaccgctttcatcgcctatagcaataatttcaagagtatcacaactgcaaacaagttagcctcatattggggagtagcgtccttcagggaaaaatcgggtacaagtgtggataagaaagcatgtgtaagttgctattcctgttcccatttgaagtcatatttaacacaggcggcagaatgtacagtcagaaaccacggaatttattataattactttctgcgcatgaaggcccaagggaaaccctatcgcgtgatcattaacaatgttagaaataagataattcaccttgtattctcacttgtcacaaacgataccgactatgaaaaggatcatgagttcttaaggactcagagaaagatttctcggacttttgaaatgaattaaaagatattaactaaatatatttgcaaatttccataggaag

SEQ ID NO: 719 - DNA, 1345 bp, unidentified
  source 1..1345: mol_type = unassigned DNA; note = element_0a61720
  misc_feature 1..2: note = core
  misc_feature 3..227: note = LE
  misc_feature 228..1097: note = CDS
  misc_feature 1098..1345: note = RE
  misc_feature 1129..1328: note = bridgeRNA
tgatgtgatggacgcacctcccttctagcaccgatgtaccaaactaatggtgcaaccagtaagaacaggagtaatcatcatgtctattaaagttgtcggcatcgatatagccaaaaacctctttcaagtatgcgtgttgagtgctgatggacaaatcttgtcaaaccgaaaggtaaagcgtgacaagcttcttgatatagtccgtcaatttccagagcaaacggctattgcactggaatcattggggaagaatatttcaagagctgggccatagggtcgctcttatcccagctcagcacgtaaaaccatttgttgggcgacaaaagaacgatgccaacgatgcgagagctatttgcgaagccttttcaagacccgatattcattttgttcctgttaagtctgttgagcaacaagacctcaaagctatacgcagtgttcgtaaacgtttagtggaaaacagaacagcgcttgctaaccaaatcagaggacttgccgctgagtacggagtggttttccctttgtctattaaatcactgcggagtcatttgccgttagcgattgaagatgctgagaatcagttgtctcatgttatgagaagcttactgcaaacactgtactgtaactttatcaatatcagcgacgaaattgatgaagttactcaaagcataaccagattgagccaacaacatccaaggtatgaggcagttaagaatatccctggttttggtccgattttgactgctgcaattattagtgaagtaggctctggcaaacagtttcaaaatgggcggcaattctcagcttggtgtggattagttcccaaacaaaatagctcgggtgggaaaagtagcctaggggcgttgtcaaagagtggcaaccgcgacttgagaaccttgcttattcacggcgcacgcgcagttgtacggtgtagaacaaacagcatggatcctatgggcgtttggctcagaagcctgattgcacgtcgtgggaaagctaaagctatagtcgctttggcaaacaaactcggtcgcgtggtctggcgtgttttatcaaccgactgtgagtacgatatcaatcgtgcttttaagccactgtaattaatgaaatatagcattttaaatagcaactgagtttgcaatagctgatgaagaaacggtgaatcatccttactacactctgattaagcaacaggtttatcgaaaccgaggctttgaatagtttgaatagacagttaggagcggattacatcatggcgctggtctgttattgacctagatagacgtcggatatatgttagcgaccgtaccattcaattagcaattgcatccagaggtgcgtccatata

SEQ ID NO: 720 - DNA, 1361 bp, unidentified
  source 1..1361: mol_type = unassigned DNA; note = element_0a6196c
  misc_feature 1..2: note = core
  misc_feature 3..83: note = LE
  misc_feature 84..1145: note = CDS
  misc_feature 1146..1361: note = RE
  misc_feature 1128..1349: note = bridgeRNA
tgatgctgtggacggctccaccgccggcatcgcactgtgccatggaggttgtttgataaccgccaataggggagccgcccgagatggaagttaccacgatcggtcttgatcttgcgaagaacgtattccaggtccacggggttgacggtgagggcaccgtggtgatccgccgccagttgcgccgggcccgggtgttgccgtttttcgagaagctgccaccgtgcctgattggcatcgaagcctgcgccacggcgcaccattgggctcggcaactgatcgggttgggtcatcgggtcaagctgatgccgccgcattacgtgaaggcttacgtgaagcggaacaagaacgacgcggccgacgctgcggcgatctgcgaggcggtgacgcggccgaccatgcggttcgtcgcggtaaagacgatggagcagcagagcgttctgatggtgcaccggacccgggagttgctggtccgtcagcggaccatgctggtcaacgcgatccgcgcccatatggccgagtacggcatcgtcgcgccggtcggcatcccgcgagtgaaagagctttttgcggtgattgccgatggcgacgatgagcggctgccagcaatcgcgcgagcctgcctcgaaggtctggcgagacagttcatgtcattgcacgaggagatcgctgtcgccgagcggcgcatccacgcctggcaccgttcgaaccaggccagccagcggctcgagaccatacccgggatcgggccgattatcgccagcgccctgacggcttccatcagcgatcccgaggtctttaagaatggccgcgagttggccgcctggatcggtctggtgcccagacagaactcgaccggaggcaagcagcgcatgggccggatctccaaacagggcgatcaatatctcagatggctgctggtcgccggcgccatgtcggtgatccggcacggacgaaagacagacttcgagaagaacccgtggctgggtaacctcgtgcggcaaaagccgaccaaggtcgcggccgtggcgttggccaacaagattgcccggaccgcctgggcggtgctggtcactggcgaaccctaccgccagccggcgccggccgaagctcaaagcgcggcgaaggcaacgttattggcagggtgaacgtgaggtaatgcaaaatcggtcgaaccgaggatcgggaaaacccgtttgggacaaggcgcatcaagcgcgtcctcttgattgggacccgatcccgcggatcgcattagggccagcggtcatgagcaccgcatcaacaggccggacacatgactgcacccgaccagcttgcatcaacctcaattcaatccttgccaaatcggagccgtccacaca

SEQ ID NO: 721 - DNA, 1496 bp, unidentified
  source 1..1496: mol_type = unassigned DNA; note = element_0a6791a
  misc_feature 1..2: note = core
  misc_feature 3..240: note = LE
  misc_feature 241..1476: note = CDS
  misc_feature 1477..1496: note = RE
  misc_feature 6..235: note = bridgeRNA
ctaatgggttccgtcagcctgctggtgcaggatggctccggtagcggctggcgggtcagcactccactcttcaggtcttcgaggccttgcggcagaccgtgcgcccgctggtcgtgaggaggctggacagctgatgggatgacgtgccccgcggttggcggtgagcacttggccattagatcgctggggtctcttccgcgctgccgtggacgatgtggtccatagaggaagagaggcgtgatgctgttcctgggagacgactgggccgaggaccaccacgacgtcgaactcgttgacggcaacggcggcaaggtggtccgtaaacggctacccgaaggcctcgaaggtgtcacccggctgcacgctttgatcgccgagcacatgccggccgactgggccgatctcgacccggccgacgcagcagcccaggtgcggatcgggatcgagaccgaccgtggcccgtgggtgcaggcgctgctcgcggccggctatcaggtgtatgcgatcaacccgatgtcggtcgctcgctatcgggagcggcattccacctcgggggcgaagtccgacgccggcgacgcgcacgtgctggccgagatcgtgcgcttggatcacgcccatcaccgcccggtcgccggcgacagcgccgaggcggaggccatgaaactggtggcccgcactcatcagacgctgatctgggaccggtcgcggcagatgctgcggctgcgcagcgcgttacgcgagttcttccccgccgccctggacgccttcgacgacctgaccgcgcccgacgtgttggagctgctcggccgcgcgccggacccgactcgcgccgcccggctgtcacgatcacagatcgccgccgcgttgcggcgggcgaaccgccgcaacatcgacacgaaagccgccgacttgcagcagcggctgcgcgccgggcagctgcgccaaccggacgccgttcaggccgcttacgcggccatcgtgactgcccaggttcggctgatcgccgcgctcaacgccgaggtcgagcagctcgggcgggtggtggccgaccattttggccggcaccgggacgctgaccactacctgagccgacccggcctcggtgtggtcctcggcgcccgggtactcggcgagttcggcgacgatccacaccgcttcaccgacgcgaaggcccgcaagaactatgccggaacgtccccgatcacccgagcatccggcactcgcaaagtcgttttggcccgctacgcccgcaaccgaaggctcggcgacgccgtccaccaatgggcgttctgctcgctgaaaggctcacccggcgcccgcgcctactacgacactctccgcgcccgcggcaccggtcaccaagccgccctgcgacaactcggcaatcgcctcgtcggcatcctgcacggctgcctcaagaccggcgccgcctacgacgagacgactgcctgggcccatctccatcccagttcttgacaacgaaaaacataggatgt

SEQ ID NO: 722 - DNA, 1364 bp, unidentified
  source 1..1364: mol_type = unassigned DNA; note = element_0a68efc
  misc_feature 1..4: note = core
  misc_feature 5..78: note = LE
  misc_feature 79..1113: note = CDS
  misc_feature 1114..1364: note = RE
  misc_feature 1106..1352: note = bridgeRNA
atgatggggtggacggcccccgacggcatcatcgtgccagactggtgatgtgagtcgaccagacaaaggaggccgtccatgtcgaaggttatcatgattggtttggatttggcgaagaacctgttccaagtgcacggggtcggggcgtcgggagcagtggtggtgcgccggcagcttcggcgcagtcaggttgagaagtttttttcggagcttgcgcccgcgattgtcgggatggaggcgtgtggcggggcgcatcactgggcgcggatgctggagcgcctgggtcatgaggtgcggctgatgccggcgtcgtatgtgaagccgtatgtgaggcgcaacaagaatgacggtcgcgatgccgagggggtgtgtgaggcgacgggacgcccaacgatgcgatttgttgcggtgaagagtgaggagcagcaggctgtgcttgttatccacagcacgcgcgcgcttctgatccgccagcgcacgatggcggccaatgcgttgcgtgcggggctgagtgagtttgggattgtggcggcgcaggggatgaagggattgcgcacgctgatcgagcaactgcgcaccccgtccgaaggggtgatcccggagatcgggcgagccacgctattgcttctggcgcggcaatgggaagcgctcgatgtcgacatccgtgcgctggaccgccagatcgagcgtgcggtgcgggtcgatgaagcggcatgccggctgatggaggttcccagcatcggtccgatcacggcaagcgcggcggtggcgaagctacccaatgcgcgcgtgttcaagacggggcgcgacttctcggcctgggtcgggctcacgccgcgcggtcatggcactggcggcaaacaccgctccggcggcatctccaaacagggagaccgcacgctgcgaagcctgctgatcaacggggcgagctcctatctgcgtcagcagatcgcccgtggcgtcaaggatccgtggctgcgcgatatgctcgcgcgccgaccctacaaggtggtcatggtggcgctcgcagccaagaatgcacgcatcatttgggccttgctcgccaagggagaaaggtaccgcgaacgcgcgcccgtgccggccgccgcttaatagcggccggcccgggcgctctcactgtcggaaagggcaaatatggcgtgacggcaaacggtcaggaaccgggatcgagacactccgcgttgtcatcgcgcgcaacagcgcgccggaatgatcggagctcgatccgcgatatccatcagggcccgcggtcaacgaccgcactcaaaggccgtatacatgaccgctcccggccagtcggctgaaacgccaaaaagcccttgccgaccgggggccgtccatac

SEQ ID NO: 723 - DNA, 1262 bp, unidentified
  source 1..1262: mol_type = unassigned DNA; note = element_0a6a89f
  misc_feature 1: note = core
  misc_feature 2..258: note = LE
  misc_feature 259..1146: note = CDS
  misc_feature 1147..1262: note = RE
  misc_feature 34..246: note = bridgeRNA
tcttaagtttacaattcattaaatttagatataaatcagaaagcaccaaagagaggaataaggttaatatacacgcagagactatgatctcgtcaatcctgaagcctcgggaaaaaccccctctcttttctacacagatttcgaactcccgatatctatcgggagtatcaggctttagacctcgattttagcctgtgctgagcgcagtcgaagtattgaaactcgcgtagtatgtactttcaaaaaaaacattttattatgattaaaaatattaaatattttggaattgacattagttatttagtgtttgatgttacagattctgatggtaaatattatcagtttaaaaacaatgtatcaggctttaaaaagttcacaaagctcttaaaaacagatagtcattgtgttatggaagccaccggttattaccactaccaactggcttaccatttacttgaatctggtataaaagtatctgtagaaaacccattagctgtaaaacgttttatccagatgaagttgtcaaaaatcaagacagataagagcgattcaaaacttatttgtgagtatgctcagaaggtaaatctaaaactgtggaagggaaacacaaaagatgagatggaatgtcttcaaatcaccagagcactatctgtatatacaaagcagagcaccatgttaaaaaacaaattacatggagaagctgttttgggagagccaagtaaagcagttgtaaggtccttaaaacagagtttaaaacagcttacaaaagagatgaaaaccttagaggataagttgttggttttagtaaaacaatcacatcaagacctattaactcgtttaaaaactagtccaggcattggacctaaaacatcaattatgttagtggttttaacaggtggttttgatcggttcacaagtgcagcagaactatgcagttatgctggtctaacaccggtgattaggcaaagtggtagtagtgtaaaaggacgccctcgaataagtaaaataggcaatcaaaaacttcgtaatttattatttatgtgcagttttaatgcttgtaaatacaacaaggcttgcagagatctttacgagcgaatagtagccaaaggaaagagtaagaaattaggcattaactgcggtatgtaataagctcttaaaacaagcctttgccatcgcaaaatcagggttgatatatgataaagaatataaaagtactctagtgaaaaattaatgagtttttacttgttttttgccacagtact

SEQ ID NO: 724 - DNA, 1457 bp, unidentified
  source 1..1457: mol_type = unassigned DNA; note = element_0a7489d
  misc_feature 1: note = core
  misc_feature 2..236: note = LE
  misc_feature 237..1442: note = CDS
  misc_feature 1443..1457: note = RE
  misc_feature 12..234: note = bridgeRNA
cgttaccttgttggtggttccgggaagtccggggccgggccagccgctgtgggcatgatgtcttgcccctgtcgtttgatgatccggggggtgttgtcacccatggtggcgggcgggtggtgatcgctgattaggggaacgacccgccgcagcgcggcgatgtctttcgtaacgtgggtgcggggccgtctgcctgacaggctgacccaccaacgcacgagagaggcgcaggaaaggtgaacatcgaggatgtggaggtcttcgtcggtatcgacgtgggcaaggccgagcactgggccacggccctgaccgacgacgggaagaagatcttcgacaaggccctacccaacgacgaatccaggcttagggacctgtacgagcgtctgggtgagcatggccgggtcctggtggctgtggatcagccggcaacgatcggggccctggcggtggcggtggctcaggcgatgggtatcaccgtgggctacctacccggcctgtccatgcgcaggatcgccgacctgaccccgggcaatgccaagaccgacgctcgcgatgcggcggtgatcgcggatgctgcccgcaccatgccccacacgctgcgagcgatcgacgcctcggacaaggacgcggccgcgttgagcatgctcacagggtttgacctggacctggcccgccaggtcaatcagaccgctaaccgtatccggggcctgtacacccaaatccacccagccctggagactgtgctgggcaagtggctcgaacacgacccaatactggaggtgatcgccgcctggcccaccccagcccacctgcgcaaggccggccgggcgcggattgacgccaagctcaaatccaagggcgccaagcgccatgccgcctgggcaaaagccatcaccgacgccctgaacaagcagaccgtcgtggtcgctggtaccgacgcggccggggtggtgctgccacacctggcccgccagctcatcgccctacacgcccaacgcgacgatgtcgccgcccaggttgaggccctggtggaggcccaccctctttacccggtcctgacctccatgcccggggtgggggtcaggaccgccgccgtcttcctggcagagaccgcgggcaagacctttccctccggcgcccacctggcctcctacgccggcctgacaccagtcacccggcggtcggggtcctccatacgcggcgagtacgtctcccacgcgggcaacaagcgcctcaagagagccatgttcctgtcagccttcgcctccctcagatccgaccccgcatcccgggcctactacgaccgcaaacgcgcccagggcaagcgacacaaccaagccatactcgcactcgcacaccgccgcatactcaccctatacgccatgatccgagacggatccctctacgacccaccagcccaacaactacccgccgccgcttgacaaaccacatagggg

SEQ ID NO: 725 - DNA, 1345 bp, unidentified
  source 1..1345: mol_type = unassigned DNA; note = element_0a7991d
  misc_feature 1: note = core
  misc_feature 2..82: note = LE
  misc_feature 83..1099: note = CDS
  misc_feature 1100..1345: note = RE
  misc_feature 1107..1341: note = bridgeRNA
taatgagatggtcagcccagttcgagaaacccggtgagtctagacttaccgggtttctctcttgaccgaaggaggatctctcatgaacaccggaacgcttctaggtatcgacatcggcaagaacaccttccacttgcatggccaggatgcgagaggaaatcagctcatgcgcaagaagctcaatcgttgccaattgctgccgtatctggcgcagttgccaagctgcaaaattgccatggagtcctgcggcggttcgcaatggctggctaggcagatcgaaggcttgggccaccgcgtgcaattaatcgcggcgcagcatgtgaaggcctacgtcactggcaacaagaatgactttatcgatgcagaggccatctgcgaagccgcgtcgcgacccagaacccgctcggttccagtaaagacccttgagcagcagatcctgtcgactgagcacaagctgcgcaagtcttgggtggataatcgcacgcgaatcatcaaccaggtgcacggtgtcctgctggagctcaggatcattttccccattggacatgctgctctggagcaggtgcccgctttgatggaacgccatgagctgccgattcgactgcgtaatgcggttgagcgaatgctgctcgatattcaacgcctgacgagagatatcaaggggatcgatgtcgagatcaaacagcagttgtctgaggacgccgccggcatgcgcttgctgagcatccccggcatcggccctctcaccactagcgcgctggtggccgatgtcggtgacgcttcgacttacaaacgctcacgcgactttgccgcgtcactcgggttggtgcctcgacagtattcaagcggtggcaagacgagcttgcttggcatcagcaagcgcggcgacaagtatctgcgctgcctgctggtgcaaggcgctcacgcactgatgatacgaatcgacaagcgtgacgatgcactcggagcttgggtaagaaatcttttggctcgcaagcccccgaacaaagtcgcctgtgcgctggccaacaagacgacaagaatcgtctgggcagtattagcccgaggcggcagctacaacgtgaaacagatggcttgacctaaccgacttaccaccggcttttgcgacgacagtgatgatgacgataaacggcagacatcccaactgaaaacctgaagacgaagatagtttttaaagctgatccctttatcaaggacaattgggagcgacttctcatcaagggccgagcgctaatgaacgtgctcaccatgagcccggatacattagcgcaagcatgctttaccgttcatcaaactgcgttgcaggaggtgggctgaccataca

SEQ ID NO: 726 - DNA, 1374 bp, unidentified
  source 1..1374: mol_type = unassigned DNA; note = element_0a870da
  misc_feature 1..4: note = core
  misc_feature 5..78: note = LE
  misc_feature 79..1110: note = CDS
  misc_feature 1111..1374: note = RE
  misc_feature 1119..1361: note = bridgeRNA
atgatggtgtggacggcccccgacggcatcagtgtgccagactggtgatgttgattcgaccagacaagggagccgtccatgagcgagattagcatgattggtttggatttggcgaagaacgtattccaggttcacggcgttgatgcgtcgggaagcgttgtattgcggcgccagcttcggcgcggcgcggtggagaagttctttgcgcaactgcccccgtgcacggtggggattgaagcgtgtggcagtgcgcaccactgggcgcgggtgatcggccgttatggccacgaggtccggctgatgccgccgtcttatgtgaagccttacgtgaagcgcaacaagaatgatggccgcgacgcggaggcgatctacgaggcggtggggcggccgacgatgcggttcgtgccggtgaagagcgtggagcagcaagcgacgttggctgttcatagcacccgcgcgctgttggtgcggcaacgcaccatggtagccaactcgctgcgggctgcgctgagcgagatcggcatcgtggcggcgcagggccttgaggggctgcgtgcgctgatggccaggctcgaagcgcccaacgaggaagttcccgagatcatgcgcggtgcgctgttgctgttggccaaacactggcaggcgctcgatgctgacgagcgcaccctcgagcgacagatcgcgaaggccgcccgtgccgatcgcgaggctcgccggctgatggaggtgccgtgcgtcggcccgatcatcgccagtacggtcttggccaaagtgcctgatgcgaaggtgttccgcagcggacgcgatttcgcggcctggatcgggctgaccggccgtgatcacggcaccggcggcaagcaccgtcccgggcgcatctccaaacagggggaccgcatgctgcgagccctgctgatcagcggagcaagcgcctatctgcggcatcagagaacgcgcggtgtcagcgatccgtggctgcgggatctgctcgcgcgccggccctataaggtcgtcatggtagcgctcgccgccaagaccgcgcgtatcctctgggccatgctggccaagggagaaccataccgcgaccgcgcgagcgcgtcggctgctgcctagttgaggggcgacagccgccgcgctcgcgctcatccgttcggaagggcaactatggtgtgatggcaaaatggtcaggaaaccgggatcgaaacactccgaaccgtcatcgcgcgtcacagcgcgccgcaatgattggaattcgatccgcgatctccatcagggcccgcggtcaaaggccgcattcagaggccgtatacatgaccgctccccgatccgtttgccgaaccaccaaaaaagcccttgccgaaagggggccgtccatac

SEQ ID NO: 727 - DNA, 1376 bp, unidentified
  source 1..1376: mol_type = unassigned DNA; note = element_0a87ca9
  misc_feature 1..2: note = core
  misc_feature 3..164: note = LE
  misc_feature 165..1163: note = CDS
  misc_feature 1164..1376: note = RE
  misc_feature 1..203: note = bridgeRNA
cttgtattagcgcgatccattacactgcgatcgttccatgaggaacggctcggaccgggtggccgcccgagccgagccgccgatcgtcggatcgtaacccgcccaagccttgaaggactgatggccgtagcaagatcgcgatcggctttcttcatcggacctggatggttgaaggaaccatgggttcgcatcacaaggaaaggtcgacgaagatgaacaagcataacatgctgtgtgccgggattgataccggcaaacgcaagctcgaagtggcgctcacgagcgggctgcggctgcaaattgacaataatgccgagggtcacgctgctctctctgggtggttgcgcaagcatcggatcaagcgcgtaggtattgaggcgagcggcggatatgagcgtgaggtggtggcgcagttgcgccgatggcgttttgtggtggttgtgttccagcccgcgcaggtgcgcgcctatgcgaagtttcacctgcagcgcgcgaagaacgacaagatagatgccgctttgatcgcgctttgcacggctgacgtgcgcaagatccacgccccgccggatgcgcgattgatccctcttgctgagcgtttgaccttcatggagcaaattaccgaggacatggctcgggcaaaaaaccgacacgagtcctgccgcgacccgcgcacaaagcggcactgggaggctgaaatcgcccgtttgaagggagtcctcaggatcgagctcaaggcgcttgttgccgatatccgccagcacagtgacttgagcaagcgactggacttgatcgccagcgtcgatgggcttgggatacgcactgcccttgcgatcgcggtccgtatgcccgagatcggccgtgtcacccgcgagcaagctgctgcgcttgtcggccttgctccctttgaccacgacagtggcgatcaggttggtgtccgtcacatcgagggtggacgcgaacggctgcgcaaagcgctgtacacggcagcgctgccggccgttttcctatggaaccatcagctcaagctcatgtatcgacggctcattgccgccggcaaaccgcacaagcttgcgcttgtggcctgcgcacgcaaactcctcatctacgctaatactgtcgtcgagcgcggtacctcgtggacttcactgcgagctgccgcttagcctcccagttattgttctgcttagtctagtttctttgttcgactagaaggaccgtttcttcgccccgacctcactcaccggcgacgccgcgcgcagccgcggtcaagcctggccgtcgccaagtcttgcgcagatctctcaatcgcgaggccaaggcttgacggcggcgagcacggcgtcatcctacaggtggtcgggcccgattaatggttg

SEQ ID NO: 728 - DNA, 1334 bp, unidentified
  source 1..1334: mol_type = unassigned DNA; note = element_0a8d23e
  misc_feature 1..2: note = core
  misc_feature 3..79: note = LE
  misc_feature 80..994: note = CDS
  misc_feature 995..1334: note = RE
  misc_feature 1052..1222: note = bridgeRNA
tgctgagatggtcacctcggtctcggcatcgcaatgtgccatgatttaggtgcacaaaatctgacgcgaggtgaccgatatggactataaactcatcagcattgatttggcaaaaactgtcttccaagtggctgccttcaatcatgacaataccattgcttttaatcgtaaaatcaaccgttctgcattgctcaatacccttaggcaatgtgaactgacattagtggtgatggaagcctgttacagtgctaattactgggggcgggctatcgaaaagctcggccataccgtcaagcttatccccgccagaatggtaaaagccatgctagtcggtaataaaaatgacgccaatgatgcggttgccatcggagaaaccgctggccgtcctaaagtgagtctacttcgccctaaaacggtcgagcagcaggacattcaatctttgctgcgcattcttgaagatgctgacaacgagttatccactgttgccagagggtttattcaacgactctatgagtttcagttgtatttaaatgaacaaatcgaccaggttgcacaggacatattagcccttgctcaagccatgccacagtatccattattgctaaccatccccggtgtcggccctatcgtcgcatccacattattggccagcattaatgaagtgaatgattttaaaaatggccggcaattagcagcatggctaggactaaccccttcacaatacagcagtggcacgaccaatcggctcggcaagataaccaagcgtggcaatcaaacgctcaggcggttacttatccatggcgcaagaactgtggttaactggtgcgataagaaagacgactcacttagcctgtggctacaacggcttaaacaacgccaacacgtctgcaaagtaacggttgccttggcgaataagatggcgcggatggtatttgcggtgatgagccgcgggcaagtatttgatatgaataaggcgtgtaaaatggcggcgtaatacagcgttttttgcgtaaaaatccccaaactgtaaatagataaatgtccatcaaagcacaacagcggtaatggtattaatgagttaaacggtttgtcttacccaaaacctgattcggacagtggccttcgaggccatgtggctgccaaggagggtaagacgtcaatttggatctcattagggcgcaacagacgccggccctttattttcaacatcaggtcgcaagaccgccaaccattaacgaccgataccccgttgtgaaaggtgaattattgattaacgtaaatgtagttcgaataaaataggacattggccttgctaaccccaaggtgaccatata

SEQ ID NO: 729 - DNA, 1209 bp, unidentified
  source 1..1209: mol_type = unassigned DNA; note = element_0a8d320
  misc_feature 1..2: note = core
  misc_feature 3..216: note = LE
  misc_feature 217..1194: note = CDS
  misc_feature 1195..1209: note = RE
  misc_feature 12..189: note = bridgeRNA
cttgtatctttgtccgagtgatggttagctaccattacttgaggcggaatgagcttgtacccaccctgaagggataaccttgtagcgtagatgaagccttccgcctcgcctttcacaccttgatcgacactggacggtagccaagggcaatgaccctgcatgaacaaggagagtgggtgtgaggtttatgaaaaggcagacaaaggaatcccaagcatgttttatctcggtatcgacgtttccaaagccaagctcgactgcctgttgcttgatacgacaagcaacaagcgcaaatccaaatccattcccaacacgccggccggctacagcaccttactgacttggctggacaagcagcaggccagcaatgtgcacgtgatcatggagccgaccggcccttatcacgagccggcagccctggcattgaccgatggcggcgtcacgctgtcgctggtcaatccggcgcaggtacgccagtttgcccagggcattggcgtcaagagcaaaaccgatgcggccgacagtgccgtgctggcccagtatggcgcggcccggcagccggcgccatggcagccgccttcgctgtcggtgcggcaattgcgcgccttgcttgcacgccgcgatgcggtagccgatgatttgcagcgtgagaagaatcgcgccgagaaggccctagccaccgagacgccgcccttggtgcaagcctccatcgagcaatcgattgccttcttgagcaacgagttgaatcagctgcagcaagcaattgcccagcatatcgatgacgacccggatctgcgtggcaagaaagaattgctgctgaccatccccggcgtgggacagcgagtctccgaccatttgaccgccctgctggcggcccgggacttccacgctgcagagcagttggccgcctatctcggcctgacgccggtggaatggcaatccggttcatccgtacgcggcaggcctcgcctgtccaaggccggacctgcacatctgcgcaaattgctctacttgcccgcggttgccgccaccaagtgcaacccgcatatcaaggccacgtatgaaaggctcatcgcgcgtggcaaaccaaagatggcggccatcggcgcggccatgcgcaagcttgcgcatttatgcttcggcgtcgtcaaaaccggccagccttacaaccctcattggcttgtagatgcttgaccggagagacggtat

SEQ ID NO: 730 - DNA, 1467 bp, unidentified
  source 1..1467: mol_type = unassigned DNA; note = element_0a96117
  misc_feature 1..4: note = core
  misc_feature 5..241: note = LE
  misc_feature 242..1450: note = CDS
  misc_feature 1451..1467: note = RE
  misc_feature 1..233: note = bridgeRNA
ccccgttaccttcttcgtgccctcgatgatgggggtgttggtcgctgggtccggcatgactgaccgcccctgtctcgtcgatgatccggggggtgttgtcaccgggcctggtggcgtcggtctgaccgctgatagggacacgacccccgaacgggtggtctcttcgtaacgtggctgccggctgctgacgcctgaccgcggccagcatgatcactgtccgcgtggggcaaggaggcccgtcatggaagagccatcagcagatcatgggtacgcggtgttcctcgggttggacgtgggcaagggcgagcaccacgccaccgctctcgaccctgacgggcgacgggtgcacgacaagccgttgccgcaggacgagcacgccctggggggcctgttcgagcagctgagcgagcacgggcccgtgctcgtcgtggtcgaccagcccgcctcgatcggcgcactgccggtcacggtcgcgcgcgatgtgggcgtggacgtggcctaccttcccgggctggccatgcgcaggatcgctgacctgcacccgggcaacgccaagaccgatgcccgcgacgcgtacgtgatcgccgaggcggcacggtcgatgccgcacgccctgcggcgggtcgacaccggcgacgaagccctagccgacctggaagtcatcgtcggattcgacgacgacctggccgccgaggtcacccgggtgaccaaccgcatccacgggctgctcacccagatccaccccgccctcgaacgggctatcggcggcaagttgcaccacaaggcgatcctggaactgctccgccgcttcggtggaccgaccggcctacgtcaagcaggcaaacgccggatcgctgcagcggtccgggcgcgggctccacgcagccaccacgcgatcgtcgaagcgatcatgtccgcgctggacgagcagagcgtgaccgtgcccggcacccgggccaccgagctggtcctgccccaactggccgaccagctgacctcgctgctggctcaacgcgagcaggccgccacgcaggtcgaggggatgctcgatgcgcaccctcttgccgcggtcctgacctcgatgcccggcatcggggtcaggaccggagcgcggatcctcctcgaggtcggcgacgggtcgagcttccccacgccgggccacctggccgcctacgccggactggctccagtcacccgcagatcaggctcctccatccgcggcgagcacccctcccgagccggcaacaagaacctcaaacgcgccatgttcctcgccgcgttcgccgcactgtccgacccgacctcacgcgcctactacgaccgcaaaagagcccaaggcaagaagcacaacgccgcgctgatctgcctggccagacgacgctgcgacgtcatctacgccatgctccgcgacggcaccccctaccagccccgccccgccaccgccgcttgacgaaacccatagggaca

SEQ ID NO: 731 - DNA, 1192 bp, unidentified
  source 1..1192: mol_type = unassigned DNA; note = element_0aa9795
  misc_feature 1..2: note = core
  misc_feature 3..220: note = LE
  misc_feature 221..1171: note = CDS
  misc_feature 1172..1192: note = RE
  misc_feature 63..221: note = bridgeRNA
cttatatgtctcagttggttcaaacttcagtcgtcaaggcaggccggccggccttggccactgaacgggttgactcaccgccgcgcagcctgtgtctcctgcgagcgcgagctcgaatgacagcccagggcgcacggtggtggtccctttgttctgccgcatcccgaatggttgaccgaacacatttcgtattcgtaaggctgggagttggagaaccgctatgagtgaactcgtctacgtgggcatcgatatcgccaagaacagcttcgaagtggctgtcacgggcgaactgcagacgctcaatctggccaacgacgaagccggccatgcccagctgtgccaatggctcgcaccgctggcgcccaggctcatcctgatggaggccaccggcggctatgagcaagacctcgcgctggccttggcgggcgcgggcttgcacgtgtcggtggtcaaccctcgccaggcacgcgacttcgcgcgctgcgtgggcaagctggccaagaccgaccgcatcgacgcgcaagctctgcgcagctttgcctcgatgctcgatgcgcaaggccaccagcctcgtgccctggccgacgacgagcgccgcgagctcacggccctggtggtgcgccgcaggcaactggtggccatgctggtgtccgagcgccagcgcctgggcgtggcccaccgcaaggccaagcccagcatcctggcgatcatggatgccatcgcggcgcaattgcacgatgtcgatgacgagctcaaggcgcatgtccagactcaccacgccgacctggccaaactgctgacctcggtcaagggcgtggggccgacgaccgcctgcacgctgctggcgcaacttcccgaactcggccagctcaatcgcaagcagatcacggccctggtcggtctggcgcccatgaaccgagactcgggcacgctcaggggccagcgccacatcttcggtggccgcgccgacgtgcggcgcgtgctctacgtcgcagccttggtcggcacgcgcttcaaccccgtcctcaaggtgttctacgccaagctgctggccgcgggcaaagccaagaaggtcgccctcgtggcatgcatgcacaagctgctggtcatcctgaacgcgatcgctcgcaccaggtcgccctggcgcgatgactttgctgagcgtctttgagctagtcattcaagatggttg

SEQ ID NO: 732 - DNA, 1428 bp, unidentified
  source 1..1428: mol_type = unassigned DNA; note = element_0aa9e93
  misc_feature 1..2: note = core
  misc_feature 3..129: note = LE
  misc_feature 130..1149: note = CDS
  misc_feature 1150..1428: note = RE
  misc_feature 1190..1428: note = bridgeRNA
agaatgaaatgaacgcgtcccacccgacatagtgagagcagaggacgggggtggatcctcacggtccaacggcatcgatgtgcccaaggtggaaaatgcacgcatttcccggcaaccggaggatccacgatgaacagtatggccgtgggcgtcgatatcgccaagcaggttttccaggtgcattacgtcgatcaggaaaccggagagatcgtgaacaaaccgatcaaacgagccaagtttttggagcacttcgcgaatcgagggccctgcctgatcggaatggaagcgtgcggtggcgcacaccactgggctcggcaactgacgcaaatgggtcacgcggtcaggctgatgccggccgagttcgtgaaggcattcaacattcggaacaagaacgacgcggcggacgcgcgggcgatttggctggcagtgcagcagccgggcaagccggtggccgtgaagaccgagatgcagcaggcgatgctcgcgctgcaccggatgcgcgagcagttggtgaagttccgcacgatgcagatcaacggactacgtgggttgctggcggaatacggcgaggtgatgagcaagggacgggcgaagctaaacacagaaatactggtggcgcttgaacggcttgctcagcgcttgcccgcggtgctgatcgataccttgcgggaacagtggaacgggttgagcaagctcgacgagcagattgcgcagatcgagcggcgcatgcgcgaatggaagaagcaagacttagcggtgcaagcgatcagcgagattcccggtgtcggtctgctcacgtcaacggcagcggtggcaatgatgggcgacccgaaagcgttccgttcagggcgggaatttgctgcttggacggggattgtgcccaagcagaccggctctggcggcaaggtgaatctgcacgggatcagcaggcgtggcgacacatacctgcgcacgctgctgatccatggtgcgcgcagcgtattggcgcacgcgaaggagcccggcccgtgggtcgagcagatgaaaaagcggcgaccaacgaatgtcgtgatcgtcgcgctggccaacaagatggcgcggacgatctgggcggtgctcgcacatgaccggccgtatcggaaggactacatgagcgtcaagccggtctgaacggagtcacgcgaggtagaagacaaatctttaacacagggtgaacgtcgaaaggttgcgcagcaatcgagtgtgatgacaaaccaggtaggaccaggactcgctaaacctgaatgattcgaagagcgtcgagctcgctaggagaatgaggcgcgagtcagcggatttcataggggcccgcagcggcagtaccggctgcatcaaggccggatatagagctgcagcccatcctgtccgtcggaacacacgagaactgttgcaaacgggacgcgttcatat

SEQ ID NO: 733 - DNA, 1354 bp, unidentified
  source 1..1354: mol_type = unassigned DNA; note = element_0aaa310
  misc_feature 1..2: note = core
  misc_feature 3..211: note = LE
  misc_feature 212..1183: note = CDS
  misc_feature 1184..1354: note = RE
  misc_feature 40..219: note = bridgeRNA
cttgtataagcgcgaaactgtatggtgcgttcgttccgcaaggaacggcccggctccgggtggccgcccgtgccgggccgccgatcgtcggatcgttgcccaccgcagccgcgagggctgatgtccgtagcaagatcgcgatcggctcttcatctggccccgtatggttgaaggaacctagggttcgcatcacaaggaagggtcgacgaagatgcgccagcataacatggtctgcgccggcatcgataccagcaaacgcaagctcgatgcggcgctcgatgagcgtccggagaagctgcaggtcgacaacgctgcggacggccacaagggtttgtcggcctggttgcggcgccagggcgtcaaacggatcggcattgaggcgagcggcggctatgagaaggccgtggtggcgcagctgcgccgcgatggcttcgtggtcgttgtgttccagcccgcgcaagtgcgggcctatgcccaattcgtcctgcagcgggccaagaacgacaagatcgacgcggccttgatcgcagcttgcacggcggcgatcaagaaaatccacgccccgcccgatccgcgcttggcgccattcgcagagcatctgacgctaatcgagcagatcgaggaggatctcgcccgccacaagacccgcctcgagacctgccgcgacccgcgggttgcggccttctggcgcgaggaaatcaagcgtctcaacacgctgttgaagcgcgagttcgcggcgttggtcagcacgatccgccagcatcgcgatctcgccgagcggctcggcctgatcgaaagcgtcgatggggtcgggctgcgcaccgcggtcgccatcctggtgcgcatgtccgagatcggccgcctcacgcgcgaacaagccgccgcgctctcggggcttgcgccctatgatgacgacagcggcgagtacatcggcgctcgccatatcacgggcggccgcaagcggctgcgccggagcctctacgcagcggcactgcccgccgccttgcgttggaaccgtcacctcatcgcgctctatgaacggctacgggcaaaaggaaaggggcacaaagttgcgctcgtcgcctgcgcccgcaagctgctgatctacgtcaacaccgtggtcgaacgcggtacgccatgggccgccaaaccgccctccgcatcggcgctcagagccaagtgagggccgcagcccggccttgatcgcttggatggcgaagcttcggatgccggactggtgtcaagggcggcttgccgccgcgcagcggtcgacagacccttgacaccagtccggcagccgaacacgacaatccaagcgatcaaggccaaaccaatcagccccacttaatggttg

SEQ ID NO: 734 - DNA, 1633 bp, unidentified
  source 1..1633: mol_type = unassigned DNA; note = element_0aaa4ec
  misc_feature 1: note = core
  misc_feature 2..627: note = LE
  misc_feature 628..1482: note = CDS
  misc_feature 1483..1633: note = RE
  misc_feature 62..275: note = bridgeRNA
cctggtataatgtaaaaaagactcatctaacggtcatttacattatacctttctccttctatcaaccttttaatccgtggttgattacggtttgatacattggtattatataaacatgtgatgtggatttgtatttctgtctgtggctttgactacttgaaggaggttcttaccacgccttgtttcttagtaatgattagttagatgagtctttgaattcgtatcttgtaccaggttttacggaacaagtgttgtggataaacacattacatattttttgaaaggaatgtattatcatgattttagtcggaattgacattggtaaaaacaaacacactttttccataattaataaaagctcaggtgaaatacttttatctccttctgatttttctaataatctggaaggtttcttgtttctcatccaaaaattaaacaactatactaaatcagaacttcttatcggcatggaagatacaggtcattatcactttgccttacttaagtatcttcttgacagacgatataccgttgccctgattaatcctacaaccactgatcttacaaagaaaattacaaggcggtattactaaaaacgaccatcttgattctctcaccatctgggatgtgatttcctctaatcaccgcaataaaccttatcgtgttacaaagttaaatcgttttgacctctacgagcagaaacaattaacccgccatcatcataatctgaaagaagagttaaacacatacaaaaatcgtcttcaaaaatgcattgatattgtatttcccgaattcaactctctgtttcattctaaatatgggattgtatatatgaatattttaaaaatattctcttctgccaaagcaattgcaaatgctgatatacgaagtatccgtaaatgttttgaattcaaaggaaaaggaaaacgaatttccctatctgctgagcaactaaaacttattgccaagtcttctattggcataccttctgtcgctgaagaaattcaaatcagacatcttgtaagccaaattgaattattgaaaaaacaaatttctgagatagacaaaaggatagaagagttttccctcaaaaacaactctcctatcctcaccataccgggaatatcacatttttccggtacttctattatatcagaattaggagagatttgcaattatacaaaggcatctcaaatcatcaaatttgcaggtgttgctccatatcactacgaatccagtcaatttacggcacagcatacagccattacaaagaaaggctctaaatatcttagaaaaactttgtatcagattattttacctgttatcagtaacaacgaagttttccatgcctattacaccaaaaagttaaatgaaggcaaaggtcacagatgtgctcaaggtcactgtatcagaaaactcttaagagttatctatcatatcttaagcacaggacaaccatttaatccagaacttttggtataacctaacataaattaccttttgcgaattaccttccacagagggtttatttagcgtgccacaaaattcacaattatttatatgttttcaatgttcattctcagctaactaaattttatttttttcaaaaaatacttgatttttatatagttag

SEQ ID NO: 735 - DNA, 1581 bp, unidentified
  source 1..1581: mol_type = unassigned DNA; note = element_0aaa64c
  misc_feature 1..3: note = core
  misc_feature 4..249: note = LE
  misc_feature 250..1452: note = CDS
  misc_feature 1453..1581: note = RE
  misc_feature 8..224: note = bridgeRNA
gttcgtattatgaggttaaccagtttttactggttgaccttttttatataggacctattatatcggtagccagggtaggacgtacgggtgcgtgggaccatgatctcgtcaactaaactgtccgccccctacttgaagaaacatgtttgaggctggttgggacaacgatctcgtataacaagcgaagctatgatactgcaagaggaataggggctactggcaaaacaaatggagaggaagagataaagaatgaatccagtaatcggtctggatgtttcaaaaggggaaagccaggttcaagcatttttagataaaggaaagccgtttggaaaaagttttagtgtatcacacacgactgagggactagatgccttacttcattatttgaaagtggtagaaaatgagactggtataaaaccaagtgtaatattagaatcgacgggacattatcacactcctgtcattcagtttttagaggaacagaattatttatacattatgatcaatcctttactgtcttatcaggcaaaaaaatcgagtttgcgaaatgtgaaaacagatgaaatagatgcttttcgcttgtgtgaactgtattacaaagaagagcttgaaccctataaaaaaaggggtatccaacgtttaaaccttcgtcatcttactagacaacatgaaacccttacgggtttgtatgttcaagctaagttacagtttcatgcgattttagatcaagtgtttcctgaatataaaggggtatttggagatttgtattcaaaagtttctctaaacatactcctggaatttagtacgtcagaatctgtggtacaggctggagaaaacaaggtaaccgataaaatagcgagtttatgtatgagtcgttcggaacgttgggcacaagaaagggcaaagaagctttatgaagcagctcagcgtaacccatttaagagcatagtctatcaaagtcatttgataagccttgaaatgtatattcaactgcttctccaataccaagagcatctagcaaagttagatgatcaaatagatgccctggcaggagaaatagaagaatataagattatccagtcgattcccggtatcggagaaaaaatcgcggcaacgattatttctgaaattggagaaatcgaacggtttaatcaccctaaaaaattggttgccttctctggaatcgatccaagtgtacattcatcggggaaatttacagcgacgattaatcgaatcaccaagagaggctcaagcagactgcgacatgccttatatatggctgttctctgtgggatcagatcctctcgtaataagaagctaaaagagttctatgatcgaaagcgagaagaaggaaaaccttttaaagtcgcaatgattgcatgtgtaaataagcttattcattggatttatgccttactaaaacgtaaagaagctttcctggatttagcttaacaaaaacaattaggcaaaacatgaaaaaccttccaatataaatgaggaaggttatttggcatgaatatttttagtatatcattttgtttataggatttttattgaaaaatgttgacatcctattagctg

SEQ ID NO: 736 - DNA, 1454 bp, unidentified
  source 1..1454: mol_type = unassigned DNA; note = element_0aab861
  misc_feature 1: note = core
  misc_feature 2..224: note = LE
  misc_feature 225..1256: note = CDS
  misc_feature 1257..1454: note = RE
  misc_feature 13..236: note = bridgeRNA
ctgattcatgctgggggtgcgtttcggctgttgtcgtagcgttcggagtgccggtcggtgggctcgacttagggcctgtcgctcttcggggttgacctcataacgatgtgtctgccggccggtgttctgatccggggtgtggctcgaaagaggcgcgagctcaacgaacccaaatcaggagtgcccacctcggttccccgtcaccgagaggaaggcatgaactgatgaccatcatcattggcatcgatccgcacaaggcgtcacacaccgccgtcgcgatcgaccacaccgagtgtgtactcgacgaacttcgtgtccgagcctgcgcggctcagaccgatcggttgcggtcgtgggcggcaccgttcccggatcgggtgtgggcgatcgagtccgcacgcgggctcggctatctgctagctcagcagctcgtcgctgcgggagagaccgtcgtggacgtcccagcggtgttgtcgacacgcacccgattgttggggtcgggcaaggcacagaagaacgatccgaacgatgcccgctcggtcgcgattgctgcgttgcgcaccgacgggctcgcccgtgtcggtgtcgatgagcacgcccaggtgttgaagctacttgcgaaacgacatcgcgatctgggtcggctacgcggcaaagccgcttgtcgaattcacgcgttgttgatggaactcgagccgggtgggatcgccaagagaatgaacgtgaccagggcaaacgacctcctcgaccaggtcgtggtcgacaccgagatggcagcacaccgcgtcggcgtcgcccgcgagttcgtcgcggacctcgcccactacgaagcgcagatgaagacctcgagaactcggctgcgtcacgccgttgcagcaacgtcgacgtcactgaccgacatacgcggcgtcggcgtggtgaccgccgcgatgatcatcggccacgtcggcgacgtctcccgattcaagtcagctgcgcacttcgcgagctacaacggcaccgccccgatcgaagcatcatcgggtgaacgtcgacggcatcggctcaacccgcgcgggaaccggcaactgaactatgcgatccacgtcgtcgcgatcacccagctgcgctacccgtgcgagggacgcgagtactacgaccgcaaacgcgccgagggcaagagcgccaaagaagcaatccggtcgctgaagcgccagatctccaacgtcgtctaccgggcactcatcgccgacgcacgtcgatcgtccagccagtgatcggcgggcccgggaggacaatcaggcacgacacgaaatccagcgtgaccggctcaacatcctgaatggccggctcttcggatcagtcactcccggacccaacaaccaaccctacgacgccacctccggcaacgccagaggctcgaaccctcgcgcctcatccaccctcagaaaccagggcttgacacaaagaggctt

SEQ ID NO: 737 - DNA, 1442 bp, unidentified
  source 1..1442: mol_type = unassigned DNA; note = element_0ab0f7a
  misc_feature 1: note = core
  misc_feature 2..143: note = LE
  misc_feature 144..1166: note = CDS
  misc_feature 1167..1442: note = RE
  misc_feature 1207..1440: note = bridgeRNA
atggaatggacgcctccccccgcaagggtaccgatgaagtgagtcggagggataagtagagaagaggggttctcacagcccaacggcatcaaatgtgccaaagtggaagttctgaacaaaccacttgagggaggagaacccaaatgaagcatagcgtatatggcgttgatgtggcaaagcgcgtgttccaagtgcattgcgtggatatggagacgggcgaaatcaccagcaagcagatcaagcgtgctggatttttggagcatttcgtcaaccgtgcgccgtgcctgattggcatggaagcctgcggcggtgcccagcattgggcaaggcggctgatggagatggggcaccaggtgaagctaatgccaggcaaagcggtcaaggcattcgtacacggcaacaagaacgacgtggctgatgcaagggcgatctggatggcggtgcagcagcctggcgtcaaggcagttgcggtcaagacggaggcgcaacaggcggtactggcgctgcatcgaatgcggcagcaactggtgaagttccgcacgatgcaaagcaacgggttgcgcggcttgctgacggaatacggcgaagtgatggcggttggccgagctgctttggaccgggccatgagcgatgtactggcaagattgagtgatcgattgccggcggtgttgatcgacacattgcgcgagcaatggggaatgctggaaaagctcgaccagcagatcgccgcgatcgagcagcggctgtcggcgtggctgaagcaagacaaggcatgcaagacgattgccgagattcccggtgtcggcttgctgacggcaacggcggcggtggcgacgatgggcgatgccaaagcattcaagtcggggcgcgagttcgctgcctggctcgggctggcaccaggccaaacgggtacgggcggccgggtgcggcttctggggatcagcaagcgtggcgacacgtacttgcgcacgctgctgattcacggtgcccgagcggtgctcacgcatgcgaaggagccaagcgcgtgggtgcaagagatcagcaagcgccggccgccgaatgtggtgacggtggcgctggccaacaagatggcacggacgatctgggcgttgttggcgcatgatcggcagtatgaaagaagttatgtgagcgtcaagccggcgtgagtcggctgacattgaaatcaaccagtttgtaacaaaggatgggcacgtcgaaaggttgcgcaaggtacaaagtgtgatggcaaacaggtcagaccgggactcacgaagcctgaatgattttctgggctaacagcccgtcaaggaaatgaggcgtgggtcagcggattccattaaggccagcaggttcgacctgcaacaaggccggatataaaactgcagcctagcctgtccaacagcacacgatgaattccttggcaaacgggaggcgtccatata

SEQ ID NO: 738 - DNA, 1400 bp, unidentified
  source 1..1400: mol_type = unassigned DNA; note = element_0ac0477
  misc_feature 1..2: note = core
  misc_feature 3..84: note = LE
  misc_feature 85..1125: note = CDS
  misc_feature 1126..1400: note = RE
  misc_feature 1145..1388: note = bridgeRNA
tgatgaggtggaacggcccgctccgacagcatcaagtgctaaaacgtggccgttgctcgaacgccacaaaggagggaccgttccatgaaatatgttagcactatcgggctggacttggccaaacacgttttccaagttcacggtgccgatatcgaaggctcacccttgttcaatcgaaaactgcgtcgcaacgaagtgctgcgcttcttcgagaaaattcctccctgcctagtcggcatggaagcttgtggtggggcgcactattgggcgcgagagatcgcgagcctcggccatgatgtgcgcctcattccaccggcttacgtcaagcctttcgtcaaacgcggcaagacggacgcggccgatgcggaagccatcagcgaggcggtgatccgcaagaccatgcgcttcgtacccatcaagaccgccgaccagcaagcggacgcaatggtgctgaaaacacgtgctcttctggttcagcagagaacgcagtcggtcaacgccttgcgcgcacatctggctgaattgggtattatcgcggctggcggccttcccaacgttgcggcactggtggccatcgttcgggaaggtgaagatactcggctacccgcggcggcacgcttcgccctcacggctattgccgaccagatcggcgccttggccgatcagatcgacgagctcgaacgtaccatcattacggagtcgaagcgcgacgaagacatgcgccgactgacgacgatccccggagtcggcgccattaccgcggcgaccataaaggccctggttccggatccaggcggcttcaaatcggggcgccacttcgccgcctggatgggactgacacccaggccccattccagcggaggcaaagaacgattgggtggaatctccaaaatgggcaatcccgaactccgcgttctcctggtcctcggggcaacagccgttctccgaattgcccggaacgatgatcgggcacgactttggctaaaagcgctactcgccaggcgtccgttcaaggtggccgctgtcgcgttggccaacaaaatggcccggatcatctgggtgcttctgaataagggcgggatttacaatcatcctgagccgcactcgctcactgcggttgcctgatgaatattatgacccataaaccaatctgaccggcgtaggccgacagatgcaaggtgcaattacaaacgatgaacccacgggacgaaatcccggaacgagcgaagccgccaacctcactgcacttaaagtgcgtggatgtgatttagctcctcgcttcgcggatctcatcgaggccagcggtcgtgtaccgcactcagaggccgtacatatgaacgcaccgtcctcgcgtgtgaaatcgattgagaagcctcttgcaccgcgggccgttccacata

SEQ ID NO: 739 - DNA, 1483 bp, unidentified
  source 1..1483: mol_type = unassigned DNA; note = element_0ac6554
  misc_feature 1..2: note = core
  misc_feature 3..226: note = LE
  misc_feature 227..1462: note = CDS
  misc_feature 1463..1483: note = RE
  misc_feature 6..222: note = bridgeRNA
ctaatgggagcgaccgggtctggtagggcttggttccgagcccgccggtcggtgagcactgtgttcgctagggacttgatccctgccgatagatcgtgccctggctggtcggtgaggctgcctgtaacaccgatggggtgtcgtgcctcgagcactgatccattaggccgtgtcgggcaccttctgggttcatcgagaaaattgatcagagctggaggtagctggtgtgatcttcgtaggagacgactgggccgaagcccaccatgacgtgtacgtgtgcgaccagtccggggcccgactggtgcagcgtcgcctgcccgaaggcctggaagggatgcgggtgttccacgagctgctcgccgaccatgccggggatccggccgaggttcacatcggcatcgagaccgatcggggcctctgggtgcaggcgcttgtcgaggtcggctacatggtgtacgcgatcaacccgcgggcggcgtcgcggtatcgggaccggcacacggtgtcgggggcgaagtctgatccgggggacgccaagatgctcgccgagctggtgcgcaccgaccgtcacaatcatcttcgtgtcgccggtgacagcgacttgagcgaagggatcaagatcctcgcccgagctcatcagaacttgatctgggaccgcatccgggccacgaaccggctgcggagtgcgctacgcgagtacttccctgctgccctcgacacgttcagtgagctggccgatcgcgacaccctcgccgtgctcgaacgggctccgaccccaatccaggcggcggcgctgaccgaggccaagatccgcaacgcgttgcgtgccggaggccgcgcccgcaacgtcgacacccgcgcccgccagatcgcgcaggggttgagggtcgaagcgctctccgcacccggcccggtggtgtcggcgttcgccgccacgacccgctccagcgttgccgtcatcgccgagttgaaccgtcagatcgctgcgctcgagaccgatctggccgaccattttgagcagcacccggacgccgacatctacctctccctgccaggaatcggtgtcatcctcggcgcccgggcgctcggcgagttcggggacgacccgaaccgctatgccgacaccaagtctcgcaagaactacgccgggacgtcacccatcacccgcgcctcaggcacccgccgcgttgccctggcccgcttcatccgcaactcccgcctcgccgacgccatcgaccaatgggccttctgctcgctgcgcagcagccccggagcccgagcgttctacgaccaccaccgcgcccgaggcgactcacaccacaaggccctgcgcgccctcggcaatcgcctcgtcggcatcctccatggctgcctccgccaccacaccacgtacaacgaacacaccgcctgggcccaccgcaccgacaacgacctcacgcacaaatccgggattgccgcttgacgcccaccggtcctggggtgt

SEQ ID NO: 740 - DNA, 1388 bp, unidentified
  source 1..1388: mol_type = unassigned DNA; note = element_0aca156
  misc_feature 1: note = core
  misc_feature 2..89: note = LE
  misc_feature 90..1121: note = CDS
  misc_feature 1122..1388: note = RE
  misc_feature 1154..1379: note = bridgeRNA
caatgggatggacccctccccactcctacggcatcgagtgccagactggagctgtgaagtaaccagtcacggaatgaggaggggtcgtcatgaagcttactcgcgtgggtgtggatttggcgaagcaggtcttccaggtgcacggcgttgatcgcgcagagcgtccggcgtggtgcaagcggctgaagcgctcgcgctggatcgcggatgtcgagcgtgacgtcgagccgggctgcgagatcggcatggaggcttgcggcggcgcgcatcactgggccagggttctgcagtcgaagggctaccgcgtgaagctgatcgccccgcagttcgtgaagccgtacgtgaagacgaacaagaccgatgcgaacgacgccgaggcgatctgcgaggcgatgagccggccgagcatgcgcttcgtggcggtgaagaccgtcgagcagcaggatctgcaggcggtgcatcgggtacgatcgagcctgatccgggaacgcactgcgaaggcaaaccagctgcgcggactcgtctatgagtacggtctggtggcgcctcgcgagctcagttccctgcggcgtgcggtgccggagtggctggaggatgccgagaatggcctgacggtgcgcttccggtcgctgctggccggtctgtaccgcgacctgcagcaactcgatgagcgggtgcgggagctcgatcgggagattgccgcaatcgttcgcgagcacgagccggtcggtcgcctcgagcagctcacggggatcggtccgctgacggccagcgcgctttacgccctcgtgggcgatggccgccagtaccggagcggtcgtgaactcgccgttgcgctcggcctcacgccgcgtcagcacagctccggcggcaaggagaagctgttcgggatcagcaagcgcggcgacaagtacgtccgcacgctgctgatccacggcgcgcgctcggcgctgcgcacggcggccggcaagccggatcgactcagtcgctgggcggtggccctggccgagcgttcacatccgaacgtcgcgacggtcgcactggcgaacaagctggcccggatcgcgtgggcaatgctgaggcacggaacgaactacgaaccggagcacgtggcggcctgaggccgggcgtcccgactgaccagaggagatcatccaccgcgattgcgagcatcccgagtgatggcgaacaggtcgaaccggcgtcggaataacctgggaatgtccacgggcgtgaagcccgaagaagcaatgaggagccgacgcgcgaatagcccatcgtggcccgacctcggctgatcgaggtcagacagaggccggatatacgtgagcagtcgtaccttgtcgccggaatacggagtgctggcaaagtggggtggggtccatata

SEQ ID NO: 741 - DNA, 1581 bp, unidentified
  source 1..1581: mol_type = unassigned DNA; note = element_0ad8151
  misc_feature 1..3: note = core
  misc_feature 4..282: note = LE
  misc_feature 283..1458: note = CDS
  misc_feature 1459..1581: note = RE
  misc_feature 36..257: note = bridgeRNA
cacgtataatccaatcatcggtgatggtgattggattttcctttctcccgaactcttccgggtaattccttaccatctctggtatatttagtttaggcgctgtggatctgtatctactgctctacagctttgactggtacgaggtgactcagaccacagcttttcgtctattactgttaatcagtttgttaacgcttgacgtttctatttgcgtgattacacagccgaattctctgtggaagacaacagcgccaaaatatttttaaaaggaggtcttttaccatgtctatgtactttgtaggaattgatatttcaaagtacaaacacgattgctgcataatatctgcagccgatcagcaggtcgttgcaaagttcgttatccaaaatgataagaacggatttaatgaacttctcacccacctgcattctctctccaataccgaggacataaggatagggtttgaatctacttcccattatgccctcaaccttaaactctgtcttgagaaagcccaccacagctttatggaaattaatccatgtctcatttcagcgtttaataaatctacgactcttcgtagaactaaaacggataaagttgactgcgaatcaatagcccgttggcttatgactgtagagtacaaaccccatttaattggattttatcactcttactcgctaaagtcactaacccgtttaagagactgcttggttcgccagaggtctctataccttgtgaagattacaaatgtcctggatcatacctttcctgagtttaagccgttttttaaggaaaggtttagtaaaacagccctgtatcttctcaataactatggttctgccgagaaaatgtcccgtatgaatactgcttcatacgaaaaactttattctctgtctcgcggtaagttttcccctcaacagttccttgaactgaaatctcttgccgtaaacactgtaggcgtaaacaatgaaatctttgatacagagttgaagtgtctcttaacgctttacagtactttagatgaacaaatctctgttcttgaatcaaagattattgaactcattaatgatgttcatccttacttcatgtctattccgggaattggtccgatatctgctgctgtcatttatgctgagtatggagatatttcaaactattcttctcctgcacaaatgttggcgtttgccggacttgagccgggaattaaccaatccggaacggaaaatcatggcggaagaatggtaaagcgcggttcctcgcaacttcggtatgttctcttgaactgtactttgccgttaatccgttttgatgtgacttttgctacctattacgcaaagaaacgttccgaaggaaaacctcacagggttgctatttcacatgtcgctaagaaacttgtcagagtcatttttgcattggagaggcagaaaacttactttaacacaaaggctcttcgctgacagataatactttgtctttttcaagccacctgatatacggttaatcaggatggctaattcgctgtgcaattttcaaggttcattaaactttttaacttttactattgacttctaatagtttgt

SEQ ID NO: 742 - DNA, 1160 bp, unidentified
  source 1..1160: mol_type = unassigned DNA; note = element_0af5e82
  misc_feature 1..2: note = core
  misc_feature 3..149: note = LE
  misc_feature 150..1148: note = CDS
  misc_feature 1149..1160: note = RE
cttctgtatctcggatctgctattttgcccccgtcaccttccttggccgaggctggtgacggggcggtgtatggcgtctgagccttgtggcctgaccacgtctgctagcgagccagcaccgtctctctttcatcatctcgaacagttggatgcggccgacaaggaccgcggagcagaaggaagagagcatgaacacggtatcatctgaacaggtcatcggcatagatgtctcgcgcgactggctggacatctattgcctgcccgatcggaagcgccttcggttgccgaacacatcggagggccatgcccatgtggtgtccctcgcacggcggcgtggcgccctggtctgcttcgaagccaccggcgggcaggagtggcggttatgggcttccctcgacgcggcgcggatcgtcgcgcgtcaattgccgccggcacaggtcaaggcctttgccgccagccgtggcacccgggccaagacggaccggatcgatgcggaactcattgcccgtttcatggtattccgtcccgaggccggacgtcgccatccgaccgggaaattgcgcgcgatcagagcttcgacatcgaagcgagcgcaactcgtcgaaatgcgtaagcggctgctcgtccagatcaaggcacacgaaaaactcgcgaccgctggaatgttcaccgacatggacgtggagttgaaggctctgttagataccaggatctcagagctggaagaacggattgagcaggcagttgcggccgatggaacactggccgaaaccgcccgcatcctgcgctccattcctggggtcggcccggttgccagcactatgctcatcgccgaaatgcccgagctcggggccatatccggagaacaggccgcagccttgacggggctcgctcctatagcgcacgacagcggtgcgttgcggggcaaacgaaccatcgccggagggcggcgcgccctgcggcatgtccacttccaggccgccctcgtcgcagcaaatcataaccccaccctgaaagccttcgcgcagcgactgcgcgacgccggaaaaccgcacaaggtcatcatcactgcggtcgcacgaaagctcgtcaatatcgccaacgctctatgcaaagcgcgtaaaccatggggccttcaaggcgcatgacggatacagttg

SEQ ID NO: 743 - DNA, 1374 bp, unidentified
  source 1..1374: mol_type = unassigned DNA; note = element_0afdb27
  misc_feature 1: note = core
  misc_feature 2..84: note = LE
  misc_feature 85..1104: note = CDS
  misc_feature 1105..1374: note = RE
  misc_feature 1141..1371: note = bridgeRNA
tactgagatggacccggcgccccttcggggaggcgcgttacatactgaatgtcgtcttcaccagacaacatcaggaggttcatcatggaaatcgatattctcggcattgatctagccaagcacgtcttccagttacatggcgctgagcgcagtgggcgggccgtccaccgctccaaagtcggtcgtggcgcattaatcgagaccgttcacaagcttcgtccccgaatcgtcgcgatggaggcttgcagttcagcccaccactgggcacgtcgctttatagcattgggtatcgaagtgcggcttataagcccccaatatgtgtcgccgttcgtgaagacgaataagaacgaccgtaacgacgctgaggccattgtcgaagccgtctctcggcccacaatgcgctttgttagcattaaatcggtcgagcaagaggatattcaagccgtgcatcggatgcgtgcgattctggtccgccagcgcacggctatcatcaatcaaattcggggtttgctggcagagcgcggcttggtcactgcacgctcgccacaagcattcaagcgtgcgataccgatctcgttgggcaatgagggctctgaactcaccgccttctgccaggcactgctcaccgagatgttgcaacatctccaggcattggaagcacgaattcattggcttgaagtgtcgatcaaggagttcgtgaagaattccgagttgtgtcgcaagatcaccgctgtcgagggcgttggtccgcttactgcaaccgctattgtcggcgccatcggcgacgccaaacagttctccaacggccgccatttagctgcatggttgggcttggtgcctcgccagtactcctcgggtgggaaagcccgtttgcagggcattagcaagcgaggcgatacctatttgcgaacgctcttgattcatggcgcaagaactgttttgcaatacgcgggagctaagacggataaacgaagccgctggctgcagcaattgattgcccgacgtggctacaattgcgcggcggtggccctagccaacaagaacgcgcggattcttcaagttttattaagcagcgacgcggcgtatcggccggcggcagcatgaacgtacgatagattgagattggtgtttcatccagcgcaggtttgcgtagctcttataggtgatgacgaaattggtagaaccagcatcctgaaacctgccttcagtgccggctgagtaggctcaagccgatgatttgctcaggatagggtgcgcggatctcatcgaggctgcgggcgtgcttcggcaactgcccacaagcaagccgaatacatgcatgcagaccatttccagtcaccacacagagcttgcaaaacgcgtcgggtccataca

SEQ ID NO: 744 - DNA, 1177 bp, unidentified
  source 1..1177: mol_type = unassigned DNA; note = element_0afe3f8
  misc_feature 1..2: note = core
  misc_feature 3..207: note = LE
  misc_feature 208..1155: note = CDS
  misc_feature 1156..1177: note = RE
  misc_feature 3..182: note = bridgeRNA
cttgtatgctaggacttgaagggaggagaagggacaaagcccgattctgactgttgacgcagtacagatccgtgggagatttcgcccctcctcctttcactcaagcgccgataaagaatgcatcaggctaagaccgacgataggaacaagcctgcgcccctgggtgagcccttcaagtgttcaaaaccatatctcgggggaatttcaatggcaatgccagtttctgtcctgatgccaatcgttggcgtcgatgtcgccaagaatgagttggtgatctttcaagctgagctggatctgcttgagacgattcccaacaacaagacggcgatcaagcaatggctgaagggcttgccaggggctgtcgaagtcgccattgagtccaccaatatctatcacttagagtttgccgatctggcccatgaggccggctgcacgatctacatggtggatggctatgagctgagccattaccgcaaaggcgtgaaaattcgtgcgaagaccgatgcgctggatgccaaattgctcgctcgctacctgaagaacgaacacgaagagttgcatccatggatcccgccttcccccctgtatcgcaggcttttgagtctttttcgccgtcgttctgcattggttcaggcccgagttggcttggtgcaaagctggtcgaatgaaccgctcctcaaaacagcctttgccgcgcaagtagcatcaatgcagaagcttgaggtgctggttgaaaagatgatcaatgatcacttgaaagaggctggcttactcgctcagttaaagcgctgcatgaaagttgaagggatcggatttctgacgggcgctcgcctgatcgcggcatttcaacgaggcgacttcagaaacgcggacgcattcatcgcttttctaggaatggatttgcgagtctcgaaatcaggacagaaagacggtcgaaggagcttgaccaaacgtggagatcccgaggcacgccgacttctgcacaacgcggccatgtcggccagccgtacgtcaacctggaacgggttttaccaggagcaaagggatcgaggattcagtaccacgcaagcgctggtgatactggctcgcaaactcgctcgaatcgtattcgccctgctgaaagggcagagcgaataccaaccgaaagcaggttgaggcttcccctcaaccatagaat

SEQ ID NO: 745 - DNA, 1431 bp, unidentified
  source 1..1431: mol_type = unassigned DNA; note = element_0affaab
  misc_feature 1: note = core
  misc_feature 2..60: note = LE
  misc_feature 61..1101: note = CDS
  misc_feature 1102..1431: note = RE
  misc_feature 1208..1425: note = bridgeRNA
taatgggatggtccgccgccttcatccttggggatataagaggcgtacacaggaggcggtatggagattcacacgctcggcatcgatctcggtaagacgatctttcatctcgttggcctcaacgcaactggtgaggcagttgttcggaagaagttttcacgcaaccagttgctgcatttcacagcgaacctgcgtgtgcggttgatcggcatggaagcctgcgggggcgctcacttccttggccgtgccctgcgcgaacaggggcatgatgttcgcctgatgccggcgcagtacgtcaagccgtacgtgaagaccaacaagaacgactacatcgatgccgaggccatcgccgaagcggtagggcgaccgacgatgcgtttcgtgccgatcaagagcgacgagcaactggatatgcagtcgctgcaccgggtgcgggaacgctgggtggggcgtcgcacagcagtggtcaaccagatccgcgggctgctgctggagcgcggcatcaccgtgcgcaaaggccgtcggcatgccgaagcggcattgccctgcatcctcgaagagccggacagcaacttatcggggtctttacggatgctgctggcgcaactgcagtgcgaactgagacaactgcacagccagatcgagcaagtcgatgccgccattctgaaggctgcccatgagcatgaagcctgtcagcgactgatggccattcccggtatcgggccggtgatcgccaccgcgatcgtctcggccatcggcaacggtacggatttcaagaagggccggggcttcgccgcctggctcggactggttcccggccagttctccacgggcggcaagcagaagctgttgagcatcagcaggcgcgggaactgctatctgcgaagccttcttgtgcatggggcccgcgctgtgatgcagtgcagaaagaagcaatcctccggtctgagtgcgtggctcggcaagctcgtatcccgtgtccactgcaatgtggccgtggttgccctggccaacaaactggcccgcatggcctgggctctgctggccaagggagaaacgtatcggccgccgctgttggcggccaacccggtcaccgtctgaaaccatggtctgcaattgacgcccggcccagaacgccaggcttggaaatcgcatgcgcgattcccacaatcgcagaccaccgacggctacggcttagaaccatctgccaggtctgctggcgaacaaggagatggcacaacggtcgaacccggcgctctagaaacctgttaatcggaacaagccttcaaaggctgcgtaactagctaggacgagagcgcagcgcattccatcacgtgcccagagcaactgctcaccaaaaggccggatacattggcgcagaccatcctgccaccttcatttttcgcttgcagcaaggcggcggaccataca

SEQ ID NO: 746 - DNA, 1199 bp, unidentified
  source 1..1199: mol_type = unassigned DNA; note = element_0b09eb4
  misc_feature 1..2: note = core
  misc_feature 3..206: note = LE
  misc_feature 207..1187: note = CDS
  misc_feature 1188..1199: note = RE
  misc_feature 37..212: note = bridgeRNA
cttgtcttatgcatttggggtcgctgcatgcgacaaaggactgattttgccggggtgaccaccccggtaaaatcaggaaggggacgggtcggtaacaggcagaccataacgggtcggcttagagtatgaccgcgccttcttttccttgtgccctgaacggatacccgaggttcggcctcggatgacaagcatagggcatggaaaagatgacgcatagagttgcggcttccaaggccgaattgccacccgcatcgatcacaatcgggatcgacgtctccaaggactatctcgacgctgcccgtcaccccggcggtgataccgtccgtattgccaacacccgcaagggccagactgcgctcctgtgctggatcggcaacatcaaagccgttgcccgggtagtgttcgagccaaccggcccgtatcaccgcacactggaggaacgcctggcggccgttggcatcccgctgatcaaggttaatccacgacaggcgcggcgtttcgccggagccaccgccaaactatcgaagacagattgcgtcgatgcgtcgatgctggcgcgctatggtgccttgttggagcctgctgcccgtccagtccgcacggatctacaaaaccgcctggccgaactggtggccgcgcgccgcagtttgatgcgcgaccgcacgtcaacgctcaatcgtctcaagaccctcacgatcggcctgctgcagcgccacgcgcgtcatcgcttgcggcagatcgaggcgcagatcacatccctcgacgcggcgacagatgcgctcgtggcagaagatgcgcatctgttccggcgccgggacgtgctggccagtattccgggactgggaacggtcacggctcatgcacttctggccgacatgcccgaactcggcacgatggaagaaggtcaggcagcctcacttgccgggctggcacccatcacgcgccagtccggcacatggcgaggccgcagcttcatccagggtggtcgggccaccctgcggcaagcactctacatgccggccatcgtctccatgcggttcaaccccgacctcaaacgtgtttacgaccgccttgtcgcaaaggggaaacaccccaagatcgccattaccacaatcatgcgaaagctcgtcgtcctcgcaaacgcactgctccgcaaagatcgactctggacaccaaaagaaacttgatcacaacggata

SEQ ID NO: 747 - DNA, 1385 bp, unidentified
  source 1..1385: mol_type = unassigned DNA; note = element_0b0ad8d
  misc_feature 1: note = core
  misc_feature 2..88: note = LE
  misc_feature 89..1135: note = CDS
  misc_feature 1136..1385: note = RE
  misc_feature 1162..1382: note = bridgeRNA
caatgaaagggactcctcccctcctgatgcctcatcgggcagaatggatgagatcgttgaatcgtcatccacaagaagaggaggagtcatgcatcagcatacggcaatcggcatcgatctggcaaagcgcgtattccaggtgtgcgtggtcgacactcgccacccgggcgtgcgggtcaacaaggaactcaagcgtcgcgaattgctggatttcatgcggcaccaaccggcatgccgggtgtacctggaggcctgtgccggcgcccattactgggcgcgccagttcaacgccctggggcacgagacgaagctgatggcaccgcagttcgtgaccccgttccgcaagggccacaagaccgatgccaacgacgccctggcgatcgtcgaagccggcctgcgccccacgatgcgctttgtcccgcgcaaaggcctggcccagcaggacctgcagagcctgcaccgcgtccgggaacgcctgatcaagcagcgcacccaactgatcaaccagacccacggcctgctccaggaatacgggatcattgcggggcgcgggcagaaggcgctaaagcaggtgttggcgcaggccctggaagacgccgagaacgaattgacgatggcgatgcgggcgctgctggccgaacagcgggaggaactgaaccggctcaacgcgcgcctggccgagctcgaccagcgcgtgcggcagcaggcgcaggcgttgccgccctgccgcgctctgcaggcgatcgaggggatcggcccgatcggcgccaccttgctggtcgcggccctgggcgacggccatgtcttcgccaacgggcgccaggccgcggcctacctcgggctgaccccgcgccagtacagcagcggcggcaaagtgaccctgatcgggatcggtcggaccggccacccgcagctcaaagccaccctgatccgcggtgcccacgcggtcatcaagaccctgggcgacaagccggatccgaaaagccagtggctgcgggcgctggtggcgcgcgccggggccaacaaggcggcggtggccctggccaataagacggtgcgcaccgcgtgggcagtcctgcatcacggcaccgattaccgtcgggattacgaacacccgcgggcgacggcggcgtagccgagccggccccgtcaaccgcgttaccgtgttgccgagcaacgaaggatgagcaaacaggtcagaccgaccctctttgaacctgatcattgcgaaggctcgctgaagccttggcctcgctgaggagagagggtgcgcgacgttcattcgggtcaggggatagcgaccccatcgagagaccgactatacgcacgcatcggctgtgtttgtttcggacatcggggcttgcaaccggggaggagtccctata

SEQ ID NO: 748 - DNA, 1486 bp, unidentified
  source 1..1486: mol_type = unassigned DNA; note = element_0b189c4
  misc_feature 1..3: note = core
  misc_feature 4..234: note = LE
  misc_feature 235..1461: note = CDS
  misc_feature 1462..1486: note = RE
  misc_feature 1..214: note = bridgeRNA
cccttaccttgctcgtgggccctgggcgatgcttggggcttgggaagtccggcggtgccggtatggctcatggccccctgtcacttcgatggcctggggggtgttgccaccggcacggtcgggtgcgtgaacctctgatggggacatgcgactgatcgctggttcgtaaggtggatgacggcgagcgcacccaggacggccttccctcccacaacccgagtggaaggagccagggtgagcactcccgacgacgtcgatgtgtggatcggactcgatgtcggcaaagaagaccacttcgctgacgtcctcgacgacgacggcgagtcgctgttcgcacggtcggtcgcgaacgacgaggcagatcttgtcgcggtgatcgagcgagcctgcgggcacggcacaccggggttggtgatcgaccagcccggctcgatcgcgcagctcgcgatcgcggtcgcgaaccggcacgaggtgccggtggcgtatgtgccggggttggtgatgcgccgcgccgcggatctctatccgggcgaggcgaagacggatcgtcgcgacgcgttcgtgatcgcggacaccgcccggacccggcgccgcagcgtgcactggctcgatgccggcagcgacgagctgttggatcagcttcgggtgttgaacgggttcgacgtcgacctcgcagcggatctcacccggctgacgaaccggctgcgcgactcgttggtgagcgtgtcgcctgcactggagcgggctgtcgggtcccggctgcaccaggccggtgtccgggacctcctcgccaggttcccgactccaacggcgctgcgcgccgctggacgggcccggatcaacacagcggtgaagaagcggtcgccacgcgtcgctgccaaggtcgtcgacgcggtcgtggcggcgttggacgcccagacggtgacgatgcccgccgaggccgcggtcgggcgggtcatcgcggaactggcggtcgagctcgaccggatccacacgcgtcgtgacgcgctggctgcggagatcgaagaggtgttcttggcgcaccctttcggccaggtcctcgtgacccttccggggatcgggccgaggaccggagccaggatcctcgcggagatcggtgacggcacccgattcgcgaacggctcgaagctcgccagctacgccgggctcgcacccgtgactcgccagtccggcaccagcatccgtggcgagtcccagtccaggcgagggaaccaccggctcaagaacgccatgttcctcgccgcgttcgcatcgctgcgctccaccgagtccaaggctttctacgaccgcaaacgcgccgaaggcaagaagcacaacgcggcggtcatctgcctcgcacgacgccgctgcgacgtcatcctcgccatgctccgcaacctcgagccctaccgggcaccagcgacaccagccaacgacgacaccacctcaatcgctgcttgaaccccttgacaacaacatggggaca

SEQ ID NO: 749 - DNA, 1396 bp, unidentified
  source 1..1396: mol_type = unassigned DNA; note = element_0b28858
  misc_feature 1: note = core
  misc_feature 2..83: note = LE
  misc_feature 84..1118: note = CDS
  misc_feature 1119..1396: note = RE
  misc_feature 1157..1388: note = bridgeRNA
caatgaaatggactcctcccacctgaggcatcgatgtgccagactgtagtttcgacaaacagccaacggaaggaggagtccaaatgaagcttaaacgaattggagttgatctggcaaaaaatgtatttcagattcatggagtagacagtcacgagcgggtcaaattgagaaagcaggtcaagcgtactcagatgctggcgctgtttggccggatcgagccctgtgtggtggcgatggaagcatgcggcagcgcgcattactgggcgcgggagttggggaagcttgggcacgaagtgaagttgattgccccgcaatttgtgaagccgtatgtaaagagcggcaagaatgacgccaatgatgcccaggcgatatgcgaagcggccagccgtccgagcatgcggtatgtagtggtgaagacgccgcagcagcagacggatcaggcagtgcatcgggtcagaagccggttgataagagcgcgtaccgcgctggtcaatgaaatccgtggtttgctctcagagtttggcctgatcgggccggccaaaggtgtgggggcgtgcaggcgctttgtagcttacgccctggaagatgcacacaatgaattaccgggtgccatgcgcgaattggccgcacaactcatggaagaactcgcagacaagaatgcgcatatagccaggctggatgaccaactcaagcgccagtgcgcacaggatgagcgcatcaggcgtctcatggaaattgaaggagtgggcctggtcagcgccagtgcgatggtggcggcggtaggccatgcgcgccagttcaccagcggtcgcgatctggcagcctggctgggactggtgcccaggcagcactccagcgggggcaaggaacggctaggggcgatctccaaacggggagatacgtatctgcgcaccttgctcatccatggagcgcgatcggtagtcaatacctgcagagaaaagaccgaccgcaagagccagtggatcagaagcctggtgacaagacgtaacaagaacatcgccaccgtggctttggccaacaagaacgcccgcatcatctggacagtgctcagccgtggagaggattaccggccaggctggagcaatggcgtggcatgacattcaaaagtgaaatccggaagtattggtacaaactttccaccacgattgcaaaagtgaattgagttgatgacgaaccggtcgcaccggcacgcgtgaaacctgcctaatccataggccatcgaaggccgctaggtcgatcaggcacgcgtgagcggatattcatcatggctcagggataaccaaaatatcccagacagaagccgcatatacggaagcagtcgtactcaagttcgccaacaaaacaattcgcttgcaaaacgggaggagtccatata

SEQ ID NO: 750 - DNA, 1606 bp, unidentified
  source 1..1606: mol_type = unassigned DNA; note = element_0b2b237
  misc_feature 1..2: note = core
  misc_feature 3..278: note = LE
  misc_feature 279..1340: note = CDS
  misc_feature 1341..1606: note = RE
  misc_feature 18..301: note = bridgeRNA
ctcctaatataaaagtgtagtggctatactccccaacagccagctgggggtataggcctctcgttgcttaagctgttagaatgtagtggcattggttcggacggagtcctccttggacctcgcgtccgtcggaaagtctgtctgccagccactcattcgcagctgttcggtttacgtagattgaaccgcatcttgtgcgttcgtttgatacccaggagattgaataagcaatgaggaatggttgatccactgcaaatttatctctggaggtgtatctcatgttgaacgctgttggtatcgacgtttcgaaaggcaagagcactgtcacagtactgcgccctgcaggcgaaaccgtgcggaggcctttcactgtcgttcattctgtcaaagggctctcggagctggtctcctatgtcggaagccttgatggcgagaccagagtcgtcatggagacgaccggccattatcatgaacctgtccttaaggcttttctggatgcaggtatctttgtttcagctgtaaatcctaccctcgtcaagcaccatgacagtgataagaatccgcttcggaaagtcaagtcagatcctgctgatgccaggaagatcgccaaatatactcttgacaagtgggaacatctgcgtcagcattcagctatggatactattcgaacacaactgaaaacactgaatacgcagtttcacttcttcatgcagcagaaggtctccctgaagaacaatcttatttcccttctggatctgacctatcccggtgccaataatctgtttgacagccctgtccgcactgacggaagcgagaagtggattgattacgtccattccttctggaatgcggactgtgtccgcaagatcggtctgaaaaccttcacggaacgctatcagaacttctgtaagcaccatggctataactttcagtcggataaaccggaggagctttttaatgcttccaaagagcttgttgctgtcgttcctaaagatccgatatacaagcagctgattctcagcaatatcgaacagctggatacgatttccggacagatcgaagagttccgccgcaagatgaacgagcttgcctttacgcttccggaatacgacacagtcatgtccatgtatggcgtcggcccgacctatggccctcagcttatggctgagatcggcgatatttcacgctttgatcatcgctctgcgattacagcctttgcaggcgtcgatcccggtgtaaatcaatctggaacggtaaactacgaaagcaatcgggcttcgaagcacggagcgccgcgccttcgaaaaacacttttccagatcatgaccactttgctttagctggctcctgcggacgatccagtctatctcttcatgatgaagaagaaatccgagggaaaaccgtatcaggtttatatgactgccggagcgaataagttccttcgcatctactacggcaaggtcaaggagtgcctggctgttcaatctactgtcgaataacatgtggcaattcttttccccggccagcgcttacggtggcctttttgtggtacctccatttctggttcctgactcctcaaacttatacttgactttttattagtaga

SEQ ID NO: 751 - DNA, 1360 bp, unidentified
  source 1..1360: mol_type = unassigned DNA; note = element_0b2d1b2
  misc_feature 1: note = core
  misc_feature 2..73: note = LE
  misc_feature 74..1099: note = CDS
  misc_feature 1100..1360: note = RE
  misc_feature 1122..1357: note = bridgeRNA
taatgagatggtcaccccacaccctgcgagcgctatgctttcgcagggtgtttttaattcggagaccatcaccatgagcgacttggcactggtcggtatcgacctcggcaaacacaccttccatctgcacggtcaggacaaatacggtcgagagctgtttcgcaagaagctttcacgacagcagatgatgcggttcttcgccaacctatccgcttgcaccgtggtgatggaagcctgcgctggtgcgcatttcgtagcgcgcgagctgacagccatgggccatcaagccaagctgatttccccgcagtttgttaagcctttcgtgaagggcaacaaaaacgatttcgtcgatgccgaagcgatctgtgaagccgcgtcgcgaccatcgatgcgctttgtttcgcctaagaccgaggcccagcagacgctttctgttttgcaccgtctgcgtgaatcgctggtgggtgagcgcaccaaggcagtcaaccagatgcatggttttctgctggagttcggcgtcagccttccgcaagggttggcaatgatgaagcgcttggccagcgttctggcggagcacgaactgcccgtgcggctgacggtgctgttacagcgtctgcacgatcactttgtctacctggatgaacagatcaaggcgctggataaagagctggtttgccagcttgccgacgatgatctgggcaggcgtttgctgggcataccgtgtgttgggccgatcaccgccagcctgctggctgtggaaatgggcgatggccagcagtacggatgcagccgtgactttgcggcgtctgttggcttggtacccaggcagtacagcaccggcggaaaagccaatttgatggggatcagcaagcgtggtgacaagaatctcagacggttgttggttcagtgttccagggtttacatgcagcgactggagcaccagaagggccccttggctgactgggtgcgctcgttgctgacgcgacgtcactccaatgtggtggcctgcgcgctggccaacaaactggcgcgcatcgcctgggcgatagcggccaaccataccgaatatgaagcaggaccaagcaccatcgctgcctaaccctgcggttgttgcagtaccacgattcacctttcaggttttgcgataactgaacaacagatgaaatgaacggcctaccggcctggcgaagatcctgacagtgaaaccggctagctagaaaaaccgagcaagtttttaaggttcgtcaggcgcgactatcatcgtggcgcggggcataccccaattagacgccggatagatttaagcaagccaaccacttcacccgttaatcagtattgcaaaaatgggggtgaccataga

SEQ ID NO: 752 - DNA, 1241 bp, unidentified
  source 1..1241: mol_type = unassigned DNA; note = element_0b31164
  misc_feature 1: note = core
  misc_feature 2..215: note = LE
  misc_feature 216..1184: note = CDS
  misc_feature 1185..1241: note = RE
  misc_feature 34..198: note = bridgeRNA
ttgtatattaattttagttattataaatttgagtaattaagacatcagagtgtggaataagtccgagttttcattggtcatcgagaccggtagccatgttccgaccccatattctttacatcagaatccggatagttcgttaggtgtttgaacccgtattcgcaatgatggaccaagatgtaacagatgtccttaaaactaaaaaccgaacggtcatgaagtacattggcatcgacgtaagtaaagctacattcgtggtggcttactcctccgacaaaagtggggatatccgtacgttcgacaacacaaccacaggaatcaggcagttcatcggaactctccctaaagacggcagtatccactgtgtcatggaggcgaccgggaactacagcgcattgctgctgtatattctcaatgtcgccgggattattgtcagcatggagaatccgctgaagataaagaacttcgccagagccatgctctctacggtcaagaccgacaagatcgacgcacggctcatagccttgtatggggagaagatgaatccgcagcctttcaagatgcagggagaggccatcttgcggctccgccaaaagagaacggtcatacgtcaacttaccaagcaggttaccgccatgtcgaacctccgaggctccctcgcttgtttgcccgttccggacaaaggtgcgatccacgccgcagacgaaaccattaagttcctcgaaaagaaacgtgacaggcttcagtcggaacttacggatcttgtcgaagtcgagttcagccggcagctcgcgctcctgacatccatcaagggaataggaataactctcgccactgcactcatcatcactaccggagggttcacttacttccagaatgctaagcaagtatcccggtatctcggaatctgtcccacttacgaacagtccggaacttccgtaaacatcagaggacatatcaaccggaacggagacgcgtacacaagagggctcctttatgtcgctgcatggacagccagcaggcgcaatgcacaatgcctggagacttacacgaggctgcgcaaaaacggaaaatccggtaaacttgctatgatcgcagtcgctaacaaactcgtcagacaggcttttgcggtcgtcgctaatgataaagcacatatcgacggattcgtatccaacagaccttgacaaaaacgaacttcctatatttttacactctttttgcacctttttttatatagttcg

SEQ ID NO: 753 - DNA, 1168 bp, unidentified
  source 1..1168: mol_type = unassigned DNA; note = element_0b415e5
  misc_feature 1..2: note = core
  misc_feature 3..203: note = LE
  misc_feature 204..1139: note = CDS
  misc_feature 1140..1168: note = RE
  misc_feature 3..179: note = bridgeRNA
cttgtatgtttagacttgaaggggtgggcgggactaaaagctcgattctgactctgaccagtacagaccgtgggagacttctcatcccgccccttctacccaaagcgccgataaggaattcatcggtaaaaccgacgatagaggcaagccagcgcaagggtaaaccccgacaagcacctaaaccctagctccgaggattcgtcatgacaatccttactttgcagaccgtggttggcatcgatatcgccaaggctgaaatcgttgcttatcgcaccgatcgtcaagccactgactccatcaaaaacgatcgaacagccctcaaacgctggcttaaaacactgcccgcgcaaagtgctatcgccgttgaagctaccaacatctatcacctggacaccgtcgagctcgctcatgcaatgggccatcaggtctatgtcgtggacgcttatcgggtgagcaactatcgccgtggtatcggtcaacgagccaagaacgatccctgcgatgctcgtctgctggcgcgctatttgacgaatgaacaagacgggctgcgaatctggagcccgccacccaaggcctacacctcgctgaaaagcctgctccacaggcgtgcaacgctgatccagaaccacgctggtctgatgctgagctgggccaatgaacccttgctaaagaaagtgcaggccgcccagcaaaaggccttcaagcaagcggatcaggccattcaaaaactgctgcgcaaggtcagcaaagaggcaggtattgaagccaatatcgaccgttgcaaagccatcgaaggggttggcgaactgacagcaaccgggttggcgacgacctttatgcgcggtgattttgccaatggtgatgcgtttatcgcgtttctggggatggaccttacggtcgatgactccgggaagaaaaacgggccccggtatctgaccaaaaaaggggatccggaagtacgccggctggcttacaacgccgctatggcggcctgccgctcggctaaatggaagccgttttacgaggcgtatttggcaagaggcttctcaaaaacccaagccttggtagcccttgcccggaaactctgccgggtggcattcgccctgatgaaaaatcagagcgaataccgaccggcttgaagttacagggttgccctgcaacatagaat

SEQ ID NO: 754 - DNA, 1431 bp, unidentified
  source 1..1431: mol_type = unassigned DNA; note = element_0b41ab1
  misc_feature 1: note = core
  misc_feature 2..97: note = LE
  misc_feature 98..1153: note = CDS
  misc_feature 1154..1431: note = RE
  misc_feature 1193..1428: note = bridgeRNA
taatgaaatggactccaccctttatccctaacggcatcgtactgtgccaagcttgagcggctgcattcaagcgtaacgagataaaggaggagtcgatatgaatgttacaaccattggtttggatattgcaaagaacgtgtttttcgcccacggcgtggatgaacacgggaaggcggtgatgcaaaagaaactcagtcgcggccaggtgctggcgtacttcgccaaacgcccgccgtgcttggtgggaatcgaagccaccggcggcgcgcattactgggcgcgtgagctgaatcggctcggacacaccgcgaagctgatgccggcgcagtacgtcaaaccctacgtgaagcgcgacaagaacgaccccaacgacgccgccggcatctgcgaggccgtgagccgcccgtcgatgcgctttgtgggcctcaacaccgtggcacagcaggacgtgcagatgttgcacgcgatccggcgccgcctggtggggagccgcaccgcccttaccaaccagatacgcgggctgttgggcgaatacggcctggtgttcggtcaaggccccacacgggtgcggcgcggattgacggagaccctggccgaggacgatgcgcgtctgtccgtggccgcgcgcgagctggtcgcggacgtgcaacagcagctcacggagctggaaaatcgcctgaccgactacaacgcgcgcatcgagcgcgtgtgcgccgccgatgcccggtgtgtcaaactcgatgtgttgccgggggtcggtccgatcaccgccaccgccctggtcgccgccgtcaacgacggcaagcagtataagcgcggccggcacatgagttcgtccttgggcctaaccccgcgcgagcactccagcggcggtaaacagcatttgctcggcatcagcaagcgcggcaacacctacgtgcgtaccttgctgatccacggtgcgcgcagcgtgttgcagcatgccgcccagaagaccgatcccgacccgttgatccgctgggcgctggcggtacaggcacgccgcggcaagaacattgccgccgtggccctggccaacaagctggcgcgcatcgcctgggcgctcctggcccaggaacgcacatacgatccacgttggacgaagccgcgtggcgtaaacgcgattcccgtttaaggctaaggactcggaacgatttttaggaggtaacccaccaacgattgcgaaagtaacgaaatgaccgatgacaacccggttcgaccggcgttctgccaacccgttaaatgtggtggctcacttaagccgacaccctatctgggacagaacgtgcgcagttcatcgtggcccgggcatcccgcaaggcatgcccacttcaaggccggatatatacctgcgatcgatctccgttaagtcagcgccacttcttgcttggcaaactgggtggagtccatata

SEQ ID NO: 755 - DNA, 1356 bp, unidentified
  source 1..1356: mol_type = unassigned DNA; note = element_0b41c9a
  misc_feature 1..2: note = core
  misc_feature 3..1106: note = CDS
  misc_feature 1107..1356: note = RE
  misc_feature 1108..1346: note = bridgeRNA
ttatggaatggcccgcccctttccccagcgtctattatgatgctgtcgtgtgtgagaaagaaaggaacgggccaatgactatagtgatccttggaattgatctgggcaagaactcttgcagcgtagttggtgtcgacgcgaccggtagagttgtcactcgtcgggcgatgcgccgccaaacgctgattgattacgtggcgaagcttccagtctgcgtggttgcaatggaagcatgctgcggtgcccatcatctgggccggctgtttgcggcacaaggtcatgaggttcggctgatgtcgccggaatacgttcgcccatatataaaggcccagaaaaatgacgaccgggacgctgagggtattgccgaagctgcatctcgtccgaccatgcgttttgtcgatcttaagagccaggagcaactggaccttcaaacgctgcatcgggtgcgttctcgccttgtggccgaacggacgaacctcatcaatcagcttcgcgcaatcctgctggaacgcggggtgatctttccggttgggcggcgaaaactcgagttgggcgtggatggtatgcttgccgagggtatcgagagactgtcaccgcgtgtgcatcaattggttggcgaattgcgcgccgaatggaagctactcgacgcgaagattggtgccctaaatactgagtttatccaattggcgcgcaataatgccgccatgcgccgactgacgtcgattcccggtataggcgtactcaatgcgacggccctggtggctgcggtaggcgatgcgagtagcttcgccaaagcccgcgatcttggtgcttggctcggactggtacccagacaatacagtaccggcggtaaagcccgactgctcgggatatcaaaacgggggaatacctatttacgcaccctacttattcatggtgctcgcgcagcgttaccgtcgctttcaacgactgacacgccgctcggtcgatggttgaatgccatgatcgagcgaggcgtacaccgtaacgctgtggtcgtggctctggctaacaagctggcgcggatagcgtgggccaccttgcgcaaggaagcaggctttgaccgcggttacccggtagctgggtaattagatcggctacgcactaggaaaaacgtagcccaacgaggtttgcaggaaggatcgtgaagatggcctgacagtcgaacggcgtttagaaagcccgatcaaaaaaatggcattcactgccgaaccgtttatggggctctagacgtgcggatgtccatcttggctgtgagcatgctcacaagaccgcatacgttgacgcagactgatcagaacaccgtaaaatcctcttgctaacggggcgggccatacg

SEQ ID NO: 756 - DNA, 1351 bp, unidentified
  source 1..1351: mol_type = unassigned DNA; note = element_0b50220
  misc_feature 1..2: note = core
  misc_feature 3..77: note = LE
  misc_feature 78..1112: note = CDS
  misc_feature 1113..1351: note = RE
  misc_feature 1146..1346: note = bridgeRNA
tgatgtgatggacgccccttcccagcctaagttctgccacacttatgctgaatgtcttttctcagaggaacaacatcatgaactcgataaaagttgtcgggatcgatttagctaagtctgtttttcaggtatgtgtctggatgagtgatggaactgttgcatccaatcgaaaaattcccagaaatgaacttttggatacccttcgccagtttccagctaatacgttgattgcaatggaagcttgcgctacttcgcattactggggacgaaccttcaagtcaatcgggcttctcgttcgccttatcccaacccaacatgttaaggcttttacccgtcatcagaaaaatgatgctaatgacgcactggcgatctgtgaggctgcgctacgccctggtatccattttgtgacgataaaaaccgtcgggcaacaggatattaaagcacttcgcagcgcccgccagctaatggtcgaacaacgcacggcggtggcaaatcaagctcgggcactggctgctgaacaggggattgaactccctgtgggcattcatatcctgtcacaacgattgcctgaacttattgaagatccggcgctggatatttccccggtattacgcggtttacttttttcgttactggaaaaccttcattttcttgatgagcgcatccgttcgacggaacacaacattttggctttatgtcaacagctcccaaaatacaaagtactgatgacgataccgggagtaggacctctcattgccgctgcatttctaagtgaggtcaatgcagaacagtttacgaatggcaggcaactctcttcctggtgtggtcttgtacccaggcagcgtagttcgggaggaaaaaacaacctgtcctcaatgactaaaaatggaaaccgtgatctccgaacgctgattatccatggagcacggtcagtcatgttctggtcacagaagcgcgatgatgcactgggaagctggatgaaacatcttattgagcgaagaggcaaaatgaaagcgacggtggcattggctaataagctcacacgcattatctggcgattattaacagggtcagaaaatttcaatattaacaaagcttttgcaacaaactaattgcccgtttttctggaatcaccatagtttaactgagtttgcagacactgatgagaaaacggcagaccgaccctgtaaaatcctggcgtgagttctggtagcaacataccggtgaggtgataaggaaacagggtgcggatgacatcatggcgcaggaaacctctttccataaatgacgccggatatatgacagcgaaccgtatcaaatcagtatttgcataacactgggcgtccatata

SEQ ID NO: 757 - DNA, 1364 bp, unidentified
  source 1..1364: mol_type = unassigned DNA; note = element_0b5873f
  misc_feature 1: note = core
  misc_feature 2..71: note = LE
  misc_feature 72..1097: note = CDS
  misc_feature 1098..1364: note = RE
  misc_feature 1140..1338: note = bridgeRNA
caatggtatggactcctcacctttgaccaaataggttaaggtgaagacgcgaatcattaggagcccaaaccatgaaaaattctaccactatcagtatcgatttagctaaaactgttttccaagttgccttatttaataaatatggcgtaatgaaatctaataataaaatgagccaagctaaaatggttcagtttatcgcccagcacccagaagcaactatttgcatggaagcatgcggaaccgctcattattgggggcgtcgttttcaacaaagtggtcataaagtattacttgttcctgcacatattgccgcaaaataccgcacaggtaataaaaatgatgctaacgatgcgttagctatttatgagtcaattaatcgtcctaaaacttattttgtccaagtaaaaaaccttgatcagcaagacttggcaagtttacttaagctacgacaaggctatgtaaaacaacgcactcaaacagcaaatagaataaggggcttaggcctagaatatggggttaaaattcctaaaggtattgctaaaatacgcaaagatttaccatgtttcctggaagatgcagagaatgagttgacgacgtctagtcgatttattttaagggatctactcgatcaacttttgttgctggatggtcaaattgatgaatcaacgaatagattagttgctagagctaaggaagtacctgtttgtatacgattgattgcgttgccaggtgttgcttggataattgccagtgcgctttatgcaagattgggagatggctcagcgtataagtgtggtcgtgatgccagcgcaagcgttggtgtagttcctgctcattcaggaacgggtggaaataataagttattagggataacgaaacgaggtgataggtgtttacgctcattacttgttcatggagcacgttcagttgttagtcgaattaaagacaagcaagatgggttgagttgttggataagagagcaactatcaaagaatcatttaaacaaaactgcggttgcttacgccaataagctagtcagaatggcatgggctattttgaagagtggtgaagaatatcgaacacctttagctcagtagtgtttgataaaccttgaaaaagtaactaagttaaccgagtataagcagtcgtaaaataataatgtaaagtgtatcaacgcacgcaaggcaaaacctgtgaggcacgacggtattcaaatacctcttactcgttaaggagctttgtaagtggattaagccattaaggttcggggtagctccccatcagaaaccgaatatacgtgaacttgctacatacatttaaatttattacgattaacggcttgctatgcaagaggagtccatata

SEQ ID NO: 758 - DNA, 1363 bp, unidentified
  source 1..1363: mol_type = unassigned DNA; note = element_0b5e62a
  misc_feature 1..3: note = core
  misc_feature 4..83: note = LE
  misc_feature 84..1103: note = CDS
  misc_feature 1104..1363: note = RE
  misc_feature 1112..1350: note = bridgeRNA
atgatggagtggacggcgcctgctcccggcagtgccctatgaggtagggtgattgcctcagcgccagacagggagccactccaatgcatgtcacgactgttggtctcgacctcgccaagcacgtcttccaggtccacggcattgatcaggatggacaggttctgatccgccggcagctccgccgaggcgagctcatcggcttcttccggcgcttgccgccctgcctgatcggcatggaggcgtgttccaccgctcacttctgggcgcgggaactggcggccctcgggcacgaggtccggctcatgcctgcggcttacgtgaagccttatatcaaacgcggcaagagcgatgcccttgatgctgccggcatttgcgaggccgtgacccgcccgaccatgcgctttgtggccatcaaaagcccagagcagcaggccgtgctgatgctccaccgcacccgcgagctgctcgtgcggcagcggaccatgctggtcaatgctctgcgtggtcatctggccgaatacggcatcattgctccccaagggctgccgagcgtccccaagctccgggaagtggccgagaaggcccgaggggcagccttgccggagctggcgtggcgctgcatccggctgatcatcgcgcaacttgaggaggcccatgttcggatcactgaggtcgagcaggagatcctggcctggcatcgcacgaatgaggtaagccaacgcctggagacgatccccggcgtcggcatcattacggccagcgcgattgcggccaccatttcggatccgggctccttccgctcgggccggcacttggcggcctggatcggcttggtgccacgccagagtgggacaggcggaaaggtgcggctcgggcacatctccaaacaaggggatcgatatctgcgccggcttctggtgctcggggccacgacactcttgcggcatgcccgcggcaaagcctcagcggctgcgggatggatcaacgcgctcttggcccgccgtccagccggcatcgtcaaggtcgccattgccaacaagttggctcgggtcgcctgggccgtcttgcagggcaaccagggttaccgcgctgcggccgcataagctgctcccaggagccggatgaggagtttgcaaggttggtggaggtggtgatggtgtgatgacgaaccggtcgagccggggatcagacaaacccgtgataagccgttgcgttcagacgcagcataaatgttggggacctgatccgcgaacttcatcaaggcccgcggtcatgaggccgcatcacaaggccgaacacatggctgcccacgaccagatcgtcaaaacgcaaaaaccccttgccacgcaggcgccgtccacac

SEQ ID NO: 759 - DNA, 1544 bp, unidentified
  source 1..1544: mol_type = unassigned DNA; note = element_0b6128e
  misc_feature 1..2: note = core
  misc_feature 3..278: note = LE
  misc_feature 279..1490: note = CDS
  misc_feature 1491..1544: note = RE
cttctaccaaaaatttctgtaaaatacatacaaagagataagcaagataacgatttttccttaggaattatcttttaaacttaaagtctatttttaagagataagaacctcaatacgagtctgttacttgcttacaatcccaattagttgattaggtctttgaacctctgtcatttggaaggtaggatcaagtcaagtacttgcttatctgtttgtatgtatattttgttgaacctttggttttttaattttattttgtacttttaaaaggatacgatgtgtataaatatttcttaggaattgatatatctaaatatagttttgactttagtttcactgatgaaactgaaaaagtcttatataaagaccactatcagatggatatgactgactttactaaacttaagtgttatcttgctccattctctaaaaatgagattttgattgtaatggaagctacaggtatttatcatttaactctgctctcttatctattagagcaagggttaaatgtatctgtagtgaatccattgtttattcatgcatttacgaaatccatgacaatcagaaagactaagactgattctaaagatgcacatattatctctatctttgcaaagaggaactatgccaccattagattatctagtgcttctgatattgaaacaatcaaacctatcgttagagaaaaagagaaacttactaatcaaatgtctgccataaagacagatataaaatctatagttaatcaggtattcccagaaatgttaaagaacacaaatatctttttaaaaagcagtttaaatctgctcttgcaagctcctagtaaacgaatcattaggaacttgaaagagaagaaaatagctcagcttttatcttgtgatactaagaggggtgctaaacctaaagttgatgccaaagagatactcgcgatggctaaaaactctattggtattaacaacaaatctttagaaaaaatcttagtctcaaaaatcaaacagttagagtttttacaaactcaactagatgaatttaatgaaacaatagaacagtttgttgatgaacatcaccatgacgacatggatttacttacttcaattggcggagtaggtaaacctagtgcagcttcatttttaactgaacttggtgatattgacaactttgcaacttataaacagctcacagcctttattggtactgacccgaccatttatcaaagtggtacttctgtaaaggttaaaggttcaatctctaaaagaggcaattcacatctacgaagagtgctttggcatatggcaagagctgctactgtttggaatgagactttaaaagcctattacgataaaaaacgcagtgaaggtaaaaccttcaagcagtctgttatcgcagttgcaaataaactcattcgtattattttttctatgttaaagaacaacactaaatttgatactaatttctcaagtttagctattaaaagtgtttcaaattgaaacattttaattagtttttttggttaagttttctcctgttttcataatagttga

SEQ ID NO: 760 - DNA, 1395 bp, unidentified
  source 1..1395: mol_type = unassigned DNA; note = element_0b685e2
  misc_feature 1: note = core
  misc_feature 2..86: note = LE
  misc_feature 87..1118: note = CDS
  misc_feature 1119..1395: note = RE
  misc_feature 1165..1387: note = bridgeRNA
taatggaatggtcgccccttcctaacacggcatctaagtgccaaagtggaaatgcgaattaccactaaccagaagaggcgaccgagatgaagattacaactgttggcatcgacttagcaaagaatgtgtttcagattcatgcagtggataagcatgggaaagtggttgtaaagaagcaactcaagcgtaaccatgtgattcttttcttcactaatctggaatcatgcctggttggcatggaagcctgtggtggcgcgcactactgggcccgaaagttggaacagctggggcacacagctaaattgatggcacctcagtttgtgaaaccctacgtcaagacaaacaagaatgatgtggcggatgcagaagcgatctgtgaagcggtgacacggccaagtatgcgctttgtttcgattaagaatggtgagcagcaagcattactatccgtacatcgagcccggcaaggtttcgtaaaagcacgtacagcacaagcgaaccaaattcgtgggctgttagctgaatatgggattctcatcccgcaagggattaggcacattagcaggcgtttgccggagatactggaggatgctgagaatgatctgccaggtgtgtttcgtcagctgctgcagcgcttgggtgagcatctcaatgaacttactcggcaagtagatgagttggaagtacagattcaggtttggcatcgggagaatgtagccagtcacaagctagcacaaatcccagggataggcccgataacagcaagtgcactggtcgctacgattggtaatgccaagtgttttaagaatggacgacagttagccgcttggttgggattggtgccacggcagcattccagtggtggtaagccaactttgctggggatcagtaagcgtggggatgcctatctgcgaacgttattgattcacggtgctagggcagtgatcagagtggctgaaaataagcctgatcatgaaggaagttggctggggcagttgatggaacggaggagcaagaacgtagcagcggtggcgctggcaaacaagaacgctcggactgtctgggcactactggcgcatgacaggaactacgagtctggctatgaaccatcgattgcatgaacagggtgtaacagtacgatgatagacttttagaaagggggaatccccaccgattgctcaggcaatcatgacatgatggcaagacaggtcagaccgtggcaggtaaaacctttttcacacagggagcgaaaagctcgacaggctgattaggaacctgccagcaaattccatcagggacagaggcaatagcctcaatcaaaagtccggatgtatggctgcaatctttaccttcttatcatcataaaatgaatgcttggcaaacaggggcgaccatgta

SEQ ID NO: 761 - DNA, 1229 bp, unidentified
  source 1..1229: mol_type = unassigned DNA; note = element_0b787c0
  misc_feature 1..3: note = core
  misc_feature 4..234: note = LE
  misc_feature 235..1221: note = CDS
  misc_feature 1222..1229: note = RE
  misc_feature 46..211: note = bridgeRNA
catcctatgtttgcaaagaaaaataaatagaagatttttattaattttcaatagaagaagggaaagaataaagctgtgattagtcattggtctaaagaccgttcagaatgccggttcctttccctctctgctataaaacttggacagttcattaggcgtgggagcctggatttaggattgataagttaaaagcagatttcttccatttacttttttttctctaaaaacaaaattatggaaaatttcaattacgtaggaatcgatgttagtaaattaacttttgatgtcgccattgagtctaatgggaagtatgtacaccacaagttcaagaataatgaggagggctttgcaaagcttttcagtaagcttagcccggatttacattgttgtgtaatggaagccagtggcccttactatcttaagcttgcgttttatctggcagaacatggtattgctgtaagtgttgttaatccattggtaatacgcaggttctcgcaaatgcgcttacttcgttcaaaaaccgacaagaaagatgcccttaccatagctaattatggaaaaacagagcgtccggaattatgggagaaaacacccacctatatactggaacttaaacaaatgcaggcccatagccagatgctgaacaaaaacaggtcagcacttgtaaggcatatcgaagcttttagtgctaacccggttcaaagcgcaatggttatgcaaagctgtaacgaccaggtaaaatctattgatcagcagttaaagctcatcgaaaaaggaatgaggcaaattattgaaaaagaacataaagaacataaagaacaatataaacaactgaaaagcataccgggaataggccctaaaaccgcaatggaattaattgttgcaagcgcaggctttacaaaatttacatctgccaagcagctatgctcctacatagggttatcgccaagaatattcgaatcaggtacaagcgtgaaaggcaaatcgcgaatatgcaaaatggggatgagcagggtcagggccatcctttatgtctgtacatggtccgccaagaaatcaaataaagcctgccgggaactctttgagcgattagttgaaaaaggcaaacccaagaaagtagcattaatagctgtggctaataaacttctaaaacaggcttttgctattgcaaccggaaaacaatattatgatgaaaataaattaaatttctcttgcatataaacacagtt

SEQ ID NO: 762 - DNA, 1410 bp, unidentified
  source 1..1410: mol_type = unassigned DNA; note = element_0b887d9
  misc_feature 1..2: note = core
  misc_feature 3..225: note = LE
  misc_feature 226..1410: note = CDS
ctcctgccattaattcctgtataactatcatataagcaggtaagattgccccaagagaagcagggggacttacaacttcctgggtcgccgaacccttattttcagtctgtcccctgcctcttggagccatgataagttgattgggcctttaagagcccttgtcataataggaggattggccggaggcaaccctgtttttttatattaccacaggaggtgcgtgttatgaattgctttgttggaatcgatgtatcgaaagaaaagtttgatgcctgctgcataggagaacaaggagaaaaggtgttttctctggcatgcacaatgagccgccagggatttgaaaatttttcccttcgtttaccagccgacaagacatcacttctgcttggcatggaatcaaccgcttcttaccatattgctcttttttcctaccttaccgcaaacggctgcaaggttgttgttgtcaacccccttcttattaatgggttttctaaacggtctctgaggaaaacaaagaccgacaggaaagatgccctcgtgattgcccaattcctaatgcaagaacaagcggccttatccgcacggatacctgattgtctaacaacagaactcagggaccttgcccggagaagagagaagcttgctgatcacgcaacctctctgaaggcagacatgaaaaggattctgtcagtcacattccctgagcttgagcacatgacggggatctttacgaaagcgaccctccgtcttttgattgagcatccttctgcacatgccgtcagagaagccggccactctgctgttgaggacattttcgtgacccggtcccgtggcaacaagcctcaagcttctgccaaggcccttatggaggccgcagtatcatccgttggtgttgtgagtcctgcaaaggaacttgttctaaagcaagaagcctcgttgcttatccatgtgcagaaccagatggaggaagtagcgaagctgctcaagaccctcttaaatgaaaggatgaaacaggatatggagatcctatgttccattaagggtgtaggagaaagtaccgccatgaacttcctcatcgagatgggtacagaggtggggatgtatgagaatgacaagaaattgatcgctgcatcggggcttgatccttcaacctatcaatcgggcaaatacgaagggaaaagcaggatcagcaaaagaggaaatcggcacttaagaagggtgatctggctcatggcgaccaaagttattattaataatggcctctttagaacctacttctataaaagaagaaatgaaggtttgccctataaaaaggcggtccttgccacagctcataagctcattcgcgtcatgtttgtaatgttgagccgtaaatcattttttgttgaaggaggaattaaatatagttga

SEQ ID NO: 763 - DNA, 1442 bp, unidentified
  source 1..1442: mol_type = unassigned DNA; note = element_0b8a2b4
  misc_feature 1: note = core
  misc_feature 2..84: note = LE
  misc_feature 85..1020: note = CDS
  misc_feature 1021..1442: note = RE
  misc_feature 1161..1429: note = bridgeRNA
tgatgtgatggatggcgccctgcttgggcatcagatgtgccattattggtttattggacaaaccatagaaaggagccatccatcatgacacagattacgacaatcggacttaatcttgcaaagaatgtcttccaagttcatggggttgatgcagacggacaggttttgttgcgcaaaccccttcgccgctcgcagatgctgacgtttttcaagacactgtctccctgcctgattggcatagaagcctgcgcgactgcgcactattgggcccaaacgctgcaatcgctgggacatgacgttcggcttatctcacccgcttacgtaaaaccttacgtgaagcgtcaaaagaatgatgctgcggatgcagctgcaatctgtgaagctgtttctcgtcctactatgcgctttgcgccggtaaagagcgttgagcagcaatcaaccctgatgctccattcagcacgggaacttctgatcacacagcgtacagccctgatcaacgcaattcgcgcacatttttctgagttggggatcgttgtcgctgaaggtgcacgcaatgtccgcagcctgcttgcgcttttgcaacaccgggaggagaagatgaacagctctgcgcaggttccagaaattgctgccactgccttgcaaccgctggcagagatgctgattgagactgacaggcagattgccaaactcgaccgcgcaattgtggaaatgcaccgtgacagtgaaaccagaaaccggttagcgactatccccggtattggtgtgctgactgcaacctatataacggccagtcttgcagcttttgccaaacagttctcctgcggacgcgaattcgccgcctatctcggacttgtgcccagacaatattccagtggcggaaagccacgtctgggacgcatctccaaaatggtcaatcgccacttgcgaaaacttctggttgttggggcaactgcagcgctctacagtatccggaagggaaccagccagtccgctcttgccctatgggcgaggcaatgactggcaaagaagccattcaggctcgttgcggttgctttggcaaataaaatggcccgcatcgcctgggccgttatcatccataagcgggactatgaagtcgacatcaaaacgaactcatcaaccaatataataaccgcataacctcaagcagatgatgaatctccggtaacggagttaactttggcggcgtgactatgacgtgatgacaaaacatagcggaatggaccgcataatcagaagaacccgtggcaccgtattgcgcatcagagcgcgctaaggtgatagggatctgatcaggcggataacatcagggccagcggcatgaaaacgctgcataaaaaggccggagacatgactgcacccgacccgctctgctcaatcatcaaggaatagacacttgccagacgggcgccatccagaca

SEQ ID NO: 764 - DNA, 1352 bp, unidentified
  source 1..1352: mol_type = unassigned DNA; note = element_0b8b302
  misc_feature 1..3: note = core
  misc_feature 4..226: note = LE
  misc_feature 227..1204: note = CDS
  misc_feature 1205..1352: note = RE
  misc_feature 47..215: note = bridgeRNA
gtcgtacatttgtacggttaaatgattttgaataattttatcttcaaatatcaggtatcacaagcatggaataagacagatctctggatggcaaaaatccgttttagacgttcggcccccatgcttttacatctaaagactggatagttcgttggggcgacatgagcgaccccgtgtttgcgacgagagtgcaaaggatgtgattcctgacaaaggattagaaaatatgacatacataggcatcgacatcagcaaggcgacttttgtagcagccatcccccatgggaaaagttaccgtaccgagaccttctcaaatgacgttaaaggcatccgcaggttcatctcaaggcttgaccctgccatccaccaatgcgtgatggaggcgacaggcaactactgtttccttcttctttatctccttgacaaggggggcatccgggcaagcctgatcaatccgaagaagattaaaaactatgcccgcgtgatgatgtccgttaccaagactgattccaaagacgcctgtctcattgccgatttcggggagaggctcaagcccgagccctataagtttccctcggaacagataatgcttctgaagcagaagaggacagtactgcgtcaactcaagaagcaactgacagcgacaaagaatctgcactcatcgcttgagccgctgccggttaaggacaaaaagtgcgttaactcactgaagcagaccatcactttcctcgaaaagcagatcaagtatatgcagcaggaaatggaggcagtcgtgaccgatgtgtttgacaggcagctaaaactccttacctccgtaaaaggtatcggggtcacgcttgccacggcactgatcatagccaccggcggctttacatactttgaaaatgccaagcagctgtcccgctttatcggtatctgtcccacaatagagcagtccggcacgagtatcaatatcaggggacatatcaaccgtaacggtgatgagaccctgcgttcgatgctttatgtggcggcttggtcagcgagccagcacaacaaggcgtgcaaggaatgctaccagcgtttgcgtggcaaagggaaatcaggcaaagtcgtcatgatcgccgtggcaaataaactcgtcagacaggcttttgctgttgtgacatccgataagccatatagcgacggcttcgtctctaagaaacctgatgcccccgtctgaacacttcctctctccttctggagggggaggccccagcggcgggggcggcctaaaccgcccccaagagcggaaagcgacagacctttttccaaataatctaaggtgattgtaatttttacctcattttatttggtttttaatatagttc

SEQ ID NO: 765 - DNA, 1441 bp, unidentified
  source 1..1441: mol_type = unassigned DNA; note = element_0b922a5
  misc_feature 1..4: note = core
  misc_feature 5..147: note = LE
  misc_feature 148..1167: note = CDS
  misc_feature 1168..1441: note = RE
  misc_feature 1207..1441: note = bridgeRNA
aaaatgtaatgaacgcgtcccaattaactcaagagcacaaggatgaataaaaggaaaatgcagacagatttagaggtcagcagaataccagcatcataacgctcatactggatgaataaagcttcctcaggctggagacttctcaaaatgacatatataccggttggcgttgatatcgcaaaacatctgattcaggttcacttcatcaatgagcatacaggagaagtggttgacaggcagttacatcgcagtgactttcttacctttttcagtaaccgagagccttgtctgattggtatggaagcctgtggaggctctcaacattgggcgcgagaactgacaactctggggcataaagtccgcctgatgcaggctcggtttgtcaaagcattcgttatgggcaacaaaaatgacgtgatggacgcccgcgctatctggatggcagtacagcaaccaggtaaagagatagcagtcaaaacggaagatcaacaatcggtgcttgttctacaccgttcacgcaggcaactggtgaaatttcggactgcacagattaatgctctgcacggaacgttactggaatttggtgaaaccatccataaaggtcgggcagcgatggacaaagaacttccagtggctctggagcgaatgaaaataaggctaccaccctatctcatcacgttactggaagagcagtacagcaggttaaatgaactggattctcagatagatggtattgaaaaacagctaatcagtgtggcgaagcaaagcgaaacctgtaaacggctggtagaaatccccggcgtgggtccgctaatcgctacggcggcgattgccacgatgggagaaacatcggcgtttaaatctgggcgtgagttcgctgcgtatgtcggtctggtgccgaagcaaactggctctggtggaaaagtccgcctgctggggatcagcaaacgcggcgacacatatctgcgaaccttgtttatccatggtgcaagggcagcgtcactggtagcaaaagagccggggccatggataacagaactgaaaaaaaggcgtccaaccagcgtagccattgttgctatggcgaacaagctggcgcggacagtatgggcgatagcagctcataatcgtaaatacgataagaatcatgtcagtgtcagaccctattaatagctgatactgatgaaaatttactcttttacttaagggtgaatgctgaaaagttgcactggcagccatagtgatgacaaaagacaggtaagaccgggactcgctaaacctgaattcttttttgggcatgaagcccgtcgggaaaatgaggtgtgagtcagcggattacataggggctcgcagctttgtggctgcaataaagccggatataaagctgcaacctacccgtcattgtcaaaacaatggaagccttgcaaacgggacgcgttcatat

SEQ ID NO: 766 - DNA, 1387 bp, unidentified
  source 1..1387: mol_type = unassigned DNA; note = element_0b9233d
  misc_feature 1..3: note = core
  misc_feature 4..85: note = LE
  misc_feature 86..1114: note = CDS
  misc_feature 1115..1387: note = RE
  misc_feature 1088..1374: note = bridgeRNA
tgatggcgtggatgccccaacctgacggcatcgcaatgtgccaatgtgatgcgtgttgaagccatcacagaaggagggagcatccatgtccgaggttacgattatcgggatcgatctggcaaagcgcatttttcacctgcacggtgccggtcacgacggatccgtcgtgtttcgcaaaaggctttcgcgtggccagctacttgcgttcatgtctcaggtaccgcggtgcgttgtcgccatggaggcgtgtgcgacggcgcatggctggggccgcgctttcgagacgtttggacatgaagtgcgcctgatcccgccggtctacgtgaagccattcgtcaaacgccagaagaacgattgcgcggatgccgaggcgatcgtggaagctgcggtgcgtccgacaatgcgctttgtggctttgaagaccgaagaccagcaagcccgcgcgatgctgtttcggacgcggcagatgtttgtcggccagcgcacccaattgatcaacgcccttcgcgggcatcttgccgagcatggcctggtcgcggcgcgaggagttgcccagctcaagaagcttgcggacgccatcggtgacgtgaaaacgcccttgcccgccacggtccgagaactcggccagatgtatctgaacgcgatcgaagggttgagtgaacgcattgcggaactcgaccgcaagatgggccaggctacgaaggaagcagcttcgacgcgtcgtgctcaaaccatgcccggcgtcgggccgatcacggcattggcgatcgaaacatttgcacctgatctgaccagctttcggcgcggtagggactttgccgcgtggctggggctcgtgccccgccagcattcgacgggaggcaaaccccgcctgggcaaaacctcgaagatgggacagcgcgacatccgaaggctcctgatctccggcgcaatggctgtgctgcaggcggtcgagcgctatggcagttcaaagcatggatggcttgttcgcttgcgggggcgcaagccacgcatggttgccgctgtcgccttggcgaacaaaatggcgcgaggtctctgggccatgatgacgaaacaggaagattaccggaacccggcggcgacgatggcatgacagcgcaaagcttgccatcgcgcctcggtacgtcgggcgtgtgaggagatcactgaacagtaagggcaaaggatcgacaagatccgggttggagaaagcagtatttgtcgtggagccgaagagctcgctctgttgatttgcctctgacccgcgcatcgccataccggcctgcggccacgttcgagccgcaccatgaggcctgatacatgaccgcatccgatcacgcgtctgagctattcaaataccacttgcacgaaagggggcatccataca

SEQ ID NO: 767 - DNA, 1207 bp, unidentified
  source 1..1207: mol_type = unassigned DNA; note = element_0b9adb8
  misc_feature 1..2: note = core
  misc_feature 3..208: note = LE
  misc_feature 209..1192: note = CDS
  misc_feature 1193..1207: note = RE
  misc_feature 12..190: note = bridgeRNA
cttgtatcttgaacctcgtgatggttagctcccatcgcacgagaccgaggcagcttgcacccatcctgaaggcatcgaccttgtgaggtagatcaagccctcggtctcttctctcacgccagcactgacactgaacggtatccaagggacgaaccctgcatgcaccaggcaagtgggcgtgacggttccatcgtcggagggttgtcacatgatttctctcggcattgatgtctcgaaagcgaaactgcacctctgtctgctgcgcgaggcggacggcaagcagaaaaccaaagtcatcgagaacacccgcgcaggcatcgcgacgctgcttgactggttggctcgccaggacgtcgagcgcccacaggcgcaggtgatcctggaggcgacgggcgtttatcacgaggccgtcaccgaggcgctacacgccgctggcatccgggtctgcatggtcaatccaaagcagatcaaggactttgcgcggggtttggcggtgcgcaccaagaccgacggcatcgatgccttcacgctggcccgcttcggccacctcgtcaatccacctgcctgggagcctccgccgccggccgtccgtgaactgcgggcgctgttgctgcgccaacaatcgctcgccgaggatctgcgccgcgaacgcaatcgccgtgacaccgtggcgatgaccacgacgccggcgctggtcctgacctcactggatgacaccatcgccttcctggagcaggaactcgctaaattgcaaggcgagatcgacgcgcatccggatcgccatccggacctgaaggccgacctgcaactgctcaccagcattcccgccgtgggacacaaggtcggggctcaactcctcgtcgtcctgcgcgaacatgactttcagtgcgccgaacaagccgccgcgtacctgggtgttgtgccgatcgaacgccaatccggcacctccgtgcacgggcgcccgcgcctgtcgaaagccgggccgtccagggtgcgagccatcctgtacatggccgccatcgtggcgatccgttacaacccacaggtcaaagccctgtacgaacgcctgttggcgcgcggcaaatctaaaatggccgacctcggtgccgcgatgcgcaaactcgttcatctgtgcttcggcgttctcaaaaaccggacaccgtaccaagccgattatacgaaagcggcttgacaggaaagacggtat

SEQ ID NO: 768 - DNA, 1366 bp, unidentified
  source 1..1366: mol_type = unassigned DNA; note = element_0b9ed85
  misc_feature 1..2: note = core
  misc_feature 3..86: note = LE
  misc_feature 87..1118: note = CDS
  misc_feature 1119..1366: note = RE
  misc_feature 1105..1348: note = bridgeRNA
tgatggggtggacggcccccgctcccggcatcgatgtgccacaacgtggtcgtctgtgaacgccacaacgagaggagccgtccaccatgcagattaccacgatcggtttggatctcgcgaaacactggttccaagtccacggtgtcgacgccaatggacaggttgtcgttcgccggcggctgtggcggagcggcgtgatcgcctattttcggtcgctcgagccgtgcttggtcggtatcgaagcctgcgcgacagcgcaccattggaggcgtgagctaatcgcactcggacatacggtgaagctgatgccgccggcctacgtgaaggcctacgtcaagcgcaacaagaacgacgccgccgatgcggaagcgatctgcgaggccgtaacgcgcccttcgatgcggttcgtgccgataaaggacgccgagcagcagtcggtgttgatgctccaccgggcgcgaagccttctggttcggcaacggacgatgctggtcaatgccttgcgcgctcacatggccgaattcggcatcgttgcgccgcagggtttgcggcatgtcgagatgctgaccaagacaattacgcatcaacaagagcggctcccggagctcgcacgctcgatcctgcagacgattgccgatcagctaaatggcacgatggccaggatccaggagatcgaagggcgcctggtcaggtggcatcggcagagccgggtcagtcgtttggtggcaaccgttccgggtgttggcatcatgggcgccagcgcgatcgccgcgaccgttcccaatccttcgttattccgatcgggccgagagttcgccgcctggctggggatgacgccacggcagaattcgagcggcggcaaggaaaggttgggccggaccagcaagcgcggcaacaaatacatccgcagcctgcttaccgccggcgcggttgcggtactgcggcatgcgcgcaatcgaccaacccgcgacggcgcgtgggtgcgcgctctgctggcgcgcaaaccaaccaaagtcgccgcggtcgcgctggccaacaaaaccgcccgcatcgtctgggcagtgatggtgcgcgaggctggttaccagccacacgaagttttcaggcaaccggcatagatgccgtcaaccgatacagcatgcgagggtgaagaggaggtgatggcaagcggtcgagccgcggatcgggaagacccgcaaaattcaaagcgcagagtagcgcgtagtcttgatagggacccgatcagcgaactccatcagggccagcggtcagatgcaccgcaccaaagggccggacatatgactgcacctgaccactccgccgaagccaaactcaacatccttcgcaggcgggggccgtccacata

SEQ ID NO: 769 - DNA, 1449 bp, unidentified
  source 1..1449: mol_type = unassigned DNA; note = element_0bae753
  misc_feature 1: note = core
  misc_feature 2..109: note = LE
  misc_feature 110..1153: note = CDS
  misc_feature 1154..1449: note = RE
  misc_feature 1211..1444: note = bridgeRNA
caatgggatggactcctcctcaccctacgctgctgagcagcgagaacggcgtcaatgcgccagaatggtagatgtaagtcaatcattcaacaatgaggagaagcccgagatgaagattacgcgaattggagtagacattgcaaaaacggtttttcacgttcacggtatcgaccgacatggtcgcgtgcagtggcaagccaagctcaagcgcgagcagtggattgcagctgtgatcgagcacgctgaagctggctgcgagatcggcatggaggcctgtgcctcatcgcaccactggggtcgagagcttcaaaagcagggctatacagtgcggctcatcgccgctcaattcgtcaaaccgttcgtcaagagcaacaagaacgatcgggttgatgccgaggcgattaccgaagccatgtgccgcccgtccatgcgctttgttgccgtcaaaagcgtcgagcagcaggatgtacaggcgatgcaccgaacgcgatcagccttggtctctcagcgtaccgccagagccaatcacattcggggcctggtgggcgaatacggcatcgtggctcccaagggaatcgggcagttacgccgggcaataccgtgctggctagaggatgccgacaacgggctaagcgatgcttttcgtgttcagctcagtgagctgtatgaggatctgatgcatctggatgagcgggtcgacacactgagcgagcgtatcgggcaatcggtaaaacaaaaccccgatatccggcgcttaaccacggtacggggtatcggcccactgggtgccagtgcactgagtgtcgctttaggtgacggatcaagctttgccagtggccgtgattttgccgcctctctagggcttgtacctcgtcagcacagtaccggtggtagagatcggttactgggcattagcaaacgcggtaacagctatatccgaacactgctagtacacggtgcacgtgcagtgatctggcatagcaaggatcgcgatgacgcgttgagcttatggatacagtcgctgctagcgcgtaagcctgccaacgtggttgcggtggcattggccaacaaaatcgcgcgtattgcctgggccgtcaccactaaagaggcggagtacgatccggcgctctcagcgctatcgactacgcactgattcactttttcgttttaccacagtagtacgtattactcgtagcaaagagaggtaccttccaccacgattgcagagcacattgagttgatggcgacaggtcgaacctacgtcagctaaacccgtccgcgaaggtgagcctcgagctctttgcgccaattgggagctgacgcgcggatagcccatcagggtccgatgtccaatataagtggcatctgaaagagaccgaatatactaaggcagtcgtactttgccgccaaacatctcaaagtgcttgcaaacgaggaggagtccatata

SEQ ID NO: 770 - DNA, 1566 bp, unidentified
  source 1..1566: mol_type = unassigned DNA; note = element_0bb5c45
  misc_feature 1..2: note = core
  misc_feature 3..249: note = LE
  misc_feature 250..1422: note = CDS
  misc_feature 1423..1566: note = RE
  misc_feature 3..226: note = bridgeRNA
ctcgtataatgaagatataaaaatcttcatcaatttatctgttataatttactaaagtgctgtggattattatttcctcctatagctagtttgactagactattttatttaggctataaccacagctttatactaatttgttaattagttagataacgcttgacgttttatataggacgaggatacattcagtataaagctttagtggaacataaacagtacttttaatatatttcaaggtggtgaattatgatttatgtgggaatcgatatcgcgaaagataagcatgactgctacatcgttacctctgatggcgttcttatcagcgataatttaagaatcacaaatactcttgaaggatttaatactctttactccgttatctcctcaaactgtcaagtcgctagtgatgtgcgtatagggcttgaatctaccggtcattacggtatcaacttagagaatttcctgcgtaccaagggataccaaattacggtatttaatccccttgctgtagcttcctttaggaagtctcaaacactaagaaaaactaaaactgataaagttgatgctaagtttattacaactttgctattcaactcagatcaaaccccaacagcacttgtatctgatgaaattagagaattaaaatctctaactagacaccgttatagattagttggacagtgcactaaattaaaagtttctgtctcgcgtttacttacaattttatttcccgaactaggaacattaatatggtcgatacatcaaaaatctagttatgctatgcttttagaatttccaagcgctcatgatatttctaactgtcacttaactaaattaactaatcttttatccaaaacttcaaaaggaagatatggaaaagacaaggcaatagctttaaaaaacctagcttcgaaatctgttggcatcaacagcagcggaacttcttttgagcttcagcaaacaattagaataattaattattatttagatgaaatttctattttagataagaaaatcaaagagcttcttattcaaatgaaaacaccgctaataagtatacctggaatatcttatacactagcatcaattatactatctgaaattggagatatcacgcgatttcaaacccccgctaaattattggcttttgcaggactagaaccttctgtttaccaatcaggaaagtttcaagctacaggcacttctatggttaaaagaggatctaggtatctcagatgggctataatacaagctgcacgcttggttgcaatgcgtgatcctacattcaaactttatcaagagaaaaagaagaatgaaggaaaacatcattatgttgcaatcagtcatacatctaagaagctacttagagtaatttttcatcttttaaagaataatattaattttgttccacaaaactaaatattttaataattttattttttaaaaggcgactttaaaatttctcaaaagtcgtctcctataaacacgcccatatttttttaaaaaattctaaaaaaaaatttagaaaaaacaaaattatatacttgacttcatatagttagt

SEQ ID NO: 771 - DNA, 1834 bp, unidentified
  source 1..1834: mol_type = unassigned DNA; note = element_0bb75b0
  misc_feature 1..2: note = core
  misc_feature 3..112: note = LE
  misc_feature 113..1393: note = CDS
  misc_feature 1394..1834: note = RE
  misc_feature 1470..1728: note = bridgeRNA
agcattcctgtaattcataaataatgtcaatagacgaaagaagaacctcacagtataattaagatatcatcttggcggatgaaaaacatcttaattatcggaggtccttataatgaattatacacagaatcaaaagatttcgcaagtcacagaagcaactttaattgtcggtgtagatatcggcagcgagacaaattttgcccgagcgttcaattggcgcggacaggagctgtccaagaaggtatttcacttcagaaacagtctggaaggcttccagagctttcttgcgtacctcaacacctatacgaccattgcatccgccaggcaggtcattgtaggctgtgagcccaccgggcactattggtttaatttggcccgttatctggaagaaaacaacatcaagctggctcttgtcaatccgtatcatgttaagcagatcaaggaattggatgacaacagccccaagaaaacggatttgaaagatccgaaaaccatcgcaaagctggtagtggatggccgatacagctatccgtatctccccgagggaatctacgcagatttgcgggaagcggtctcaagccgggaacggatcgtgaaggaactgaatgccatcacgaatcggatcaagcgctggcttaagatatattttccagagtatctggtcgtttacaagaacttctccgcagaaagcggcctgacggtgctggaatcggcacctctgccgcaggatgttcttcggttgggaccagagggcgtgaatcaactctggcgggacaagaagctgcgcgcggttggtatgaagagggcactgaccctggttgaagccgcgcataacagcattggactgcccggaggaagctgcgcccggatggaactccagctgctgttggaggatttcagaacgaagcagagtcaactggaaaagattaccgaagtattggaagaagaaaccctgtgtgtgccttatgcagataagctgctggccatcaagggggtaggactgattacagtggctggatttttggcagaggtgggcgatgtacgacgctttgactcaccaaagcagatccagaagctggccgggctggaggtcaaggaaaacagctccggcaagcatcgcggcagaagctccatcagcaaaagaggaaggaaacggctgagaaagattctgttccaggtcatgctgcccatgattcagaacaatgccgagtttggcgagatatatcaatatttcaccaccagacagaagaatccgctcaagggcaagcaggccatcatcgcagcaggctgcaaactgatacgggtattctatgccatcttgaagcatggtgtagattacgacccaggaaagctacgggcagatatgatccgcccggaactggaagcagcctaaggaaacagaccctgcagcacgggaaagcgtccgccatttcaatggtgccggattgcaggaatgcacatcaacaaatacagaaccggttagccgctaagaatcacaccatgggacactgatcccgcgtaggagcataagcggcacccaaatgtggacaggcagaacgagggaatttcggacaccgctgggagcggatgatccagttagacatgggaggtttgctgccgcaggacgatggggatgacatatggccgtcaaatcgcaagcacaagacgttctatttgtcatgctcttttttacctgtaggtcgcacatatccaatggatttgatgcggacctatgttcattggcttggtatgagcttgatgtaacctagacaaatgttgccaatactgctggatttccgggggcattggtactcttgaacaaaaatatttaggg

SEQ ID NO: 772 - DNA, 1434 bp, unidentified
  source 1..1434: mol_type = unassigned DNA; note = element_0bb783a
  misc_feature 1: note = core
  misc_feature 2..294: note = LE
  misc_feature 295..1344: note = CDS
  misc_feature 1345..1434: note = RE
  misc_feature 101..260: note = bridgeRNA
cctttagatttgcatttccaataaattaatcacattacaattattattatgtattactttggggggtccaggggggtgtggaaaagtgttaattttgtggaaaagttgagtcaaagtgtggcaaattatccctttcgctaagcaaaacttagtacctgttttaatccacactttgctcaaaaggttaaaaagacagatagaaaattaggtaaaacccattaacaaggtaatcgtccttcacctttaatctcaactatttatgtttatttactaatttttaaaaccattattatcatgttaaggttcattatcggtgctgacatctcaaaagacaaaatcaattttgcactccgttttctcaatgactatcttttagagaaagaagtggaaaatacaacttcagctctaaacaaatttattaaacaagttcagtcactggttaaaaatattgctaaagaaaaaaaagctgaatattccattgagtttatcatggagcacacaggtatttatggcaatttacttattgaatgtctagctggacataaggtaaccacgtatgttgttgctggtctagaaattaaaaacagtaccggaatcagtcgtggcaaaaatgacaaaatcgatgctaaacgtatagctgattatggggtcagatttgctgataaaatgaagccttacaccttttgtgatcagacacttactgaactcaaaggcttgaatactttaagatcccagcttgtaagaataaaagctcaacttactcaagccaaggacgataataaaaaattccaaagtaaatcactccaaaaaaagttagaaaatatcaataagccaatagtgaatgaattggataaatctattgagaaaattgaattccaaatgctggagttaataaaaagcgatgaatctatctatgacaattataagatcgctcaatcagtccctggtgtgggtaaaatagtagcggtagcattcatttgtgccactaataattttaccaagtttcaatcagctaaggctttaggtagctattgtggagtagtgccatttggtaaagaatcaggcaggtataaaggaaaagacaaggtgtctcccattgcaaataaggcattaaaaacactgctacatctcggtgcagtagcaagtatcggtggcaaaaatgcctttgctgcttattaccaaagaaaagtaatggatgataagaaaaataaaatgctggctttaaataatgttagaaataagatagtaaaaacactctttgcatgtattaaaaacaaaaccaagtacacagcagattatgtctttcttttgctgcctaatttaagaatgttgataactctgtgaatggtccatatacaaccagttttatcaacaacaaaaatatcgattatgtattaaaaaatatcaattaatgcttggttaaaccatagaaaa

SEQ ID NO: 773 - DNA, 1422 bp, unidentified
  source 1..1422: mol_type = unassigned DNA; note = element_0bb88f8
  misc_feature 1: note = core
  misc_feature 2..230: note = LE
  misc_feature 231..1409: note = CDS
  misc_feature 1410..1422: note = RE
  misc_feature 14..236: note = bridgeRNA
ctgcttgttccattgacctcaggaccggtgcctggcgaggctcggttcaggcgtccgggccgtcgctctctcatcggctgcccacgctggtcgtgtggctctcttttggcctgcgcggcccgggcgtcgccaatgggtcaggagaggctcaagaggggtttgcctagctcgaagcagcgttgccctcccgactcgacaaccgtcagggatcgagcaggaggacagggccagtgaaggcaagagacgcacgggtcgtgatcgggatggacccgcacaagcggtcggtgaccatcgaggtcatggccgctgacgaagaggtcctcggcggtggccggttcggcaccgacgccgccggcttcacctcgatgctggagtacgtcacccggtggccagaccgggtctgggccatcgagggctgcaacggcatcggtcgccacgtcgccatgcggctgatcgccgaggggcacgaggtcgtcgacgtgccgccgaagctgtcggctcgcgcgcgggtcttcgccaccggtcagggacgcaagaccgacgccaccgacgcccactccgtcgcgctggtcggcacccggatggccgggctgcgtccggtggtccacgacgagcagctcgcggtgctgcggctcctggtcgaccgccgcagctcactgggcgatgaccacacgcggatgatctcccagctccaccagctgctgctggagctgatccccggtggcgcgaaaaaggacctctccgccgcgcaagccaaggcgctgctggccaaggtccgtccgcgcgacaccgtgggaaaggcacgccgccgcgtcgccgccgaactcatcgctgacctggagcgggtctacgcgcggaagaaggccgcagacaaggagctcaaggagctgctcgccgcgacgggcacgacgttgatggacctgcacggcatcggcccctcaggagccgcgcggctgctggtcgaggtcggcgacatcacccgcttccctaaccgcgagcacttcgcgtcctggaacggcaccgcacccatcgacgcctcctccggtgaccaggtccggcatcggctatcgcgggctggcaaccgacagatcaaccgggtgctgcacatcatggccaccgtccagctgcgcaacgacaccgaaggccgcgcctacttcgaccgccgcaagcgcgacggcaagacctcgatggaagccatgcgtgcactgaagcgacggctctcgaacatcgtctatcggaccatgctcgacgacgccatgcgagcgaaggcgacgggcccgggagggcaacgaggtagcgactctgactccagcgcgaccggctcacaacccccacaccggctcttcggacaagccactccggggcccgtctccgaccagcctagaacgcccctgccgaaggtgtcttgacacagaggggagc

SEQ ID NO: 774 - DNA, 1386 bp, unidentified
  source 1..1386: mol_type = unassigned DNA; note = element_0bbb06c
  misc_feature 1: note = core
  misc_feature 2..69: note = LE
  misc_feature 70..1101: note = CDS
  misc_feature 1102..1386: note = RE
  misc_feature 1145..1381: note = bridgeRNA
caatggtatggaccccgctctcccggggagctggaatctcgaacgttaactgtggtgaaggaggatatcatgcaggtcgttcgaataggtctggatctggcgaagtacgtcttcgaggttcacggcgtcgacagtcatgggaaagtcgtcacgcgtaaaacgctgcgacgcgatgcggtaactcaattctttgccaatttgccgcgatgtctggttggaatggaagcgtcgaacggcgcacattactgggcaagagtgctctccggtctcggccatgaagttcggctgatcagcccgcagttcgtgacgccatatgtgaaatcgaacaagaatgatcgaaacgatgcggaggttatctgcgaagcggttggcaggccttcgatgcgtttcgtaccgccgaaatcagtcgatcagctggctgtccaggctgttcatcgcattcgccgacgtctggttgctgaccgggtcaggttcgtcaatcaggttcgcgggcttctgtccgagcatgggattgttattgctcgtgacatcacgcagcagcggcgcggtctcgccgtcatcgtcgggaacgaggctgacggcctcagcgacatggtacgatcgcttatgagagacttgcagacggagttgactgaactcgatcggcgcatccgaacgtatgaccgtcggatacgggaaatcttccgcactaacgagcagtgccagcggcttgggagaatagaaggcatcgggccagtgacggcgaccgccttgatcgccgctgtgggcgatagaacctgcttcaagaatggacgacaattcgcggcttggctcggcctggtgccgaaacagcgatccagtggagggcgagcccgcttgtttggcattagcaaacgcggcgaccgttatctgcgcaccttgatgatccatggggctcgcgccgcgcttggaaaagcagctggcaagcaggatccgagaagcctctggctgactaagctgcgagcgcggcgtcatcccaacgtcgccgccgttgcattggccaacaagaatgcgcgggtcgtgtgggccatgctctcgaccggcacattctacgagcccgcgttggcgttggaaacggcctaaggcgaagcggtaaacgaaggaatagataaggaggtctcaccccagcaattgcaacaaatggcaggagatggcgaaacggtcattccgtcgcttcccaaacctgatgtgtggaccggcttggctttgaccaatgtctaggggccgatgaggtggaagcgcgccaaaatccatcggggctcgcggcgacgatttatcgagccgcattatgaagccggatatacgtcagcagttctgaccgtcgatcctgatcttggtcaaccgttgcaatcgggcggggtccatata

SEQ ID NO: 775 - DNA, 1166 bp, unidentified
  source 1..1166: mol_type = unassigned DNA; note = element_0bc0077
  misc_feature 1..2: note = core
  misc_feature 3..200: note = LE
  misc_feature 201..1163: note = CDS
  misc_feature 1164..1166: note = RE
  misc_feature 3..176: note = bridgeRNA
cttgtatggttagacttgttggggtggtgggactaaaagccagcatctgactctagccagtacagaccgtgggagacttcgccccaccccttcaccaaagcgccgataaggaatgcatcggctatgaccgacgatagaagcaagccagcgcaatggtgaagccccgacaagcctgcaaaccctaacccggagcgtttttcatggcaatgactgtctcgcaatcaatcatcggtgtggatgtcgctaaagcggaagttgtgatctaccaaactgaaactgatgaactaaagatcgtaccgaacaccaaaaccaaacttaaagcgtggctcgataccttgccggcgggcagcgctattgcgattgaggccaccaacatctatcacttgcagaccgtaaccctggctcactcgatgggtcataaggtctacgtggtcgatgggtttcgccttaatcactaccgaaaaagcactggaggccgggctaaaacagatgccagcgatgcgcgcttgctggcccgttacttgaaaaatgaacaagcagatttacgcgtttggagcccaccgccgaaaatttataccaggcttcaaagcttgcttcgtcggcgtgcagctctggtgaaaacacgtatcgcccttaatcaaagctgggcgggtgaaccgttactcaaagcatcatcaaaaagcgtctctgcttgcctggaaaggcacgaagcactcattgagaaacggatattagacgctgtcactgaagctgggcttctacatcaggtcaagcgctgccaagccgtcgagggtattggttttcttacggcagttgcattaacgatggcttttcaacgaggagagtttgaaagcgcagatgcgtatatcgcgttccttgggttggacttgagagtaactgactccgggcagatgaacggacgtcgcgcattgagcaagaaaggtgacggcgagatacgtcgattactgcataacgctgcgtcagccggcatcaggtcaaaagcttggaagccgctgtatgaaggttacctggccaggggcctgaaaacgactcaggccctggtcatcatcgcccgcaagctggcacgtattgcgttttcactcatgaaaaatcaaagcgaataccagtcaaaagcggttttggaggcttcccctcaaccatagaat

SEQ ID NO: 776 - DNA, 1387 bp, unidentified
  source 1..1387: mol_type = unassigned DNA; note = element_0bc314c
  misc_feature 1..3: note = core
  misc_feature 4..86: note = LE
  misc_feature 87..1115: note = CDS
  misc_feature 1116..1387: note = RE
  misc_feature 1086..1374: note = bridgeRNA
agatgggatggttgccgccctgccccgacggtatcgcaatgtgccaagaaagcgcctgatagatacgaagcggagaggacggcgagatgtcggatacgataattggtgtggacttggcaaagcgtgttttccaggtgcacggagcaaccgtgacgggtcacgtgattttccgcaagaagttggcgcgggagcagttccggattttcatggcagctcaaccggcttgcgtgatcgttttcgaggcttgcggcagcgcaagttactgggcgcgagagatggaggctctcggccatgaagctaggctgatcgcgccgcagtacgtccggccttttgtcaaacgtcagaagaatgacgcgaccgacgctgaggccattgtgaccgctgcacgtcaacccgagatgcggtttgtcactccgaaaacccaggagcagcaggcgaaggcggtgctattccgaggtcgcgagcgtcttgtccatcagcgcaccgaacttgtgaacgcgctgcgggccgttctctacgaatgcggccatgtgttccccataggcctctcccatctgaagcggatcgacgcactagtcaaagatccggcttgcgacctgccggcgctgatcattgcggaatgccaggacttgctgttgcagattgctgcgaagaccgaaaggatcgacgtgaagaccaagactctgaaggcgctcgcggctaaggccgacacatcacgccatctgcaaactatgcccggtgtcggtccattgacagcgttggcggtcgaggcctttgcgcccgacatggcgcagttcaagtgtggtcgagacttcgcagcctggctggggctcgtgccgcgtcagcgttcttctggcggcaaggagcgcctcgggaggatatcgaaagcgggtcaggccgatatccggtggcttttgatcatcggggcgatgactaggatcatggggcccgcacgtcacaaaatttcggcgaacagctggattggacgaatgctggcgcgcaagccgaagatgctcgtcgggatcgcgttggcgaataagatggcacggcagatttgggccatgctgtcgaagaaggaagattatagggatccggcgttggcaacagcggcatgaacgtcgtgctgtaagcttgcaccgtcggtgccaaggggagtgtgaaggcgacgacctgaatgggcgcaatgatcgaacagatctggattgggaaaaccagtgaacctctcagagtggaaaaactcgttgttcagattcggacccgatctgcagatcaccatatcggcccgcggcttctggacatgccgcaacttgaggcctgacagaagttcgcactcgatcataagctttgaagggaagatgcctcttgcattacgggcggcaaccacaga

SEQ ID NO: 777 - DNA, 1349 bp, unidentified
  source 1..1349: mol_type = unassigned DNA; note = element_0be06fe
  misc_feature 1..2: note = core
  misc_feature 3..82: note = LE
  misc_feature 83..1093: note = CDS
  misc_feature 1094..1349: note = RE
  misc_feature 1081..1336: note = bridgeRNA
tgatggggtggatggccccctcgcggcaacatcgtgccaaaggtggtggccgttcaggtcccccaggaaggaaccatccgccatgaaactcgcaaccatcggcctcgatctggccaagcacgtcttccaggtccacggcgtggacgaggtgggccaggtcgtcgtcaagcggcgcctgcggcgcgctcaggtcgtctcctacttcgcctcgctgccgccctgcctggtcggcatggaggcctgcgccaccgcgcacttctgggcacgcgagctgcgggcccttgggcacgaggtgcggctgatgccgccgcagtacgtcaaggcctacgtcaaacgtggcaagaacgacgcggccgacgccgcggcgatctgcgaggccgtgacgcggccgtccatgcgcttcgtgccggtcaaaaccgaagagcagcagtcggcgctgctgatgcatcgggcgcgcgagttgctgattcggcaacgaacccagttgatcaacgcggtgcgcgggcacttggccgagttcggcctggtcgtggcgcgcggaccctggaacgtgccacggctcttggcgagcatggacgaggatcagcgtgtgccggaggcgacccgccaagtcatccagctcctcgccgctcagctcgacgacgtgggcaggcggatcgccgaggtcgacgcccggatcgtggcttggcacaagaccaacccgatcagccggcggctcgccaccatcccgggcatcgggccgctgaccgccaccgccatcgccgccaccgtgcccgaccccgacgtcttccgtggtgggcgcgagttcgcggcctggctcggcctcgtgccaaggcagaagtccaccggcggcaaaccgaggttgggccgcatcagccggctcggggacaagtacatccgtcagctgctgatcgtcggcgcccagaccgtcctgctgcgttcgaaagtcgctcgcgcggatgcgtggatccaggggctgctggccaggcgaccccgcctcgtggtcgccatcgccctggccaacaagatggcgcgcatcgtttgggcggtgatggcgaaagggcagagctatcgacaggcggccccagcatagccccaagactggctgcactcgtgacgcttgcgagggaaggaacgtgatggagtggtcggttgcgccgacggactgggagaagcctggagaagtcgagggatggaatcccgaggatctgatgaggccccagtccgcggaacccatcggggccagcggtcatgcgatgaccgcgtcactaggccggacacatgaccgcaagcaacctgatcatgccagacgcccactcttctcttgcgagccgggggccatccacaca

SEQ ID NO: 778 - DNA, 1423 bp, unidentified
  source 1..1423: mol_type = unassigned DNA; note = element_0be0f00
  misc_feature 1: note = core
  misc_feature 2..468: note = LE
  misc_feature 469..1410: note = CDS
  misc_feature 1411..1423: note = RE
  misc_feature 14..246: note = bridgeRNA
ctacgtgtttcattgacgtcaggatcaggcccggccaggctcggtcctaggtgaccggggttgccgctctcagtgcggctgcccacgccgttggtgtgaggctcacatttggcctgcgctgccccggtcaccgccagggccgggagaggctcaagaggggtatgcccagccgaacgtagcggtgccctcccagctcgacaccacctgttggcacgagcaagggagcaagggcatggatgagcagatcggccaggtcgtgatcgggatggacccgcacaagcgcagcgtcacgatcgaggtgatgaccgctgatgagagcatcgtcggcggcgggcggttcgccaccgacgcagaggggtacgcccgcctgctggactacgcccggtcctggccgcagcgggtgtgggcggtcgagggctgcgccgggatcggcaagcacgtcgccgaccgcctcgtcgccgacgtgagatggtggtcgacgtgccggcgaagatgtcggcacgggtgcgggtcttcgccaccgggcagggtcgcaagaccgacgccaccgacgcccattccatcgccctggtcggggtgcggatggccgggctgcgcccggtcctcgccgacgagcaggccgagctgctgcggatgtgcgtggaccggcgcgcctcgctgggccgcgagcacacccgcaaggtctgccagctgcacagactcctgctcgagctcatccctggcggggccaagcggtcgctgtcggcggcgccggccaaggaactgctgaagacggtccgcccgaccacgacggtgggcaaggtccgcaaagctcacgccgccgaactcgtggccgacctggccacgatctacgcgcgcagcaaggccgcggacaaggaactgaaggcgctggtgaagacgaccggcaccaccttgctcgacctgcacggcatcggtccctccggcgccgccaggctgctcgccgaggtcggtgacgtcacccgcttccccgaccgcaaccacttcgcctcctggaacggcaccgccccgatcgacgcctcctccggggaccacacccgccaccggctctcccgcaagggcaaccgagcgatcaaccgggtgctgcacatcatggccgtcgtccagttgcgcaacgccaccgagggccgggtctactacgacctcaagaaagccgccgggaagacctccatggaagcgatgcgctgcctcaaacgccgcctgtccgacctggtctacaaggcgctgctcgacgacctcgccgagcacgcgacgacgggcccgggagggcactcgggtgacgactctgactccagcgcgaccggctcacaacccgctgccggctcttcggacaagccacttcccggacccgccaccaccaagcctagaaccaccctcccagcagcgtcttgacacagaggggtgc

SEQ ID NO: 779 - DNA, 1434 bp, unidentified
  source 1..1434: mol_type = unassigned DNA; note = element_0be9037
  misc_feature 1..2: note = core
  misc_feature 3..120: note = LE
  misc_feature 121..1152: note = CDS
  misc_feature 1153..1434: note = RE
  misc_feature 1188..1387: note = bridgeRNA
agatggggtaatcggccgacgtagttgtggatagctgaagatttggggtgctgcgcttcaggctgatggtgaaacgaggtcaccgttacgggcctcaagcatcagaaggagaagcgcagcatggaccattttgctggattggatgtatcggtcaaggagacgagcctgtgcattgtggacgatgccggcaggatcgtccgagaagtgagagttgtaagcgagcccgaggcgctgctggcggcgctgacgaaccccgactggcacttcaaacggattggattggaagccgggccgctgtcgcaatggctgtttaacgttctcgccgaagctggcttgccggttatctgtgtcgagacgcggcacatgcgggcggtgttgaaggcacagattaacaagaccgatcgtaacgacgcgcgcggcatcgcgcagatgatgcgggcgggtctttatcgtccagtgcacgtgaagacattgcgtagccagaagctgcgcatgctcttgacgcaccgcaagctgctacaggcgaaggccatcgccatcgagaacgatctgcgcgccaccttgcgcaacttcggtctcaaggtgggcgtggtcggcactgtgaagttcgaggcgcgcatcaaggagctggtcgagaaccttcccgacttggtcattctggtcgaaccgctcctcgttgtccggcgtgtccttcgcgagcagatcggcgtcctgcaccgccgcttgctggccatcgtccgggatgatgacgtgtgccggcgcctgatgacggtccccggggtcggccccgtggtggcactgacctatcgcgccaccgtcgatgtgccatcccgcttcagaaactccaaggcggtcggggcggtatttggactgacgccctctcagcatcaatcgggcgagagcaaccgaactggcggaatatcacgatgcggggatgagatgatgcggatgatgctctacgaagcggcccatatcatgctggtacgctcaacgcggtggtcttggctcaaggcctgggcgatgcagatcgccaggcgacgcggcatgaagaaggcgatcgtggccctggcacgccggttggccgtgatcatgcaccgcatctgggtcgacggcaccgagttccgctggaccggggagatcgcagcggcatgagaaccgcattggatcaagggcaataggagaacacgcgagttccaccgttcggtggaatgatgtccctcgcgggacgacggatgaggtgagatcgtatgtccgcttggacccgccgtcgtttgatggcgatgccgccacttagattgttccgcctcgttctcgaatcccatgatggaagggcccaggtgccgattccgaagagaagcacgagcccgtgagcgacatcgacactgaattggtggatagtctgaaagcgcttgaccccgaacggccgattagaga

SEQ ID NO: 780 - DNA, 1488 bp, unidentified
  source 1..1488: mol_type = unassigned DNA; note = element_0becb8d
  misc_feature 1: note = core
  misc_feature 2..228: note = LE
  misc_feature 229..1473: note = CDS
  misc_feature 1474..1488: note = RE
  misc_feature 4..225: note = bridgeRNA
ctctcatactggtcaggtcctcgagcaggaccaggcctgacccgaatcgtgtgactggcctcgtgccctgccactgatctgtcgacctggctcctgcccctggacgcgcaccagccggtcggacggacgtgacctgataggagccttgacctgcaccatgagagtcctgtccgccgtcccggccggcggtgccatcccaaccggcaaggaaggaaggcagataccagcatggcaaagaacgacaggatcgtggtcggcggggtggacacccacaaggatgtccacgtcgccgccgtggttgacgagatcgggaggatcctcgggacctcggcgttcccgacgacagcgagggggttggccgagctccacgcctggatgcgttcgttcggcgacgtcgcccgggtgggtgtcgaaggaaccggggcctatggcgccggcctcgcacgccacctgggcggcgaaggagtcgaggtggtcgaggtcaaccgcccgaaccgccagatgcggcggcgtcggggcaagtccgacacggtcgatgccgaagcggctgcccgggccgccctgaacggcgaagccaccgtggcacccaaagcccaggtcggcgtcgtcgagtcgatccgggtccatcgggtggcgttcgtgtcggcccggtcccaccggactcaggtggcactccagatccgggacctgatcgtcaccgccccgcccgagctccgggcggtcctcggcccgctcgccaccgaggagcgggtggcccgctgcgcccgattccgtctgatgggtgaccccgccgacccgtcggtcggggtcaagagcgcactgcgatccctggcccggcgtcacgaggcactgacgatcgagatggccgagctggaggcgacgctcgaccggctgacggccgtggcgaatccggcgctccggggggcgaagggcgtcggcaccgacgtggcggccatcctgctcaccgcagccggtgacaatccgggccgactgcgccatgaggcggccttcgccgccatgtgcggggtgagtccgatccaggcgtcatcgggcaagacccagcgccatcggctcaaccgctcgggcaatcggcaggccaaccacgccctctggcgcatcgtcaacgtgcgattgacctgtgatccggcgtcgaaggcctacctggagcgccggacagccgaagggaagtccaggagggagatcgtccgctgcctcaagcgctacgtggcacgggagatcttcagactgttggtggttcccgaagcggtgcccgacggagccgacctccgcacggcacggatcgccagaggactctcccagacgccggtggccacggcgctcgacacctcggtcaacgccatctccaggctcgaacgctcccgcatcttcgacaccgagctggcacgccgatacgagtcgttcctggcctcgatcagcgaaaacgagccccacgccgtcccagctgcggcttgacagccataggagcat

SEQ ID NO: 781 - DNA, 1510 bp, unidentified
  source 1..1510: mol_type = unassigned DNA; note = element_0bf0396
  misc_feature 1..2: note = core
  misc_feature 3..271: note = LE
  misc_feature 272..1489: note = CDS
  misc_feature 1490..1510: note = RE
  misc_feature 7..251: note = bridgeRNA
ctaatgggggtggatcggcttcctgttagaggggatgctggtcgtgtgagccttcccggtcggtgaccactgccaggccctgaaacggtgtcggatttctacacgaagaccgtggcccggccgggcgaggatcacccgctggaacgcttctgggatgtcgtgcccccttgaacgtgtgggtgagcactgatccattaggccgcgtcagggtgatcacccaaaggttcacaccagatcgtcgagacgaccgaagacgaggtgaacgagtgtcatgatctttgtgggcaacgactgggcatcagatcatcacgatgtgtgcgtgatggatgaacacggcaccaccctggccacccgccgaatacccgagaacgctgccggcgccaccaccatgcatgaactgatcgcccggtatgcccaagagcctggcgaggtagtgatcgggatcgaaaccgatcacggcatgtgggtcaccgccctggtcgccgcgggctatcaggtgtacgcgatcaacccgttgtcggtatcgcggtaccgcgaccgccaccatgtcgggggcaccaaatccgataaggctgacgcgaaaacgctggctgatctggtgcgtaccgaccggcacaaccatcggctcgtcgccgccgataccgtcgccgcggacgcgatcacggtgatggcccgcacgcaccagaacctggtgtgggcgcgttcagcgcaacagaatgtgttgcgctcccaactgggcgcctactacccggccgcggtcgatgccttcggcggcgacctcgcccacaaagactgtctggcggtgttgcggcgcgctcccaccccacgacagggtgcggcactatcggtcgcggcgatccgctcggccctgaaaaagggtggccgacaacgcaataccgatacccgtgcccgcgacatccagcacgccctacgcggtggcggccatctgggcgcacccgaggcactcaccgccgcctacgcggcgaccgtgacagcgaccgtggaaatgctggccgctctcaacacccagatcatccaactggaaaccactatggcccagtcttttagagcgcatccggacgccgagatctacctgtccatgcccggagtcggtgacatcaccggcgcccggatgctcggcgagttcggggatgaccccgaacgctatgccaccgccaagtctcgcagaaactatgccggcacctcaccacgcaccatcgcctcaggcaaagggcacgtcgtgttggcccgccacatccgcaacacccgactcaacgccgccgcactgtgcatggcgcaaagcgctctgaccggtagccccggcgcccgcgtctactacgacagcctccgcgatcagaagaagtcccacacccaagcactacgcgcggtcgccaaccggctcatcggcatcctccacggctgcctcacccaccgcaccccctacaacgaacacaccgcatggaaccaccgcacacacctcgccgcttgacaccttggacccctgggatgt

SEQ ID NO: 782 - DNA, 1419 bp, unidentified
  source 1..1419: mol_type = unassigned DNA; note = element_0c01c15
  misc_feature 1: note = core
  misc_feature 2..65: note = LE
  misc_feature 66..1100: note = CDS
  misc_feature 1101..1419: note = RE
  misc_feature 1186..1410: note = bridgeRNA
taatgagatggtccgccgccgaataggataacggcgcggtagtttacatcaggaggatcatcacaatgcatatcgcatctattggcatcgatctgggcaagaccacctttcacctggttgcattgggagagcgtaacaaggttctggttcgcaagaagttctcacgtgcgcagctattggcctataccgcgaacctgccttcatcgctcatcggccttgaagcctgtgcgggagcgcacttcatgggggccgcattacgagaacaagggcacgaagtgcgactcatccccgcccagttcgtcaaaccctaccgcaaatcaaacaagaacgacttcatcgatgccgaatccatcgccgaagcggtcacgaaagagaatatgcggtttgtgcagatcaaaacccaggagcagctcgatgtgcaagccatgcaccgcgttcgggatcgactggtgcagcgtcgcacggcactgatcaacgagatccgcggattcttgctcgaacgcggcatcaccttcgcggcagaccccacacatctccgcaagaacctccccggagtaatggaagatgccgagcagaatctgagcccgcgcctgcgctggctgctggggcgcctgtggcaggagtggaagcaggtggagatcgatgtcaaggcgatcacagacgagatcaagcgcatcagcaacgaggatgcgcgctgtcggcgtctacgccagatccccggcttcggcccgctggtctctaccgcaacagtggccgccatcggtaacggggctgcctttcgccggggacgcggcttcgcggcatgggtcggcgtcgtgccacggcagtactccaccgggggcaagcagaagctgttcggcatcagcaaacgtggcaacatctatctgcgtcgcatgctgatccacggggctcgtgcggtactgcttcgcgtcaagtacgacaccggaggattcgggcagtgggtgcaccgactcgctcaaggtgctccgcgcaacaaggtcgttgtcgcgatcgccaacaaactggctcgcattgcctgggccgtgttgtctagcgacaaagactatcaacaccagccgctgcagatgaccgcagcctgataggccgtggaaaagactctgcgcttggaaagcacaaaacgctttccacttttcgaccgccacgacgacgaagcttgcagcaacgttccaccaagctctgctgaggagagaaggagacgaaagaacagtccaacggcgtgtcggaaaacctggtggcgataatgcgtccctagtgaccgagggatttataaggaccgacacgcgcggatcatcatcgagtgcccggagagcgattctcaactaagaggccggatacatttacgcagactgtcgcttcgctcaacttcaaacctcttgcagtcaggcggcggaccataca

SEQ ID NO: 783 - DNA, 1367 bp, unidentified
  source 1..1367: mol_type = unassigned DNA; note = element_0c02d1d
  misc_feature 1: note = core
  misc_feature 2..306: note = LE
  misc_feature 307..1107: note = CDS
  misc_feature 1108..1367: note = RE
  misc_feature 1128..1317: note = bridgeRNA
gaatggaagggacttcccctgattatgcgcctgattgatttccgtgcaattatgggataaacattggcccggaggcattcgttatgaccatcacaactgtcggtatcgatcttgctaaaaatatgtttgcagttcacggcgttgaccagaatggaaaaactgttctggttaaacccagggtaactcgcgcggcacttcctgaacttatcgccagtttaccgccctgtgtaatcgggatggaggcctgctcaggagcccactactgggcaaggattatttcagcagtatggtcatgatgctcgcctgatggcacccaaatttgtctcaccctatcgcatggctggtaaaacaggcaaaaatgacgcggcagatgcccaggcaatttgtgaagcggtgcaacgccctcacatgcgatttgtgccggttaaggatgagagccagcaggcaatgctgtgccttcaccgcacaaggcaaggatttatcgaagagaaaactacaatatataatcgccttcgtggactgatatctgagtttggtattatcgccccgcagagtacagacgctctgtgccacactgtcgtagaccagaaaaattcactgccaatgcaggtcaggctgtgtgttgacgatttgcttgcacatattaccagcattgaagagcgaattgccgaatacgatcgaatcctgtctcgcgtagctaaaacggatctccgtagccagcggttaatggaactgaagggaattggccctacaacagcctgcgcattagtcgccagtatcagtaatgcgcatgattttaagaatgggcgccagttgtcggcctggcttgggcttacaccatcgcaatacagtagtggcggcaaatcgaagcttggcaggataactaaagcgggagactcgtatctgcgaacgctgttagtacagggtgcacgttcggttcttattggtgcggaaaaaagaactgattcattcagccgttgggtttgtacgttggttgaacgcagaggatactggcgtgccgttgtggccatcgccgcgaaaaatgcgagactatgctgggcatcattgcattacggtgatgatttccggctatactcagccagctaaagtactaagcagtataaccatctgacctgcaactcgttgatgataaagggttagaccccgtgaggtatatctgaatattgtactggatatacaaatccgtttaacgaacaagagcctcacgcgcgtctttcatcagggtccgaatcgatgacgattcatcatgaccgtttatagtaccgcagtctctcccctttattttttattgtagtgcagacagaaatctaaaaagccggcgttgacatgccggggaagcccttata

SEQ ID NO: 784 - DNA, 1348 bp, unidentified
  source 1..1348: mol_type = unassigned DNA; note = element_0c042d7
  misc_feature 1..2: note = core
  misc_feature 3..85: note = LE
  misc_feature 86..1105: note = CDS
  misc_feature 1106..1348: note = RE
  misc_feature 1119..1334: note = bridgeRNA
gatggggtggatggctcctgctccaaccggcatcgcaatgcgccatactgcagatgtttatatctgcttataggggagccacccaatgcaagttaccacaatcggccttgatctggccaagaacggttttcaggttcacgggattacgaaagatgaagaggttgtcttcaacaggcctttgagacgggtacaattgttgccatttttctcaaaaattgaaccttgcctgattggcaaggaagcttgccgcagcgcgcatcattgggcacgtgagttgacgaagtttggtcatgaggttcggttgatcccaccgatttgtgtgaagccatacgtgaagcgcggcaagtctgatgccattgatgcagaagccatttgtgaggcagttactcgtcctacaatgcgatttgtcgccattaaaaccgttgaaccacaagccttgttgtcgctccatcgcgcccgaagtttgcttgtcagccaacgcacacaactgatcaatggtttgcgcggtatggtctctgagttcggcgtttatatcgcgaaaggcctcgcgcgggtggtcggctttgcggaggatattttgagcggcgaaacgctggacctgcccgatattgccaatgaggtgatccataatctgtgtgagcatctcatggtgcttcacactcgaatccgatggtatgaagatcggctcaagttggtcgccaaggaagacgcgcgggtgcggttattgcggaccattccgggcgttggtgctgtaacagcgtccgcgataatcgctagtattggtgacggacatcagttcagtaatgggcgggaatttgcagcatggctgggtctaacgcctgcgaacaagtccagcggcggcaaagagaagctcgggcgcatcactaaaatgagcgaccaatacttaagatcattgttggtcgttggcatgacatcgcttgttcgacagaccaagtcgcacccggaacgtgcaagcaaatggctgatatcgctcctggaacgaaaaccagcgcgcttggcgactgtcgctatggccaacaagaccgctcggatcgtctgggcagtactaacccgcaacaaaccataccccccccacacggcctaaaggagaaagaacaacgagttagcaagacccgcgagatgatagtgcataagtctgccgccaaaaccaagacaccccgtctaaggtcccgggcgcaattgcccgctaagctgtaagggacttggtttgcggaacccatcagagccagcggtcaaaaccccgcaaacaggccggacacatgactgcttctgactaatgcacaaatcggatcaaatatgtcttgctatgcaggagccatccacacaa

SEQ ID NO: 785 - DNA, 1626 bp, unidentified
  source 1..1626: mol_type = unassigned DNA; note = element_0c0b84d
  misc_feature 1..2: note = core
  misc_feature 3..282: note = LE
  misc_feature 283..1500: note = CDS
  misc_feature 1501..1626: note = RE
  misc_feature 13..308: note = bridgeRNA
ctactacaatatatttatggttaatctcccttacagccagtaaggaattacccatcttgttgcttaagctgttagaatgtagagagcaatcggtatatcggattcctccttggacttcgcgtccgtaaataagtctgataaccagctcctcattcgcagcattcgttttatgcaggttgaaccacctttaaggtgcgtccgcgtcacaccacagtagattgaataggcaatgagtaaaactggtgcctaccattgcataccaaagataggagtgacacaattatgaatatgaacgcagtcggtattgatatttccaaacgaaaaagcatggtgtccatcctccgccctggcggggaagtcgtggctaaaccttttgaaatctctcatctgtccggtgatgtccagtcactgattgatcggattcacgctcttgatggagaatcccgtatcgttatggaatgtaccggtcgataccatgaacccattgcccgtgagcttgtggcagccgggctctttgtaagcgccattaatccccagctgatacacgactaccaggatggagacagctccctccgtaaagtgaagtcggacaaagctgattccctcaaaattgcgcgatacactcttgacagatgggaaaaactaaaacaatatggtcttatggatgaaatacgcaatcaattaaagaccatgaaccgacagtttgatttctacatgaagcataagactgccatgaaaaacaacctgatcgctctccttgaccagtcatatccaggagcgaacacctactttgacagccccgcccgtgaagatggcagccagaaatgggtcgacttcactgctacatactggcatgtggactgtgtccgtaagatgtccctgaatgcctttgttgagcattatcagaaatggtgccgccgcaagaagtacaacttcagcagagcaaaagctgaagaaatccatggaacagccaaggaactggttcctgtacttccaaaagatgactttaccaaacaaatcctcaagcgggcaactgaacaattatatgctgtttccaagaccgtcgaacagctccgcaccctcatgaacgaaacagccgccacactgccagaatattccgtcgtcatggccatgaaaggcgttggaccgtctctcggtcctcaattgatggctgaaattggagatgttgcacgttttacccataggaatgcgattacagcatttgccggtgtcgatcctggcgtcaatgaatcaggcgattactcccagaaaagcgtccatgcatcgaaacatggttctcccgtgcttcgtaagaccttgttccagatcatggatgtcctgattaagacaaagcctcaggacgaccccgtgtacttattcatggataagaaacgagcgcaagggaaaccttactatgtctacatgactgccggggccaataagtttctccgcatttactacggtagagttaaagaatatttggcttcacttccgcaataacagagttacataatcataccattcacaaaaccagcgttctacggtggtctggttgttgtacgcatctttcctacataaaactttttcaaaaaatattcaattttctattgactttttatttgcagg

SEQ ID NO: 786 - DNA, 1509 bp, unidentified
  source 1..1509: mol_type = unassigned DNA; note = element_0c1dea4
  misc_feature 1..2: note = core
  misc_feature 3..270: note = LE
  misc_feature 271..1488: note = CDS
  misc_feature 1489..1509: note = RE
  misc_feature 7..250: note = bridgeRNA
ctaatgggggtggatcagcgttctgaaggcgaggatgctggtctgtgagccttcctggtcggtgatcactgccggaccctgaaacgtgtgtgggatttctcgacgaagaccgtgacctgaccgggcggggatcgcctgggaacgctcctgggatggcgtgccccaccggctggtggtgagcactgatccattaggccgcgtcgggtggttcaccaaggctcgcaccgttgttgctggtagagcaagggaaagctgaggtgaggaaccgtcatgattttcgtgggtaatgactgggctgccgatcaccacgatgtgtgcgtgatggatgagcagggcagcgtgctggcgagcaggcggctgcccaatgatgccggcggtatcaccgtgttgcatcagatgctggccggggtgtgccaggatgcgggccaggtgatcgtggggatcgaaaccgatcacggcatgtgggctgcggcgttgatcggcgccggctatcaggtgtacgcgatcaacccgctgtcggtgcgccggtatcgagatcgccaccatctggccggtaccaagtccgacaaggctgatgccaaacttttggctgacctggtccgcaccgaccggcacaatcatcggccggtggccaccgacagtgccgaggtcgctgcgatcacggtgatggcccgcgcccatcagaacctggtgtggatgcgtgctgggcagcagaacgtgctgcgtgcccagctgtgtgcctactatcccgccgcgatcgaggcgttcggtgaggatctggcacaccatgactgtctgagtgtgctgctgcgcgcacccacccccgagcggggagcccggatgtcgttgtcggcgttgagagcgaccctcacacgcggtggccgacaacgtcacctcgatgagcgtgcccgtcagatccagcagtccttacgcgcacagggccatctgcacacctcaccggccagcaccgccgcctacgcagccaccgtgaccgcgacagtgaacctgctgatctcgctcaacacccagatcagtgacctgcaaacccaactggcacagtcttttagaacgcatccggacgccgagatctacctgtccctgcccggaatcggtgacatcaccggcgcccggatgctcggcgagttcggggacgaccccgaacgctatgccagtgccaagtgtcgcaaaaactacgccggaacctcaccccgaaccatcgcttcggggaaaagtcatgccgtgctggcccgtcacatccgcaacaatcggctcaccgacgccgccctgcgcatggcccaaggagcgctctgcgccagccccggcgcccgcgcctactacgaccacctcaaaaccggtcaacgctcacacacccaagccctgcgcgccctggccaaccgactcatcggcatcctgcacggatgcctgaaaacacgcacccgctacgacgaacacaccgcctggggccaccgcaacaccctcccagcttgacaccgaacacccctgggatgt

SEQ ID NO: 787 - DNA, 1396 bp, unidentified
  source 1..1396: mol_type = unassigned DNA; note = element_0c27a6a
  misc_feature 1: note = core
  misc_feature 2..228: note = LE
  misc_feature 229..1383: note = CDS
  misc_feature 1384..1396: note = RE
  misc_feature 13..243: note = bridgeRNA
ctacttgttctatggccccaggatcggtgcctgcgcaaggctcggtccaggtgcccggcccgtcgctctctcatcggctgcccacgatccgtcgtgtggctctctcatggcctgcgcgggtcgggcactgctgagtagggagaggctcaagaggggtttgctcagctcgaagtagcgctgccctccctgctcgccaacaggtactgggtctcgagcgaggaggacagcgtgatcatcggcatggatccgcacaagcggtcggtcactatcgaggtgatggcgccggacgagtcggtgctcgacggtggccgatacgccaccgacgagtcgggcttcgccgcgatggtccgcgatgcaaggcggtggccagagcggatctgggccatcgaggggtgcagcgggatcgggcggcacgtcgccacgcgactgctggcggacggtgagcaggtggtggacgtgccgccgaagctgtctgcgcgcgtgcgcgtgttctccaccgggcaggggcgcaagaccgacgccaccgacgcgcactccatcgctctggtcggcacccgcatggccggcctgcggccggtcgtcgacgaccaacagctcgccgtgctgcgggtcctggccgaccgtcgccgggcgctcggtgaggaccacacccggatggtcgcgcagctgcaccacctgctgctggagctcattcccggtggggcgaagaaggacctgtcggccgcgcaggccaaggcgctgctggcgaaggtgcggccgcgggacgccgccggcaaagccaggcgtcgcgtcgccgccgagctgatcgccgacctcgagcggatttacgcgcgcaagaaggccgccgacaaggagctgcgcgagctcatcgaggtgaccggcacctcgctgctgacgttgaacggcatcggcccgtccggcgcggcacgcctgttgatcgacgtcggagacatcacccggttccccaccaagggccacttcgcctcgtggaacggcaccgccccgctcgacgcgtcctccggcgaccagatccaccaccggctctcgcgcgccggcaaccgacagatcaaccggacgctgcacatcatggcgaccgtccagctgcgcaacccgaccgaaggacgcgcctactacgaccggaagaaggcgtcaggcaagacgtcgatggaagccatgcgctgcctgaagcgacggctgtccgacatcgtctaccggcacatggtcgacgacgccgtgcgcacgatgacgggcccgggaggacaaccgggaacggctacgaagtccagcgtgaccggctcacatccccacaccggctcttcggacaaatcacttcccggacccgccaccaccgagcctacgaccgcgctcccagtcgcgtcttgacacagaggggagc

SEQ ID NO: 788 - DNA, 1391 bp, unidentified
  source 1..1391: mol_type = unassigned DNA; note = element_0c28d42
  misc_feature 1..2: note = core
  misc_feature 3..247: note = LE
  misc_feature 248..1282: note = CDS
  misc_feature 1283..1391: note = RE
  misc_feature 29..226: note = bridgeRNA
ctcctatgtttgttatcaaagataaaaataagagattagaacaacttaagtgaagaagagtgagagcagatctgttatcaaacagcttataaagtatgtactcacggagatattgccttactcttttttaccttttagagtctgaacagaatgtaaggaatacatcaggtcgtgtatatccagaatatccaaccaggagaaaagacgaaggaaggttgtcacttgagctaattagactcaataattgatgacaaacattgtaaaacaagttgccggcattgatgtggcacaaaatgaattagtagtttccctgggacgtatgggccatgatacaggcatagacatctttgcgtacaaaaccttcgttaatagtgcaaaaggatttaacgagttgacagcgtggataaagaaactagcgggcactgaaataaaggtaagatatgtaatggaagcaacaggagtataccatgagcgcctggcttattacctctcagaccagcagcaggcggtaagtattatactgccaaacaagattagcaattatttcagaacactggatgtaaaaacgattaccgacaagacagcctcacaggctatttgccgctttgggctggaaagaaaactggaagtttggcagaaaccgaaaaagatatttaaagatcttaagcagctaacacgcgaaagagaccagttgattgatgacaagactgcactaaaaaaccaactccatgccgaaaaagcggaagcgtttccgaatgacagcagtattaaacgggtaactaaacgcatccaactcgttaataaacaggaactggagattagagcagagatagcggagattgtaaaaaaagatgtggagctggttaaaaaaataaacaccattaccactattccgggggtaggcaaactaacagcagtgatagttttggcagaaacaaatggctttgaattgattagaaataaaaagcaactaataagttacagcggtttggatgtcaaactgaaagactccggcacgtcagtaaaaggaaagcctaaaatatctaaaagaggaaacaggcatttacgaaaagctatgcatatgcccgctttatcagcgatgaggtttaaccaacatcataaagcactatttgtgcggttggtatcgaaacatggaattaaaatgaaagccacagtagctgtgcaacgaaaattgttggaactgatttatacaatttttaaaactgatacggcttttgataaagattacgtagaaagccatgaaaaaaagaattgccaatagcctaaaattgttagagcagtcattacatgaatgagctgccctaatgaggctggcttaaagccgccttagtaaaacaaaattaaaaattatttgataactaacacagaat

SEQ ID NO: 789 - DNA, 1228 bp, unidentified
  source 1..1228: mol_type = unassigned DNA; note = element_0c2a7c8
  misc_feature 1: note = core
  misc_feature 2..225: note = LE
  misc_feature 226..1197: note = CDS
  misc_feature 1198..1228: note = RE
  misc_feature 45..214: note = bridgeRNA
tcttaagttagcattttaataaaaacactaaattaaggcctaaaaataagaaagcacaaaagagaggagtaaggttaatatacacgcagaagctttagacttcgtcaacattgaaaatcccctctcttttctacacagatttcgtacagttctatgaggcttttagacctcgattttaagtcgttgaaactcgcgtagatcgtcctttcaaaaaaacattttcttatgaataaagatattaaatattttggaatagacattagtcatttggtgttcgatgtcacggactctgatggtaattactatcagtttaaaaacaatgaacttggctttaaaaagttcacgaaacttttaaataataagagtcattgcgttatggaagccacaggctattatcattatcagttagcgtatcatttgctagaatctggtatcaaagtatcggttgaaaatccattgtcagtaaaacgctttatacagatgggactatcaaaagttaagacagataagagcgattcaaaacttatttgtgcttactcagagcaagtagaattaaagctatggaaaggaaattctaaggaagaaatagaatgtcttcaaatcgttagaaccctttctgtatatacaaaacaaagcactatgctaaaaaacaaactacatggagaagcggttttgggaaatccaagtaagcttgttgtaacgtctttaaaacgtagtttaagacaactaacaaaagagatgaaaactttggaggataagctgttaatattagtaaaacaatcacatcaagatttatttacccgtttaaaaaccattccaggtataggaccaaaaatagccattatgttagtggtattaacaggtggatttgatcgttttacgagcgcaagtgaactttgtagttacgctggccttacacctatgatccggcaaagtggaagtagtgtaaaagggaggccacgaataagtaaaatggggaatcaaaagcttcggaatttattatttatgtgcagttttaatgcgtgtaaatacaacaaagcttgccgcgatctttatgagcgaatcgtagcgaaaggaaagagcaaaaaattagcattaattgccgtgtgtaataagctactaaaacaggcttttgcactagctaaatcaggattaatatatgatggaaactataaaagtactttagtgaaaaattaatacatttttacttgttttttaccacagtact

SEQ ID NO: 790 - DNA, 1352 bp, unidentified
  source 1..1352: mol_type = unassigned DNA; note = element_0c3430f
  misc_feature 1: note = core
  misc_feature 2..73: note = LE
  misc_feature 74..1099: note = CDS
  misc_feature 1100..1352: note = RE
  misc_feature 1121..1349: note = bridgeRNA
taatgagatggtcgccccgcctcccgggcgttacgcttacggggtgttttctaccaaagatgaagaggccatcatgcaagacacgacgctggttggaattgatctgggcaagcacagttttcaccttcacggccaggacaagcgcggcaaagccgtgtttcgcaagaagatgagccgcaagcaactggtcgagtttttcgctacgtttcacgcctgtactgttgtgatggaagcgtgcgcgggtgcgcattatatggcccgcaagctgactgcgctcgggcatcaggtcaaactcatctcaccacagttcgtacggccattcgtcaaggctaacaagaacgatttcgtcgatgccgaagcgatttgcgaagcggcatcccgtcccgccatgcggtttgtcacaccgaagacggaatcgcagcaaactctctcagccttgcatcgtgtccgcgactcgctggtgcgggagcgaacacaggctagcaaccaggtgcacggcttcctgctggaattcggcatcagtctgccggttggccacgccgtaatgaagcgtctgccggctgtcctggcagagcatgccttgccgcctcgactggttgcgatccttgagcgtctgcacgtgcatttcaagtacctcggcgaacagatcgacgaggtcaacagagaaatcggcctccaactcgccgacgacgctgtcggccagcgcttgatgacgattcccggcgtgggtccaatcactgcaagtgtgttggctgccgagatcggtgatggtaagcagtaccgctgtagtcgtgacttcgccgcgtcggtggggctggtaccgaagcagtacagcactggggggcgggccaacctgcttggcatcagcaaacgcgggaacaagcatatccggcgcctactggttctgtgcgcgcgggcttacatgcggcaacttgaccggcaatccggtcggctcgccacctgggtccgtgccatgctgacacgacggcactccaacgtggttgcctgcgcattggcgaataagctggcacgcatggcgtgggcgctgacgacccgcaacacaacattcaattcggaatcagttgccatgcccgcctgagcaacctctcccgctttaccgaagtcaacccatctggttttgcgactgctgatatttgatgacatgaacggcacaccggcctggcagacatcctggagagtaaacaagctcccgaagctgcacgcgttattaggactgtcaggcgcgattctcatcgtggcgcgaggagtgatcctcacattgacgccggatagatttaggcaagccaatcatccacaaacgtcggtgttgcaaaaataggggcgaccataga

SEQ ID NO: 791 - DNA, 1230 bp, unidentified
  source 1..1230: mol_type = unassigned DNA; note = element_0c37a55
  misc_feature 1..3: note = core
  misc_feature 4..245: note = LE
  misc_feature 246..1046: note = CDS
  misc_feature 1047..1230: note = RE
  misc_feature 58..223: note = bridgeRNA
catcctatgtttgtataaataaaaagtaaggtggattttagagaaagaattattaaatttcaatagaagaagggaaagaaataaaaaccgagtttcgtcattggtcttataaggctgttcgcaatgccggttcctttccctttctgctttaaacttggacagttcgttaggcgttgggagcctgtaagtaggattgataagttaagcagatcttctatttactttgtttctctaataacaaatttatggaaaaatcttttatttatgtaggtgtcgacattagcaaactaacttttgatgtggctatttttaaaaatggcatttattatcatcacaagtttagcaatgatttaaaaggctttaaatcgttcatcaaattactgaatactgataactgttgtgttatggaagccagtgggccttactaccttaacctcgcctttttccttgtggatcagggtatagctgttagtgttataaaccccttggttatacgcaggttttcacaaatgcgtatgctccgcgccaagactgataaaaaagatgctgcgatgatagcagaatatggtaaaacagagcgtccggttttatgggagaaagaagaaaattatgttctggagttaaagcaaatgcaggcatactgcgaacaactcaataaaagccggacaggcttaattagacaaaaacaggcctttgaagctaatcctgtacaaagtcagatagtgatgaatagcctgaataaacaggtagaagagttggaacaacaattaaaatttattgaaaaggaaatggttagtttaataaaacaatatcatccggaacagtaccagcaattaaaaagcataccgggcattggcccaaagtcagctatggggctaattgtgctgagcggaggttttacaaagttcagtaatgcaaagcaacttagttcttatgttggaatatcaccaagaatcttcgaatcgggaaccagtgtaaaagggaaagcacggatatgtaaaatgggaatgagcaggataagggcaatattatatgtatgttcctagtctgcagtcaagaaaaataaggcgtgtaaacaactctttgaaaggttgcttgagaaaggtaaagcaaaaaaacttgccctaatagcagttgtaaataaactattgaaacaagcttttgctatcgcaacaaataaaatatattataatgaaataatttaaaattctcttgcatataaacacagtt

SEQ ID NO: 792 - DNA, 1227 bp, unidentified
  source 1..1227: mol_type = unassigned DNA; note = element_0c37f6a
  misc_feature 1..2: note = core
  misc_feature 3..240: note = LE
  misc_feature 241..1212: note = CDS
  misc_feature 1213..1227: note = RE
  misc_feature 6..210: note = bridgeRNA
cttgtatctcgactatcgtcccgtgagggggatagtccccgactgatcatcgggggagggcctggaagtcgtacccaccctaaggcctcgagccagctttgtagatagtgctccagccctccacactcactcgaacagtccgaacggtatctagggcccacgacaggtgagagctcgcattcacaaggtagggccgggtgcagtgatgatcatcctgaatggattagctgaggagtcttcatgtccagcatcgtcggcatcgacatcgccaagcacagtttcgacatcgccaccctgcaaaccaacggtaagtaccgcactaaggccaagttggccaacagcgccgccggtttccaggtactccaggagtggctgcagcagtacgccgagccgggtgcctggctcgtgatggaggccaccggcacctatcacgaggcgctggccgagcacctgcacggcctgggctaccgggtctgtgtgatgaatcccgcgcagcttgccagctacgcccggagccagctgcagcgggtcaagacggaccaggtcgacgccaagctgatggccagctacggccagcggcacgtggatgagttacgcgcctggcagcccgagccaccggcgatacgccgcctgcgcgcgttggtgcggcgtctgcaggacctcaaggagatcgagcagatggagcgcaatcgcctggatgtcgccgatgccagcgtgcaggattcgatccgttcggtgctggagcatgtcgagcagcagattgccgagaccctgaaggcgattcgggaccacctcgacgacgacccggacctgtgcagtaagcgcgatctgctggtcagcatcgatggcatcggcgagcagacggccgccttgctcctggcggagctgggcgatccgctgcagttcaagaatgcccgggcaattaccgcgttcgccgggctgaacccgaagctgcaggagtcgggccagcacaagggccgcgtgcgcatctcccgcgtgggctcggctcgtctgcgcaccggcctgtacatgccggcggtcgtctcgctgagccacaatccggccatcaaagccctggcacagcgcctgcgagcccgcggcaaggccggcaagcagatcgtctgcgcggcgatgcgcaaactgctgcacatcgcctatggcgtactcaagtcgggccaaccctttgatgctcgcctggcccttgcccactgagtgacaagacggtat

SEQ ID NO: 793 - DNA, 1421 bp, unidentified
  source 1..1421: mol_type = unassigned DNA; note = element_0c48427
  misc_feature 1..4: note = core
  misc_feature 5..480: note = LE
  misc_feature 481..1407: note = CDS
  misc_feature 1408..1421: note = RE
  misc_feature 1..190: note = bridgeRNA
ctccgtaaggcgttaggcggcccagggggccgggtgtggctgatcactgcttgccgttagtggcttcccaggagtggccgcccggtctcttggggcgccctggctgctgattgagatctgcgatcttgtcgctgtttacggagctgacggcgaggtgttcctcgggcttggccagtaggtacgggcgaaggaggacatgatgggcaccgtcaagcgggacgagttatgggtcggcgtcgacgccggcaagggccaccactggggagctgctgtcgaccaggccggcgcaaccgtgtggtcgaagaaggtggtcaatgacgagaccgagatcctgaccgcgatcagcgagatcctcgccctggccgaccgggtccactgggccgtggatatcaatggcaccgcttcggcgctgctgctggccccctgctcgcggcccacgaccagagcgtggtctacgtgcctggacgaaccgtcaaccggatgtccggggcctaccggggcgaggccaagaccgatgcccgcgacgcgtacgtgatcgcggagacggcccggcaccgccgcgacttcactaccatcgacgtccctgcccaactggccgccgacctcgcactgctgaccgcacaccgctccgacctggtcgccgaccgggtccgcatgatcaatcggctgcgtgacatcctcactggcgtcttcccggccctggagcgggccttcgactacagcgacagcaagggcgcgctggtaccgctgaccggctaccagaccccggccgccatccgccgccgcggccaggcccggctgaccacttggctgaccacccggaaggtccgcagcgcgcccacggtggccgcgaccgctgtagaggccgcgcaggcccagcacactgtgttgcccggcgggagcatcgccgcccagctcgtggccgacctcgccacccagatcctggccctggacgagcggatcaagaacctggacaggcagatcggcgccacgttccgcacccacccacaggccgcgatcatcgagtcgatgccaggcatcgggcccatcctcggcgccgaactcctcgtcaccgctggcgacctggccaactacgccgacgccggacacctcgcatcggcagccggcctcgtcccagtcccacgtgactcgggccgacgcaaaggcaacatgcaccgacccaagcgctacagccgacgccttcggcgcgtgttctacatgtcggctcagaccagcatcatcaaggacggccccaaccgggacttctacctcaagaaacgcggcgagggctgcaagcacgtcaaagcggtcatcgccctggcccgaaggcaagtcgacgtcctgtgggcgctgatgcgtgacaaccggatcttcacccccgacccaccggtcacgcggacggcttgactcagtcattgcga

SEQ ID NO: 794 - DNA, 1342 bp, unidentified
  source 1..1342: mol_type = unassigned DNA; note = element_0c4b7ea
  misc_feature 1: note = core
  misc_feature 2..195: note = LE
  misc_feature 196..1092: note = CDS
  misc_feature 1093..1342: note = RE
  misc_feature 1116..1333: note = bridgeRNA
taatgggatggtccgccgcagaactctagcaggtatagagtgcggggcaagggggcatctcatcaaaatctacgcgctgggcatcgatttgggtaagacggtgtttcatttggtaggtttggattccagtggcaagtggtggttcggaaacggtgttcacgcacacaactgctcggcttcaccgggagtttgcaggtgcaattgatcggcatggaagcctgcagtggagcacatttcctggggaaggctctgcgagcgcaagggcacgacgtgcacttgatgccggctcagtacgtgaagccgtatgggaagacgaacaagagcgactacatcgatgcggaagcgattgccgaagcagtgcaacgacgccggatgcgctttgtgccgatccaggcggaggagcaactggatctgcaggctctgcatcgagtgcgggagcgttgggtgatgcgacgtaccgcagtggggagccagattcgcagccttcttctggaacgcggattgactttgccccaggggcgaagtcatctgggacagatgcttcctaggattttggaagatgctgagttgaagctgtccggggcgtttcgtgttctgttggcgcaactcaagttggaactggagcaactggcagcacgcatcgagcagatggacatggtcatccagcaagaggctcgagagaatgaatcctgccaacgactgccgacgattcctggagttggccccgtcacggcaacggctttgatcgcggcggtcggcaatggaagcgcatttggaaaagggcgcgacctgtcagcctggatggggatcgttccgggagaatactcgacaggtggcaaacagaaattgctgggcatcagtaaacgaggtaacaaatacttacgaagattgttcgttcagggagcacgaagcgtactgcaacggcgagacaagcaggctccagggctcagctgttggttagcacaactactggcgcgcacgcaccaaaatgtggcggtcgtggccctggccaacaaattggttcgcatcgcatgggcggggttgtgcaggaacgaaaactatcgcgctccggtgctcgcggccaccacctaaaaaccctgtttaagaaatgaatttcctgtccggtctgctggcgaaaaaaaagatggcaatgggtctctcccacgctctcgaaacctgataccggtaaaggtcgcttccagaccgtccagtttatagggaccagagcgagcggacatccatcatggcccggagtcgctgacgccactcaaggccgaatacattggcgcagaccatctgccattcttcgtttttcgcttgcatctctgcggcggaccctaca

SEQ ID NO: 795 - DNA, 1364 bp, unidentified
  source 1..1364: mol_type = unassigned DNA; note = element_0c4ddec
  misc_feature 1: note = core
  misc_feature 2..75: note = LE
  misc_feature 76..1101: note = CDS
  misc_feature 1102..1364: note = RE
  misc_feature 1077..1352: note = bridgeRNA
tgatggggtggacgccccctggcggcatcgctgtgccaaagtggtgtcgttgatcatcacttgaaggaggcgtccatgttggaagttaacataatcgggttggatctagcgaagaacgtttttcaggcgcacggtgcggatgcatcgggaatcgccctgttccgcaagaaattgcgtcgtgatcaggtgcttcggttcctcgccgagcagccgacttgcacggttgcgatggaggcctgcgccagcagccattactgggcgcgggagatttcagggcttgggcatagcgtccggctgatcgcgccgggctacgtcaaacctttcgtgaagcggcagaagaacgatgcggctgacgcggaggcgatctgcgaagccgcacagaggccgaccatgcggttcgtggcggtgaagagcgaagagcagcaagctgcggccattgtttttcgcgtccgcgatctcgtggttcggcagcgaacccaaaccatcaatgcaatacgcggccatcttgccaaattcgggatggtggccgcgcaaggcctcttccatgtggccaagcttctggccgcgatagaggacaagggttccgctgttcccgaagtcgcccgctcgatcctgcgcctgctcgtggagcaattgcgctcgttggacgagaagatggctttgctcgaccgcgagatcgcccggcgcgccaaggaagacacggaagccaggcgactgatgacgatccccggtataggtccgatcaccgcgacagctctcgccgcgttggctccgtcggctcagaccttcaagagagggcgcgacttcgcggcctggcttggccttacgccgctgcaacgctccacgggcggaaagcagaagctcggcgagacgtctcggatgggcgagcgaacgctacgcaggctgctgatcataggggccagcgcggccgtacgctgggcaatgcggaaggggaaatctgcggacccatggctcatgcgcatcttgggccgcaagccgcccatgttggtgatcgtcgcgcttgccaacaaaactgcacgcatcgtctgggcactgatggcgaaaggcggaacttatcgggcgccagccgtggcgggttagttccgctcggccagaaggcctcgaaagtgtgagaaggtcaaacggagagtatggcgcaacggtcaacgagacgggatcgggaaaaccagatcatggatacgtgcgttgagcacgcgagattgaattggacccgctccgcgaactcccatacgggcccgcggcatgtcgaacgtcgcatcagaggccggacacatgtcagcacccgaccacgctccgatctctttgtagaagattcttcttgcatcgatgggggcgtccacaca

SEQ ID NO: 796 - DNA, 1452 bp, unidentified
  source 1..1452: mol_type = unassigned DNA; note = element_0c4e94c
  misc_feature 1: note = core
  misc_feature 2..151: note = LE
  misc_feature 152..1198: note = CDS
  misc_feature 1199..1452: note = RE
  misc_feature 1221..1450: note = bridgeRNA
gaatgtaatggacgcctcccgcttgtgccagaagagcgatgagcgggaaagctggtgaaagtagaggaagatggatccccacaggccaacggcatcaaagtgcccaggtgaaagtcagcgtactttcgaggcaaacaggaggatccacatcatgaatgctacgcccaaaaccgtggtcggggtagataccgccaagagcgtattccagttgtacacgatagacatggaaaccggcgaagtgacctgcaagcagcttaagcgtgtgcagttcttgcaatggttttcaaaccgcgcaccgtgcgtagtcggcatggaagcatgcggcggttcgcagcactgggcgcgccagttgcaggcgcaggggcatcaggtcaggctgatgggtggcaagatggtcaaagcgtttgtctgcggtaacaagaatgacgccgcagatgcccgcgctatttggctggcagcgcagcagcctggcgtaaaagcggttgccgtcaaaagcgaggctcagcaagcggtgctggcgatgcaccggatacgccagcaactggtgaagagccgtacagcgcagcgcaacgaattgcggggcttgctggccgagtatggcgaggtgttcggcttaggtaaggcggccttcaatgcaggcatgaagggtgcgctggcccgtctggcggaacgattaccggcggtgctgatcgataccttgcgtgaacagtggcatgagttggtcaggctggatgaacggattactgccatcgaagccagattgttagcatggttccgccaggaccgcgcaacacaagccattgccgccataccgggcgtcggcctgctgacggcaacggcagcggtggcgaccatgggtcaggccaatgctttccgctcggggcgtgagttcgccgcctggatcggactggtccccgcccagagcgggactggaggaaaggttcggctgttgggtatcagcaagcgtggcgacacttacttgcgcactctattgattcacggcgcacgtgcggtacaagcacacgccaggacaccggggaaatggttgcaggagattggccaacggcgaccacctaacgtggtaacggtggcgctggccaacaagattgcgcgcacgatctgggcagtattggcacatgatcgcgcctatgacaaggggtacgtcagcgtccggccacaaaccaccatgccgacgtgaaaatcaaccaactacgaaaggatggcacgccaacggttgcgataggtaaaaacagtgatgacagacaggtcagaccgggaaccactaaacctgaatgcttgccggggcctaaagcccgccggaggaatgaggagtggctcagcggatttcatcggggccagcgacaatgtcgcatacaaggccggatatagaactgcgactttcttcgtctatgaattgctggaattaccttgcaaaagggaggcgtccatata

SEQ ID NO: 797 - DNA, 1624 bp, unidentified
  source 1..1624: mol_type = unassigned DNA; note = element_0c50db2
  misc_feature 1..3: note = core
  misc_feature 4..255: note = LE
  misc_feature 256..1494: note = CDS
  misc_feature 1495..1624: note = RE
  misc_feature 8..223: note = bridgeRNA
gttcgtaatataaggttagccagatttttctggttgacctttttcttctaggtcttattataacggtagtcggggtagaacgtctggcccgtgggacttgatcccgtccgcaaaactgttcaccccctacttgtataaacatgtttcaagctggttgggacaaggatcccgtttaacaagcgaacctatgatattacaagcagctttaggggttaccgactaatttagtattttcttagaggaggagatttcaatatgaatccagtcgttggtctggatatttctaaaggagaaagtcaggttcaagcctttttggataaaagtcagccctatcgtaagagctttagtattaaacatactctagatggtttaggaggtttattagaatttctaaaagagattgagagactggctgatggaaagcaaccttcggttattttagaatctacaggccagtaccatatccctgtcattcaatttttggaggaacaacagtatgtctatattattgttaacccacttgtctctcatcgagccagaagtacaaatttacgaaaggtaaagacagatgccatcgatgcctatcatctatgtgaattgtattataaggaagagttagaaccatacaaaaagagaggaattcaactcttaaatcttcgtaatctcacgagacaacaagagacgatatcaagcacagctgcacaaacgaaattacagctacaatcgattttagatcagatatttcctgaatatagaggtgtctttgggaatctatattcaaaaatctcgttacagattctatcactctttccgacttcagaagatgttctaagtgtcggtgaatgtgatcttactgataaaatcgcagaattatgtacaactcgttcagaaaaatgggcaaaggaaaaagctcataagttgagagaagccgcattacgtaatccgtttcaaaacaacttgtaccagagccatatctttaacctaaaaatgtttatcaacattgttcttcaatatcaagagcatctatcaatgttagcaacagaaatagatgccctcgctaaagaaattgaagaatgtgagattatccagtctatccctggtataggagaaaagattgcggcaacaatcatctctgaaattggagagatagatcggtttaaccaccctaaaaagctagtggctttcgccgggatagatcctagcgtctactcttctggtaggtttactgcttccataaatcgcataaccaaaagaggttctagcagactaaggcaagcgttgtttatggctgtacaatgcggtataagagatgcacgtaagcaaaaaacaagtgatgagattatccctagaaataagcgattaagaaaattctacgataaaaaacgagaagaaggaaaaccttttagagtagccataattgcctgtgcaaataagcttttacattggatttatgcactattaaaaaggaaagtgaccttccaaaatgaggcttaaaaatcaaatctaagtatataaaacaaaaccttccaattatataaaggaaggcttatttggtgtacccttttttagtatatcatgtccgttttatattttttattgaaaaatcttgacaaactattagctg

SEQ ID NO: 798 - DNA, 1505 bp, unidentified
  source 1..1505: mol_type = unassigned DNA; note = element_0c55618
  misc_feature 1..4: note = core
  misc_feature 5..238: note = LE
  misc_feature 239..1489: note = CDS
  misc_feature 1490..1505: note = RE
  misc_feature 21..206: note = bridgeRNA
gtcactaggccacactcctcattgtgaggtccgcatagggtctcgatgtagggactcggcggaggccggggtgacggtccgttgtggtcgccggtgaacggccagcgtgacaccaccgcccccggcctccccgaggctgcggactggcaacagggagacgcgccgcagagcgccggttagtgaccacccggaagtcagcctctccgccgagtcgtcgctgccgccgtaaggagttgtcgtgtcgcttgcgctgcccgaagcgctgttcttcgttgggatcgactgggccgccgccgagcacgcggtgtgcgtccaagaccagaccgggaagatcatttccgagttcgtgatcgagcactcgaccgacgggatcgctcgcctggtgcgccggctgggcaagtacgggcccgcagggcaggttccgatcgcgatcgagcggccgaacgggcggctggtcgacctgctgctggaggccgggcacccggtggttccggtcaagccgaatgcgatcaaggcctggcgggagagcgaggtactgtccggagccaagaacgacgcgggcgacgcggcggtgatcgcagagtatctgcggcttcgccggcaccggctgcgtgtggccacgccgtactccgatgagaccaaggcgctgcgcacggtggtgcgcacccgtgatgatctggtggacatgcgggtggccgccaccaaccagctgtcggcgctgctggatgccttctggccgggggccgaagccctcttcgctgatgtggagtcgccgatcagcctggagttcttgacccgctaccccaccccggccaccgctgcccgcctcggggtgaagcgcatggcggcgttcctggtcaagcacggctactccggccgtcgcagtcccgctgagctgctggagcggctgcgctcggccccggccggaaccgtcgccgacgccctgtccgaagggcttcgtgatgctgtgctggcgctggtggccacgctgaaggcgctgaacgcggcgatcaaggacctggaccggtcgagcgccgcccacctcggcgagcatccggacggtgagatcttcacgtcgctgccaaggtcgggtcagatcaacgccgcccagatgctcgccgagtggggcgactgccgtccagcctacgcaagcgccgactccgtcgccgccctggccgggtgcacgcccgtcaccaagcagtcgggcaagcaccgcgccgtccacttccgctgggcctgcaacaaacgcttccgcaaggccatgaccaccttcgccgacaacagccggcacgccagcccctgggcgcagaagatttaccgcgatgcccgggcagcaggcaaggaccacccgcacgcggtccgtatcctggcccgcgcctggatccgcgtcatctaccggtgctggctggacggcacgccgtacgacccccaacagcacggggccgcagccagcctgaccgagcaaacatccgagcggattgctgcctgaggttgacacagggagt

SEQ ID NO: 799 - DNA, 1447 bp, unidentified
  source 1..1447: mol_type = unassigned DNA; note = element_0c5b49d
  misc_feature 1: note = core
  misc_feature 2..51: note = LE
  misc_feature 52..1179: note = CDS
  misc_feature 1180..1447: note = RE
  misc_feature 1169..1383: note = bridgeRNA
gcggtcggagctaacggaccacgcagagctacacgcgaaaggagccggtctatgcctaccaacctgcgctacttgggcctggatgtccacgccgagacgatcgccgccgccatcgcggagccggacggcgaggttcgggccctcggcatcctccccaatcgccccgaggccatcacgaagctgatccggaagctcgagccccgccatgggcttcacgcctgctacgaggctgggccctgcggctacgtgctctactggcagctgacccagcttggtgtccactgcgacgtcgtcgcccccaccctcgtgcccaccaaaccgggcgatcgcatcaagaccgatcggcgggacgccgcccggctcgcccgctgctaccgggcgggtgatcttacgccggtgtgggttcccgacgccgcccatgaggccctccgggatctcgtccgcgcgcgcgaggccgctaagcaggaccagctccgcgcccgccaccgcctcggcaaactgctcttgcggcgtggcatccggccgccgccggcggccaagccctggacccagcgccaccgccgctggctcgacaccctgcagctggatcctccggcgctgcaggcgaccctcgacgactacctgcacgaagtcgatcacgccgccgcgcgcgtggagcgcttggagggcgccctcgataacgcgatcgccgcggcccccgcgccgctgcgcgcggtgatcacggccttgcaaacactccggggcgttcgccaggtcacggccgcgacgatcgtgagcgaggtcggcacgctctcgcgcttcacccatccgcgccagctcatggggtacagcggcaccgtgccctccgagcactcgagcggcgcgagcgtccaccgcggggcgatcaccaagacgggcaacgcccacctgcgccgggtgctggtcgaagccgcctgggcctaccgcttcccgcccaggtgcggcaaggcgctgcgcacgcgccagcgcgggcaacccgacacgatcacggccatcgcctggaaggcgcagcaccgactcaatacgcggtatcggcgtctgcttgggcgcgggaaaccgacggctcaagtggtcaccgccgtcgcccgcgagctggtgggcttcatctgggccattggcgtcgccaccgagcgcgcgagcacggccgccgcagctgcctgaacttgggtgtggcggtcgcgaggcacggtaaaggagaatcctcgagcgccctcggcgatcaggcttcggccgaactcgcgccgctagtctcgaggcagctcccgacggatcatgattatgtcggcgcccgcaggggcgatccgcgaataacagagtgatccaccgtcgcagctgccccgaccgcccccctagggctacggtacttgacaggtcattccataacagggcgctcgggcggcacatctgcgtcgaaagatgggcgatactg

SEQ ID NO: 800 - DNA, 1101 bp, unidentified
  source 1..1101: mol_type = unassigned DNA; note = element_0c6a5a2
  misc_feature 1..2: note = core
  misc_feature 3..207: note = LE
  misc_feature 208..1086: note = CDS
  misc_feature 1087..1101: note = RE
  misc_feature 12..188: note = bridgeRNA
cttgtatctttctttccgtggtggttagctaccatcacacgaagcaaaggaagcttgagcccacccttaaggctcgaccttgtgacgtaaatcaagccctctgcttcacctttcgccagcatagacactgaacggtatccaaggggtgaaccctgcatgcacaaggcaagtgggcgaagttggctaacattgtaacaggaggtcatcatgttctatctcggtatagatgtggcaaaagcaaaattagattgttgcctgttgctggatgaagccagtgacaagcacaagaccaaagtagtgaaaaacaccccgtcaggcattattgatttgctggcttgggttgccaaacaaaacgtttccccagaagcattgcatatcgtcatggaagccaccggcgtctatcacgaacaagctgccatggcgctcgcggatgctggcgtgatggtatccatcatcaatccggcgcagattaaagattttggccgtgggctggccgtgcgcaccaagactgatggcgtggacagcgttgtgctggcccgttatggcgcattactcaaacccaaagcttgggtgccgccccctcaggaagcgcgggtactgcaagcgttgttggtacgtcgtgaagccattgcccaggatttacaacgcgagcgcaatcgccaggaaaaagcccatgccacagacacgccagcgctgattcataaatcacttgaagagagcattggttttttggtcaagcagttagcccagctacaaaaggatattgacgcacacatcgaccagcattcgaatcttcagaaagatagggcattgctccagagtattccagtaattggcccacaggtggggagcaatatactctctgtgatacacaaccatgatttcggttcagctgaacagttggcggcttatctgggactcgttccggtggaacgacagtcgggcagttcggtgcaacgcctgcttgcccgaggcaagtccaagatgtcctcactcggtgccgcaatgcgcaagctggtgtatttgtgctttggcgttctcaaaactcaacagccgtatcaacacgattacttgaaaaatgtttgactttaaagacggtat

SEQ ID NO: 801 - DNA, 1393 bp, unidentified
  source 1..1393: mol_type = unassigned DNA; note = element_0c707a4
  misc_feature 1: note = core
  misc_feature 2..97: note = LE
  misc_feature 98..1129: note = CDS
  misc_feature 1130..1393: note = RE
  misc_feature 1174..1390: note = bridgeRNA
taatgtaatgaaccacccccacccacgccgctagtccggcgaggtcttccagactagattgagtctgctggaccttaaccttggatgggagatcgacatgactattaatatgctgggcatcgatattgccaagagcacttttcaactacacggcgctgattgttcgggcaaggctgtttataagaaacgtctgaccagaagcgaactagctgcccatatcgcaaatctacccgcatgcaccattgtgatggaggcctgcggcggagctaactactgggcccgcgtgtttcagggcaatgggcattcagtgaagttaataagccctcagttcgtaaaaccgtttgttaaaacaaacaagaatgacgctaacgatgccgaggcgatcgtggaggcagccagtagaccctcaatgaactttgtgccgatcaagcaggttgaacaacaggacatacaatcagttcatcgaatacgcactcgagttgttaagaaccgaacagcgctaatcaacgagatcagaggcttgtgcttggagtatggtgtcgttcttcgtcctggcgccgcaagcgtcaaatcgtcactctgcgcggccattgccaacagtgataacgagctgactccctcatcacgcgagtcgatgcaggcgctttatgaggaattggtcgatatcgaagtccgagtgaaaaacctggactcaaggatccggcaattatgccgtcagaacgagcgctgccagcgcatcctggaggtcccgggtgtgggtgaattgacggccacagccattgtcgcagccgtccccgaccccaaagaattccgcaacggccgccacatgtcagcctggttagggctggtgccgaggcagtcttccagcggagacaagcgggtgctgctggggatcagtaaacgaggtgaccggtatttacgtacgctgttgatccacggggccagggcagtgttaagccactacaaagacaaggataacgactatacccgctgggtgggtaggaaaaaggcgaagttaagtcacaacaaggccgcggtagccttggccaataaaaatgccaggattatctggtcgatgttagctacgggggaaagctttaactacggagaacacgcaaccgctgcttgatacgcaatatcaaatagcttcctttaaccaaccgaaaattatcacgagtttgctacagttgatttgaatgatggtctataggttgcaccggctcttttagaacctggaagttgtcacggccccttgaggccatggtattgatgaggtggaggagcgcggatttacatcagggcacaagcttggcttgcacgccgaatatatgactgcaactcaaacctatgacatccatcgcaaatcagcttgcaaaagggggtggttcatata

SEQ ID NO: 802 - DNA, 1378 bp, unidentified
  source 1..1378: mol_type = unassigned DNA; note = element_0c7bf79
  misc_feature 1..3: note = core
  misc_feature 4..88: note = LE
  misc_feature 89..1111: note = CDS
  misc_feature 1112..1378: note = RE
  misc_feature 1117..1365: note = bridgeRNA
tgatggtgtggacggctccacccaatcggcatcacaatgtgccataatggtggtgtcagaaacccacatagagaaggagccatccacaatggacattacaacactcggaatagatctcgccaagtcagtttttcagcttcatggcgttgatgcgcagggggtcatcgttttgcaaaagaaactgcgacgtggcgctgttgttaagttcctgtctaaacttgaaccttgcctaattggtatagaggcttgtgcgacatcacattactgggcgcgcgagattgcggcgctgggacatgacgtaaagatgataccgcccgcctatgtaaagccatatgtcaaacgccaaaagaatgatgccgcagatgcggaagcgatctgcgaggctgtcacccgcccaaacatgcgcttcgttcctgtgaagactgaagaacaacaggctgtcctggtgctgcaccggtcccgcgatctgttgatgcgacagcgtaccatgatcttgaatgcgatccgttcacattgtgcagagtttgggatcattgcagcgcagggggctcgaaaagtttctgaacttgtcactaaacttcgtaatgatgacaccctcggagtgccggaggtaggtgtgtctgcccttttgtctttggcatctcaacttgactgcttggaacaagaagtccgtaaaattgagcatcagcttttggcatggcaccggcaaaacgctgcgagccagcggctcgagaccatcccgggtatcggccttatcacggcgacggcgctggccgcgagcgtgcctgatccggctgtcttcaaatccggccgacagtttgcagcctatctcggccttgtaccccgacagaactcttcaggaggtaaggatcgacttggacgtatatcgaagatgggaaacggttacttgcgtcggttgcttgttgttggcgccacctccgtcacgcgacgcgcaccaaccatcgacacccgaacgggcacttgggtgcgctcgctcttagagcacaaaccgacccgagttgtgactgtcgccattgccaataagactgcacgtacggcctgggcattgctctcgaaaggagaaagctacaaggccgtgccggcgatttgagcgcagcagatacaagcggcgcctcacgtcgccgcaatcgaatgtaagggcagaagtaagtgatgatgatcaaaagaaactgaagttaggacaccccgaggcactgtctgggcttacaagctcgctaatctgattgggacctaacgcgcggacttcatcaaggccagcggtattatcaaccgcatcaaaaggccggacacatgaccgcaacctgcaaacatcaaagtcactcaaattaactcttgcataaaaggagccgtccacaca

SEQ ID NO: 803 - DNA, 1171 bp, unidentified
  source 1..1171: mol_type = unassigned DNA; note = element_0c7c2a0
  misc_feature 1..2: note = core
  misc_feature 3..211: note = LE
  misc_feature 212..1165: note = CDS
  misc_feature 1166..1171: note = RE
  misc_feature 19..217: note = bridgeRNA
cttgtaatagcgaaatcgaatatcgttggggtgttccgaaaggaatgctctgccgcggacggccatccgcggcagagcggctggcgatcggatcgtacccgccctgagtcgtctttgactgccccgtagcgtgatcgcgccagtgccttcatcggacccggatggttgccggaacaacttggttcgcttcacaaggcaggggtcgacgaagatgacgaagactagcacaggaacggccggcatcgatacggccaaggacaagctcgacgtcgcggtgcatggccgggagcagcgatggcaggtggcgaatgctgcggcgggatggcggcaattggccaccgatctggcaaaggcaggcgtcacgaaagtcggtatcgaagccaccggcggttacgaacgcggcgtggtcaggcatttgcgggccaaaggcctcatcgtcctggtcttgcagccgatccaggtcaagaatttcgcccggctgcatctgcgccgcgccaagaatgatgtcttggacgccgtactgatcgcggcctgtgcggcgctgctcgatcctccgtcgatcgaagcagacgaaaggctctcggatctggcggatcacctgacgttcgtcgagcagatcgaagaagacattgcccgcctcaaaacccggctcgaacatatcgacgagccacggcgacggcgtctggtcctcaacgacatcgatcggctgaaggcgcgccggctcactgagctcgaaaggatggccggccaattgcgcgaacaggcggatctggcgcggcgtctcgatctggtgctcagcgtccccggcatcggcgagcggacggcgctggcgctgatcatccgcatgcccgaactcggccagatcagccgggagaaggcggcggctctcgctggccttgcgccgttcgacgacgacagcggcaagcgtaagggagagcgacacattggaggtggccgagcccgcctacgtcgctcgctgtttgctgcggcgctgccggcctccttccgctggaacaaggccctgtgcgcgctctacgcccgcctcaaaacccgaggctatgcgcacaattacgccctcgtcgcctgcgctcgcaagctcctcatctacgcaaacaccgtcgtccagcgcggctcaccatgggtcgaaaaccagaccgcgctctaatggttg

SEQ ID NO: 804 - DNA, 1175 bp, unidentified
  source 1..1175: mol_type = unassigned DNA; note = element_0ca8842
  misc_feature 1..2: note = core
  misc_feature 3..204: note = LE
  misc_feature 205..1152: note = CDS
  misc_feature 1153..1175: note = RE
  misc_feature 3..179: note = bridgeRNA
cttgtatggtaggacttgaagggaggaggagggactagatccgcttctgactgttcgcgcagtacagaccgtgggagatttcgcccctcctcccttcacccaagcgccgataaggaatgcttccggttttgaccgacgaaagtacaagcctgcgcctctgggtggcccttcaagcccttagaccttacctgcggagacgcgctcatggcaatgccatcatccgaacacagcacgatcataggcgtcgacgttgctaaggctgaactcgtcatttacgaagacagctccggacagttgagcactattgccaacaacaagacggccatcaagcaatggatcaaggcattacacggaaaggtctcgattgcaatcgaagccaccaatgtctatcacctgctgtttaccgatatggtccatgaagcaggacataccctttacttgatggatggttatgccctgagtcactaccgaaaaggtattggttcacgcgccaagaccgacccgatcgatgcaagggtactggcccggtacctcaagaacgaaggcgtcaaccttagcccctggatcccaccttcgacgctctatcgcgaccttgtcagcctgtttcgcaggcgcgcgatgctcgtccagacgcgtacagcgctgagactgagctgggagggtgagccgctgctcaagagccttttgaagtcccagctcacctcgatgaagcgccttgaagacctcattgaaaacatgatcaagaagctgctcgaccaggcaggactgatgccgttagtaaagcagtgtatgaaagttgaaggtattggttttcttaccgctgcgcgtttggtcgccacctaccagcgaggcgagttcaagagtgccgatgcctttatcgcctttctaggaatggacctgcgagtggctcagtcgggcaagaaaaaagaacgctcgacgttgaccaaacgaggcgatccagaggtccgtcgtttgctgcacaacgcggcgatgtcagcaggcaggacagctgcttggaaaacgttttacgaagacaagcagagccgcggttttaaaaagactcaagtcctggtcatgctggcccgcaagctggctcgagtggtctttgccctgatcagaagcggagaggaatatcgtcccaaaaccgcttaagcgcttggcaattaccatagaat

SEQ ID NO: 805 - DNA, 1418 bp, unidentified
  source 1..1418: mol_type = unassigned DNA; note = element_0ca8a5f
  misc_feature 1..2: note = core
  misc_feature 3..217: note = LE
  misc_feature 218..1402: note = CDS
  misc_feature 1403..1418: note = RE
ctgatatagctcgttgacgcgggtccgcacactgaagcggacctgagcggggagtccggaaactgggctattcggtccatccgttgcggctaggttccggccctcgcccttcgcctccgtgcggtgatcgggacccatcggcttgtgtccggtgatcgggtgtcagcgatcgcgtggcgaggtgcgcgaggccccgaggtcagtggaggtgcctcgcatgccgaccctggggatcgacatcggcgcgtaccagcacgcgatcgcggtctgtcgggatggcgagaccgaagccgagcgacccgtgctgcggatctcggccgaccgcgccgggttcgatcggctcgatgcgctcgtcgcggcgcgcggcccgatcgagcgcgcggtcctggagtcctctgggcactattggttcgcgatcgccagccacctcgccggtcggggcgtcccggtcgcggtgatcagcccggtcagcgcgaagtacttcgccaagcgccggctgcagcgggccaagtctgatcccgccgacgcgcgtaccctcgccgcactcgccatggtcgaccgaccgcggacccgggagccgctcgccggatcggagctccgcgaagccgcgcgcttcgcgatgaccctggtccaggagcaggcccgggtctgccagcggatcctgcggctcatcgatatcggcttccccgagcttcgcgaggcgtacgaggatccctcctgcgcttcggcgatcgccctgcttaagcgcgccccgacggcccgcgcggcggccgcccggcggaccgagaacctggccaaggtccgcaccgccggcggccgggcgatcggcccggcgaaggctgcggtgatccacgccgccgcgcggcggacggtcgcgccgccggagcttgatcggcagatcggcttcgagatggaactgctcatcgagcagttcgagctgctcgagggccagatcgagcgggccgaggcccacctggcgacggtcgtcgactcggatgtcgtccggcggctgcggacgatccccggggtcggagcggcgaccgcggcggcgctggtcgccgagatcggggacatccggcggttcacggacttcgaccagctcgtggcgttcgccggggtccacgccgccgagcgcagctcgggaacgaagggcgtggaccccgagacgagctggcacatggccaagaccggggacgcgtacctgcgcgcggcgctctatcggatggccctcgtcgggatccagcacaacccggtcatccgggcccactacctgcgcaagcgcgcggccggcaagtcgaagatgaacgccctcggccactgcatgaagaaagccctcgccctggtctggggggtctggcacggcgagcacgacttcgtcgtgcccgaaggcactccctcttgacagcgcgatatgggac

SEQ ID NO: 806 - DNA, 1426 bp, unidentified
  source 1..1426: mol_type = unassigned DNA; note = element_0caf534
  misc_feature 1..2: note = core
  misc_feature 3..219: note = LE
  misc_feature 220..1410: note = CDS
  misc_feature 1411..1426: note = RE
ctgatataccgcctcgtggaggtcgatgatgctccgacctccacggggagaccggcgcgcggctatccggcagatgaccgttgggtctagtgtccggcccccgaccttcggccctgaacggtgatcgggatcctgcggcacggaccggtgatcggacccatcagctgacgtcgaccggagcgatcgggaacccctggagtcgagcgaggaggcgccagggtgacgacgatcgggatcgacatcggtggacggacgcacgtcgtggcgcgctgccgagagggacagccgaaggcggaccgggagatcctccgggtgggccagagccgcgccgggttcaccgcgctcgacgcctggctcgcacggcaggcggagcccgtgacgctcgtgacgatggagtcgtcgggccactactggatggcgctggcgagtcatctccggcgccgaaacgtgtcggtggcgctcgtcaacccgctcgccgcgaagtactttgcgaagagccggctggctcgcacgaagtccgatccggccgatgcccggagcctcgccgagatggccatgcgcgacgcgccatcagctcgcgacccgctcgccggtgtcgagctgcgccaggcggcccgcttcgcgatgacccaggtggccgagcaggcgagggtctgccagcgcctcgtgcgcctcgtcgaactgggcttcccggagctcggcgagctcttcgacgatccgacctgccggaccgcgcgtgaggtgctgcgggtcgccccgacggccaaggctgccacccgtcggcgggcgtcgacgctcgccaatgccaactcggcgcccggtcgacggcgtctcggcctcaccagggccgagcgcctccaggccgcggccgccgattcgatcgcggtgcccgagctcgacgccgaggtcgccttcgaggtgggcctcctgctcgaccagttcgacctgctcgagcaccagatcaaggctgccgaccgtcgcgtcgcctccttgctcgacggcgagacggctcgtcggctccagaccatcccgggtgtcgggcccgcgatcaccgccaccctgctggccgagatcggtgacatctcccgcttcaccgacttcgaccagctgctcgccttcgccggcgtccatcctgccgagcgcagctctggccgcaagggtgcgaacccggagaccgcctggcacatgtcgaaggccggcaacagccatctccgggcggcggcctaccggatggcggtcgtgggcatccagcacaaccccgtcatcaaggcgcactacgagcgcaagcgcgcggccggcaagtcgaagatgaacgccctcggacactgcatgcgcaaggcgctgagcctggtctggggcgtctggcgcaacggtcaggacttcgatcctcggtgggggctcgagtcttgacaaggcgctatgggat

SEQ ID NO: 807 - DNA, 1420 bp, unidentified
  source 1..1420: mol_type = unassigned DNA; note = element_0cbb92a
  misc_feature 1: note = core
  misc_feature 2..120: note = LE
  misc_feature 121..1140: note = CDS
  misc_feature 1141..1420: note = RE
  misc_feature 1179..1417: note = bridgeRNA
aaatgtaatggacgcctcccaccccgaagttgagacagcggtagtgcgcccacggaaccgcaactgctgcctggtccgtgctaaaccaaagttgtcttggaccaaactggagtcgtgatcatggcgaataccgttgttggcgtcgatatcgcaaaaagcgtgtttcagatccacgaagtaagcagcgtgacgggcgaggttgtgagcgttcaggtcaaacgtgctcgcttcctgcagtacttcgtcaatcgtgagccatgcctgatcggcatggaagcatgtggaggtgcgcagcattgggcccgccaactcaccgctatggggcatacggtcaagttgctacctgcacaaatggtcaaaccgttcgcgggcgggaacaagagtgacatggcagacgccaaggcaatatgggtagcagtacagcaaccagggatacgagaggtggcaatcaagacggaggcccagcaggctgtgttggccttgcatcggatgcgtcaacagttggtcaagtttcgcaccgcccagatcaacgcattacgaggattgctgacggaatacggagaggtaatgccgcttgggcgtgatgcactggccaaaatgttgcctggggcattcgagcgcgtggcagagctactgcctggagtgttgatcgatacactccgcgaacaatatgcacgaatcaaggaacttgataggcaagtgttggatatcgaacgtcgattgcgtgagtggcacaaagaagatgaagcctgcaaacgaatcgccgcgatcccaggggtcggcttgctgactgcaacggcaaccgttgcgacgatgggcgaccccaaagcattcagatcgggccgcgaattcgcggcctggttagggttggtacctcgtcaaataggaacaggcgggcgagtgaagctgctcggaatcagtaagcgcggagatacctatctacgcacgctattgattcatggcgcccgtgctgttctcacgagcagtaaagcgccgcccgaatgggcggtgaatttgtccaagcgtcgtccaatgaacattgctgtggtggcattggctaacaagatggcacgaacgttgtgggcgctcttggcttaccaacgcacgtatcaagttgggtatgcagttcggccggtttgaccggctcccgcatactcccgatcaatttcaacagagggtggacagctgaaaggttgcgcaaggtacgtaagaagtgatggcaaacaggtcggaccgcgacccaccaagtctgaatcagtagttggacttcgagtccatggaggaaatgagacgtgggtcggcgaattccatcagggccagcaggtatctgacctgcgacacaggccggatataaaactgcagccgtgtcctgttgtgacatcacagaagacgttcttggcaaacgggaggcgtccatata

SEQ ID NO: 808 - DNA, 1273 bp, unidentified
  source 1..1273: mol_type = unassigned DNA; note = element_0cbbfa6
  misc_feature 1: note = core
  misc_feature 2..309: note = LE
  misc_feature 310..1269: note = CDS
  misc_feature 1270..1273: note = RE
  misc_feature 72..228: note = bridgeRNA
accttatatttgcaattgcaaaataatttgtatttttgcagaaagatattaatgtataatcacatagactgaaagagagggggcgacgggacaaccaaactttgaaaacggagaagaatccattcccctattatgggtcccgccacccttttgaaccatcaacccaaataagaatttgccaaaaagtcattaaggttttcaggcatggtcaaaagtccctctttctctcagtctcaaaaacgatgcaaagataatgaaaaaaattgtaatcggaatcgacatcagtaaaaaaaattggactggtgtgtcatggtggataaggaaattgctggtttccatgacacagcgaacagaatggacgacatctacaacaagtttgccgaagtacttgagtatggcaaaatagacatcggagaggtgcttgtttgcgcggaatacacgggcaagtatatctatccattggtgctggcatgtcacaagtgccgggttgacctatggctggagagtggctacaacatcaagtgtgaggcaaggaaggaacgcggcaaggacgaccgaacggacgcacggcgcatcgccgagtatggccgcaaaaaccaggatgacgcccgtatctaccgcctccctggggaaagcatcgccaccctgcgcggcctccttgccgagagggccatgtactgttcccaacgggctgcgcacaaagggcagttacgcgacatgaggggtttcatgtcccccgaagcgtacactgcccgtgccgtgagacagctgtctttgatcaaggagcatgaccgtctgatagaggaggtggacaacagtatggcagaaatagtggcatcagacccggaactgctccgtcagcagcaactgctgctctctgtcccgggcatcggtatggtctgtgccgccgcactcatcgccgtgactgccgggttctctctattcgacaatggccgagagctatgttgttttgcgggactggccccatctgcctacacctctggcaccagtatacgctccaaacgcagggtatcctgtcgtgccgaccaccagcttaaagcactgctacacatgtgcgccttagtggctgcaacacgcatgaaatcaggacggttcgccgagtactaccagcgtaagacagccgaaggcaagaacaagatgagcgttcttaacgctgtccgtgcaaaactcatgctcacggctttcgccgttgtccgtgacaataccccttacgataaaaacttcaaaataaatttggctgaatcataagaat

SEQ ID NO: 809 - DNA, 1200 bp, unidentified
  source 1..1200: mol_type = unassigned DNA; note = element_0cbcae3
  misc_feature 1..2: note = core
  misc_feature 3..231: note = LE
  misc_feature 232..1197: note = CDS
  misc_feature 1198..1200: note = RE
  misc_feature 25..206: note = bridgeRNA
cttgtatgttctgcctcggcaagctgtagtgagaacttgtcggggtggagggactaacgccgcttctggcttttgcacagaccgtgggagatatcgtcccgcccctcaccatcgagcacccatgaggaatccatcgacgcggccctcgccggccctgatcgaccatatcctgcaagcgattgcctggtgagtcccgacaagtccctaaaccttagtcgggagcgcctgttcatgacaagtcagcctgcgccgatttacatcggcatcgacgtatccaaagccagcctcgatatcgcactgggcgagcacggcccggtgcagcgcatcgacaacacccctctagccatccgggcctggctgcgcaccttgcccagcggcccgctgcacatcggctgcgaggccaccggcacctaccacctcgcgctgcgcgacgccgtgatcaaggccgggcacccgctctacctgatcgacggctaccgcctctcgcgctaccgcggcgccaccagcgtgcgggccaagaccgacccgatcgacgcccggctcatcgcccgctacgtcgccaaagagggcacgcacctgcgcccctacacgctgccgcccgaggccacgcaacgcgtgcagcaactgctgcgtcgtcgcgccaccctggtccggaccgccgtcatcttgcgccagagcctgtccgatctgcccggcttcaagcgcgaggtgcgcgccttgctggcccgggccgaccggctcgcccagcagattcaggcccagatcgtggaaaagctcaaagccagcgactggatcgacgatcaccgccgctgccagggcatcgaaggcgtcggcccactcaccgccgccgccttgtgcgcgaccttccatcggggcgccttcacccgtgcagacgccttcatcgcctatctcggcctcgatgtgtgcgtgcgccaatcgggcaaccagcacgcccgcggcaccctgagcaaaaagggcgaccccgagctacgccgactcctgcacaacgccgccatggcagccagcccatccgacacctggaagcctacctaccaagccttcatcgcccgcggcttctcccgcacccaggcccttgtcgccctggcacgaaagatcgctcgcgttgccttctctctgatgaaaaccggcactcaataccaacccggagggctcaaaaacacttgtgctcagacatagaat

SEQ ID NO: 810 - DNA, 1650 bp, unidentified
  source 1..1650: mol_type = unassigned DNA; note = element_0cc0850
  misc_feature 1: note = core
  misc_feature 2..295: note = LE
  misc_feature 296..1555: note = CDS
  misc_feature 1556..1650: note = RE
taatccgcctttctgcgaaaggcaccgacggggttatgaaacctgcggtctttcgcacattttcaaaatttgttacaatatccacggagagttcggtacactacagaacccgtggaggtgagtggtggggctgtatagcggcaaccccgcatttctatatggcgtcggtcatccgttaaggcatcaacgaatggcgcaaacaagtagcccgtaaacttatctctttcaaatcgactcgattttgccggatggtcagtcaatgccgaacctttccaatctatcttgggaggtatatgtggcatttaagatttttcgcaaaaactgctgtggactggatgttcacaagacttggattcacgcctgtatcggaattactgacacaaatggacgtacagagtataagcaggctcgcttttcctcctttacaaaaggcttgcagaaactggctgactggcttgccaaatacgactgtaacgatgtttgtatggaatccaccggtaagttttggataccggtgtttaatatccttgagaaaacctgctgggtaactttggcctatccaaaatacacgaaaccccaaaagggcaacaaaaccgaccataaggatgccaagtggatttgtgacctgtatatgtgcgatatggtcaacccaagttttatccctccgccggacattcgccagttgcgcgacctgatgcgctatcgttccaagctcactaatataatgaccagtgaaaagaaccgggcattaaattgtctcaccgtttccaatttgaagctggatgatgtgttttctgacgtgtttgggaaatcctcacgttccgttatccgctacattttagagcatcccggtgagacctttcaggttgccccgttcatcgacagacgttgcaagcaccctgttgaggaaattcaggccgttattgatggcactatctcccaccaacaagccgtaaagctcagagaatgtttgcagcacctggatgagctggaagtccacaaaaccaatgtagaaaaggaaattctttgtctggttcggcagtacccctatcagttggaactgcttcagactgtccccggcttttccggaaacattatgaccgccatcgcactgatctcggaaatcggtgccgatatgtcggtgtttccttccgcaaagcatctggtttcatgggcgggctgctgccctcgcaacgaccaaagctccaaaaaggtcaagtccactcgcatttcccgcgccggtgtgtacctgaagcccctgttggtacaggtcgctaacgctgtagtcaagtctgacaagtacccggaatgcaaagaacgctatcgcagaatcaaggctcgccgtggtcacaaaaaagcgattatcgctgtctgccgtatgctcctgaccgctatctggaacatactctccaagctggaaccctattctgccgcaggctacctggaagataagctgacagaacattctgtcgtaatttccaaggcccagaggcttgagctcctccgcaagagaggttatatcttcaaggatgaggttgatcctgcccctgcttgacgctttttcccatacttctatttggccgccttaatgacggcttggtttcttgcgcccttttttgagagggtacttaaattacagtgtttcaaact

SEQ ID NO: 811 - DNA, 1349 bp, unidentified
  source 1..1349: mol_type = unassigned DNA; note = element_0cc571d
  misc_feature 1..2: note = core
  misc_feature 3..66: note = LE
  misc_feature 67..1092: note = CDS
  misc_feature 1093..1349: note = RE
  misc_feature 1113..1337: note = bridgeRNA
tgatgctgtggacggctctccacccctgcgggagcctaagctcctgcgaggcaggaggagagcgtcatggtcaacgttgtcacagtcggtctggatatcgccaagtccgtttttcaggttcacggtgtggatgtcgtcggggaagttgcgatccgtcgccagctccggcgggcgcaagtcttgccgttttttgccaagctgccggcgtgtctgatcggcatcgaagcgtgcgctacggcgcactattgggcccgtgagctcggcgcgctgggccaccaggtgaagctcataccgccaagctatgtgaagccatatgtgaagcggcaaaagaacgatgccgccgacgccgaggcgatctgcgaggccgtgacccgaccgacgatgcgcttcgtggaggcgaagagccctgagcagcaaagtgtgatggtgctgcacaaagtttggctgactttgatgcgccagcgcatccagctgtcgaacacgatgcggcggcacatggctgagttcgggttggtggcgccgatcgggcgcgaggggctgcaacagctgatcaagctggttgaagatagcgatccacgcgtgcccgatgaggcaagagtctgccttgcgtttctgatcgcgcaactacagctggtgaacctacagatcctggagaccgatcgacggatcaggaccagcgcacggtcaaccgaggtcggccgcagactgatgagtatcccaggcgtcgggccgctgttggccagcgccctggttgcgacggtagccaatccgacagccttcagatccggctgtaacctggcagcctggatcgggcttgtgccgaagcagaactccagcggcggcaaggaccgattgggcgggatcaccaagcaaggcgaccgctatctgcggcagctcctggtcgttggcgcctcggccgtggttcgctacgccgagcgaaacgggactcgccggccgtggctcgttcaattactggcgaagcggccgacgaaggtggcaacggtcgctttggccaacaagatcgcccggatcgcctgggccatcatgaccagcggcgagagctaccgcgagccggagccggctgccgcttagatcagacgctgaggcgtcgacgaacttgggaagggcaccgacgaactaacgcatccggccggtcgataccgaaggacaggaaaaccctcttgcgccactgcgcccccaagcgcgcggaattggttgggacccgtcctcgcggaaggcattatggccagcggctttatgtgccgcaccaacaggtcgaacacatggccgcaccgaccaacgctgccgcagtctaacgaaacccttgccaacggagagccgtccacaca

SEQ ID NO: 812 - DNA, 1425 bp, unidentified
  source 1..1425: mol_type = unassigned DNA; note = element_0cc9741
  misc_feature 1: note = core
  misc_feature 2..109: note = LE
  misc_feature 110..1126: note = CDS
  misc_feature 1127..1425: note = RE
  misc_feature 1139..1388: note = bridgeRNA
gaatgaaagggacttccccgtcccgaactagccgcattgcggcgaccggcaacgaagtgccacgatgggaagtgcgaaatctcatcaactcgttcgaaaggggaagtccatggcaattgtcaccctgggaatcgatctcgccaagaacgtgtttgccgtgcatggcgtagatgccacgggaaaggcggtgctgatgcgcccgaacgtgccgcgcggcaggctgctggaggttgttgcgtccctgccgccctgcctggtcggcatggaggcctgctcgggcgcccaccactgggctcgcttgttccaggcgcacggccacacggtgcgcctgatggcgcccaagttcgtggcgccatatcggctgtctggcaagaagggcaagaacgacgctgccgatgccgccgcgatctgcgaagccgtcacacgcccgtcgatgcgcttcgtgccgcccaagagcgagcagcagcagtccgagctgatggtgcaccgagcccggcaaggcttcgtgcagcagcgcacggccacgatcaaccgcatccgggggctgctgtccgagttcggcatcgtgctgccgctgaaagccgccaccgtgcggcgcgaggcgatgcagcagctggaggatctgccaggctgggccaacaccgtgatcggagacctcctgagtgaagtacaccgcctggacgagcgcatcgcgcaatacgaccgccacgtcgagcagatcgccaagcagagcgcggccgcgcgccagttgatgcaactgcccggcgtgggcgccacgaccgccacggcgctggtggcaacgatcggccgcggccaggagttcaggtgtggccgccagctctcggcctggctcggtttggtgccgggccaatacagctcgggcggcaagcagcggctcgggcgcattaccaaggcgggggacccgtacctgcgcatgctcctgatcctgggggcgcgctcggtactgcaaaccgccacggacaagaccgacccggtcagtcgctgggccgtgcagttggcagcgcgggtgggctattggaaggcgatcgtggccatcgccgcgaagaacgctcgaatgtgttgggcggtgctgcaccaaggagagagtttcaggctgccggcgtgagcctgatgccgctgtttcaccgcgtgatgtgcaagcgttgatggtgtgaaggttggacctgcgcgggatgagcctgtttaactccgggaagcctgctggtcttcggctaacgattgaggcctccgcgtgcgtctttcatcagggtccgcagcacattcatctgctgcaccaatgaccgtttgtagtttcgctgtccgcacccttcgcaccaggcctgcactgaacgtctgacgcttcgatgccatgccattcgaacggcagggagaactacttgcttgacagacggggaagcccttgta

SEQ ID NO: 813 - DNA, 1343 bp, unidentified
  source 1..1343: mol_type = unassigned DNA; note = element_0ccc814
  misc_feature 1..2: note = core
  misc_feature 3..71: note = LE
  misc_feature 72..1106: note = CDS
  misc_feature 1107..1343: note = RE
  misc_feature 1099..1333: note = bridgeRNA
ttatggatggcccgcccctactgaaaggctgctgctagactggcagcggttcaacgatgaggagcggagccatggacatcacgatactgggaattgatcttggtaagaatagctgcagcgtcgtcggcttggacgtgaacggcaaggtgacaattcgccgccgcatgcgccgagagaccgtcatcgccttctgttcgaaaattccaacatgcaccgtcgccatggaagcctgttgcggcgcacatcacatggggcgagcgctcgctgcgcaaggccattccgtccgaatgatgtcgccggaatacgtgcggccttatgttaaggcccagaagaatgacgatcgcgacgccgaagccatcgccgaggcggccacacggccgatgatgcggtttgtccaactaaaatccgaagagcaactcgacatgcaaacgttgcatcgcgttcgcgatcaactcgttggcgagcggacgtcgctgatgaaccaaattcggagccttctcctcgaacgcggccatgtgataccgcaagggcgagccaagctggcggctcatcttggtgaacttctggacggccaaagctcgggcctcagcccgcgcattcacacacttatcctcgacatgcgcgaacgctggatggcgcttgacgaacgcatcaagaaatttgacgctgaattccacgaagaagtcgaccgtgacgctctggcccagaggctcctgacgattcctgggattggcccattgaacgcaacggcgttggtcgccgcgatcggcgatgccgggacattcacgcgaggccgcgatctggcggcctggctcgggctcgtgccgaaacaggtgacgaccggcggcaagccaaagctgcttggaataacgaagcgtggaagcaagtatctacgcaaaatgctgatccagggggccagggccgccatgcctgggctgagcaagaccgatacggcgatcggcgcttggctgcgcgggctcctggcgcgatcgcacagcaacgtcgtcgtcgtggcgctggccgccaagatggcgcgcactgtctgggcgctactgcgccacgaaagcatctatgaatcgaagcccgtcgtggctgaacccaattgattgccgtccgcgcggcaatccccgaagtctgcgtgtggtgagaggaagatggcctgacgatcaatcggcaccctgaaaccctagcggaaaaatggcgctcgacgccgtcccctttatgaggatcaggatgcgcgaatctccatcttggccaacagcgaagctgaaaggccggatacgttttggcagattgttcaggtcagatgacgaaaatcacttgcaggcggggcgggccatacg

SEQ ID NO: 814 - DNA, 1522 bp, unidentified
  source 1..1522: mol_type = unassigned DNA; note = element_0cd1dec
  misc_feature 1..3: note = core
  misc_feature 4..240: note = LE
  misc_feature 241..1407: note = CDS
  misc_feature 1408..1522: note = RE
  misc_feature 8..222: note = bridgeRNA
tttcgtattattaggttagccagaaatatctggttggcctttttttaggttcggtataagatggcggtagccgggagaacgagcagctcttagggggaaaaccccgtcacaaaaactgttctcccactgccacccaataaccatgtttgagctggtagagacctagatctcgtatcacaagcgaagctatggcactggagctatcgtgggaatgccggcgaaatttaaaggaatggtgaaatggaacctgttgtaggattagatgtgtctaaaggaacaagcataacgcaagcattcaccgcgcgaaacgaaacggttggaaaatcgagatgtatcacccatacagaggaaggatttgaggagtttggagtatggcttggagatctacgtcagaaaacgggaagagaaccggtggtggtactagaagcaacggggcattatcatcggggactcgtagcgtacatggaacgaagtgggttccgctacatggtaattaacccgctacaatctaaacgggcaaaaggcatacaattgcgaaagggaaaaacagatgccgctgatgcatggcacttagcagagatgtactaccgtggcgatgtaaagcctcatcgtaaaggggacgaacagcttctagagctacagcatctcacaagacagcacgagtttgtaacagcaatgtacgtgcaggctaagctgaatatgcgggcgttgcttgaccaagtgtttcctgcctacgaaggtgtgttttatgatctgtattcccaaacagcaatgcgctttttgcaggaatatttaagtggtgtggtgatcacagaggaaataattcgggaaaccgtacaaaggtcacacggtcaaatctggatccgggagaagctggcacaacttcagagcattgccccaagcaaaggacgaagcccggcacaaacgatagctttgcaaagtatgttaggcttgttgcttgcattccaagagcaactggagcatttggagcagcagattgaggtaacggtcgcggtgatcccagaagtggcccttcttaaaacgatcccaggcgtaggtgataaattggctgccgcactggtcgccgagatcggtgatgctactcagtttgggcatgccaaacacctcgtcgcttacgcaggactcgaccctagtgtatttagttcaggaaagtttacggcttcaagcagtaagatcactaaacggggttctaagcgtttaaggcgtgcgttatatatagcagtgcaatgtggtttgcgcaaaggaaaaaatgagcggatcaaggcctattatgacaagaaaaagaaagagggcaagccatacaaggtggccgggatcgcttgcgccaacaagcttctccatcacgtctatgccatccttacccgaggcgagccctatcgcacataaccaaaaaatcccataaacgtccacgctaatggaggtttatttgtcatttcaataaacattataacaagaattgttttaggtaccaagacagagatgcttgacaaacattagctgg

SEQ ID NO: 815 - DNA, 1577 bp, unidentified
  source 1..1577: mol_type = unassigned DNA; note = element_0cd7188
  misc_feature 1..3: note = core
  misc_feature 4..281: note = LE
  misc_feature 282..1469: note = CDS
  misc_feature 1470..1577: note = RE
tcttgtatgataagtatatagaaatatctgtatatttatcatacatctcctctctttgattttttgttttttatttgtataattttattacataaatactgtggactttttatctttactattgcttagactttttaaaggagagtattgccacaattttacattaaaccctcatagttggacgaatctttgaattcttatgtcacgcaagtttgtgtttgtaaatattatgtggtatctaactcagtatttattatttcattttaaaggatgtgtttcttatgttaattttaggtgtcgatattgccaaacttaatcacgtagcttctttagttgattctaattctaatgaaattattttttctaatttcaagtttcaaaataatttcaatgggttttcttctcttaaattagagttagaaaaattcaatatagatgaagtttttatccttttagaatctactggtcattatggtgagaatttcactgctttctttcataacttaggatttaagttaggtataatcaaccctcttcaaactgcttctcttagaaaagctaaaataagagattctaaaaatgacagattagattcaattacaattgctcaatcttatttgattaataaacctagagtcatcagtcaaaaagatattctctgtaataccttgaaatatcttaatcgctctagaaatgatcgtgttaaagaaagatctaaatacaaaattaaattaaccggatgtattgatattgtatttcctgaattacaatttttctttaatggtatacaccataaaggtgtctatgctttacttaaacattacaataccaaagaagccattgctgcaatacgtattgataaattatctaatacaatctataaagcttctcatggaagattcgatagagacaaagcaactgctttgaaaagtcttgcaaaaacttctgttggtattgatagtaaagctttatctattgaaataactcaaataattcaattaattgagtttctagataaacaaattaatgacttagaagatgaaataaaaactgttctaaaaactttgaatagtaccatccaatctattccaggaatcagccacaatgcatctgctgctattattggtgaaattggtattattgataagtattctcatccttctaaattaattgctcttgctggtattgatcctaaagtaaggcaatctggaaactttaatgcttcaagtactagaatgagtaaacgtggatcaagatatcttagatatgctttaattttcacagcatggaatcttgtacgtcatagtcctaatatcaatgcttactatcaaaagaaaagagctcaaggtaaaagccattacaatgctttagggcatgttgctggtaaattatgtagaataatatttaaacttttaaaaaatgacatggtttataacgaggataaaattaaagttcttcttgattcctaatttttgatactttatgtaaattttagtatcctaattttgttatgcacaaatcattctattatatattaatatttattgttaaattttctattgacttttcatagttgg

SEQ ID NO: 816 - DNA, 1567 bp, unidentified
  source 1..1567: mol_type = unassigned DNA; note = element_0cde5f7
  misc_feature 1..2: note = core
  misc_feature 3..235: note = LE
  misc_feature 236..1429: note = CDS
  misc_feature 1430..1567: note = RE
  misc_feature 15..221: note = bridgeRNA
ctcgtataataagtgcagtcgttgaaggacagggaaaactcaagagcgatcctgtacaataaacgactaacgctgtggaccggttgtgccacgtaccgcacgacggtttgagggaggatccggccacggctttttgcttgaatggtgatgagtcagatactgcgcgacagtttatatctatcgaggttccatatgcaaaaagaccgtgggttacagcgtatcttaattgagaaagatggtttttattatgatctatgtcggcatcgacatcgctaagaataagcacgactgtgttattctcagcgatcacgctacttgccttcgtccttgcttctctttgaaaaacaactctcaaggctttgctctgctaattaatgccatcaaagaggcttgtggcggtgatttcaatcatggagaagtgaaagcagggcttgaagctaccggacactacgctcacaacatagtggcttttctaaactctaacggtattgataccacaatattcaatccttttctggtaaatcaatatcgtaaatcacgttccctgcgcaagacaaaaaccgataaggctgatgccatgctcatcgctgagcttttgatatcgacggccgcaaaccctgcaacttcatcttaccacaatcaggaaatgaaaacactatgcaggtatcgttttagtctcgtaaaacagcgcagcaagctcaaagctgacatgtcacgctatgtcgacctcttattcccagaacttggttctctaggcttaaaccccacttcctcctccgtcatggctatgttaaaagaacttcccggtgcatcatatatttctatttgtaatatctcccagctcacagatatcctctcaagcagctctcgtggaaggtatggaaaagaaacggctgaacaggttaaagcaatggcgaaagaatccatcgccacggccaataaagcgttgtcatacataatgtcggatacaatagagcagatctgcctgctaaacaaacgtattgcaaaaatagacggtgaactgaaaaacgaggttgaaaaatctgggacaaaacttacctctatacctggaataggcttttgtatagcttccgtgatattagcggaaataggggatatcaacctcttctcatctgcagacaaacttcaggcattcgcgggactcgacccatccacattccagtcaggaaacttcacggcaagccacacccacatggtaaaacgcggctctgcatatctgcgatgggcgatcatgcagggtgctcgcttatgttctctcaacaatctaaagtacaaacaatatttggacaaaaaaataaaggaaggcaaacactacaattcggctttaggacacctatctaaaaaactgataagattgatattccatttactgaaagaaaatgaagaatatgatccaaaagtagcttagctgtaaaaaacaagaacgggactagagataaaacattgcctttacagaggcttagtattactttgatagtatctgctgtttacaattatagatactttctcttttttttgtttaagggcttgacttaatatagtcagt

SEQ ID NO: 817 - DNA, 1398 bp, unidentified
  source 1..1398: mol_type = unassigned DNA; note = element_0ce2f77
  misc_feature 1: note = core
  misc_feature 2..87: note = LE
  misc_feature 88..1116: note = CDS
  misc_feature 1117..1398: note = RE
  misc_feature 1160..1393: note = bridgeRNA
taatggaatggtcgcccctacccaaaccggcatcgaagtgccaaagtggcgaatgattattcccacacactgagagaggcgaccgatatgaagattacgacaataggtattgatctagcaaagaacgtactgcaagtacatggtgttaacgaacgagggaagaaggtattcaacaaaccactacgttgcaaacaggtattacctttttttactcaaataccatcgtgcctgattgggttggaagcctgtgccagtgcacatcattgggccaggcagttacaggcgctggggcatacggtgaagctgatggccccgcagtttgttaagccctatgtgaagacgaacaagaacgatgccgctgatgctgaagcgatctgcgaagcagtcgcgcggcccaacatgcgatttgtaccggtaaagaatgtcgatcaacaagcgattctatccatacaccgtgcacgccaaggtttcgttaaggcaagaacagcacagggcaatcagatccgtggcctactcatggaatacgggatcacactgccccaggggctgagtcatattgccaaacgccttccaggcatcctggaggatggagagaatgaattgcccggggtattccgtcaattgttacagcgactggcggatcacttgcagggacttgaccgccaggtgcaggaattggaggtacaaattcaagtgtggcaccagcacaatgaagcgagcaggaaactagcgggcattccgggcattgggccgatcacggcgagtgcattggtggcctcgattggggatgcatcgagtttcaagaacggccgacaactcgctgcctggatagggctggtgccgcgccagcactccagcgggggcaaacaggtgctacagggcatcagcaaacgcggtgatgcttatctgcggacattgttaatccacggaggtcggtcggtaattcgagttgctgccggcaaaaccaatcacaccagtctatggctggccaacttaatcgaacgacgccataagaatgtggctgcggtggcactggcgaacaagaatgcccggattgtatgggcattgttgacgccccagcgagagtaccaatcagattttatgttggcagcgtaaaaccacattcacaacgacatagcactttaactcaggaggactcaccctcaactgattgctcaggcaatcatgcgatgatggcaagacaggtcagaccgtggcaggtcaaacctaatttacacagggagcaacaagctcgagagactgatcaggcgcctgccagcatattccatcaggggcacaaggtttattgccttgagaaaaagcccggatctatggctgcaatcttcacctgctacccatcttcgattgaatgcttgacataccaggggcaaccatcta

SEQ ID NO: 818 - DNA, 1612 bp, unidentified
  source 1..1612: mol_type = unassigned DNA; note = element_0ce3597
  misc_feature 1..2: note = core
  misc_feature 3..277: note = LE
  misc_feature 278..1486: note = CDS
  misc_feature 1487..1612: note = RE
  misc_feature 12..297: note = bridgeRNA
ctattacaataaatttggacaggaaagccgagcagccagtccggctttctttccatctcgtgcctaagctacaataagaggagcaactggctgacgatacctcgcttgggctaacaagtccgaaagaaagactgtcagccatcctcttgttgcagcgttcgatttaagcaggttgagcctaccgggatgccggggagttcgcgtcacgcaatagattgaatcggcaacgagaaaagatggattccggttgcagattctttgtagtggaggaatgtgaatgaactgcgttggcatcgatgtttccaagggtaagagcatgattgcagtcatgcgcccttttggagaggtggtagtctcgccctttgaggtgcttcacaccgacagtgaactgagcaagctggcagggctgctcaaaagcctggacggtgagacccgtgtggtgatagaatccacgggtaattaccacgcgccggtggcctggctgctccacgacgcggggctttatgtctccgtagtcaatgcaatgctggtgcatgactacgggaacaacagtttaagacgggccaagaccgacaagaaggatgccgtgaagctggccaactacggtcttgaccactggctcatactgccgagatatgtcccagaagaggacacccggctcatgctgaagacctgctaccggcagtaccagcagtattccaaagtacagaccatgctgaagaataacctgatctccctgctggacaccgcttttccagacgcaaaccgcctgtttaccagtccaccccgtgccgatggcagcgagaagtgggtggactttgtcgccgccttttggcattacgagtgcgtctgtggcctgtctgagaaggcctttaccgccaagtaccagaagtggtgcaagaagcacggctacaatttcagcaaaggcaaggcgctggatatttatgcctcatcctgtggccacttcggtgtcatgccgaaaacggatacagcaaaacttttggtagaacaggccgtttcccaactccgggcaacttccgccgcgttagctgctctcaagcaggagatgcagtccctggcggcttctttaccggagtatccggtggtgatggagatgtttggtgttggccccaccctcggcccccaactcatggctgaaattggcgatgtacgccgttttcattccaagaaagcgctggttgcctttgcaggcattgacgccccaccctaccaatccggccaaatggatgtccgcagccgcagcatttccaagcgggggtctgcctcgctgcgcaggacgctctttctggtgatgggtgtcatcctgcaacatgctccaatgaatgaaccggtctaccagttcatgaacaagaaacgctctgaaggcaagccataccgtgtctacatgatagcctccgccaacaagttcctgcgcatctactatgcttctgtgaaagcctacttggattccctggaacacgactgattttcttgcgctataccatctggctggccgccgttttaattttgagatgctcagcggcttgattttgtgttgcctttttcgcttccctaaaaatctgaaatttctacttgacttttattagcaggt

SEQ ID NO: 819 - DNA, 1581 bp, unidentified
  source 1..1581: mol_type = unassigned DNA; note = element_0ce63ff
  misc_feature 1: note = core
  misc_feature 2..259: note = LE
  misc_feature 260..1459: note = CDS
  misc_feature 1460..1581: note = RE
  misc_feature 42..228: note = bridgeRNA
cgttacctttttagtagccccataaagagtaagaattggggttgttggcctgtcggtcccggcatgattgaagcccccagtcatcaatgatccggggggtgttgtcaccgggattcgataggcgccaagggatcgctaatggggaccggaccagcacaatgaatgaacgtgtaggtcagccgtaacgtggatgccgagccttgccgccgcaggacatgccaacaccaaattgcacgacacaaattctgggaggtttgcgttgatcaaggaccatgaacaagtcgacatcttcattggtgttgacgttggcaagagcaatcaccacgcagtcgccatcgaccgcaatggcaagaaactcctcgaccgggcactgccccaggacgaggccaaactgcgctccatcatcaaggccgtcgctggcaaaggtaccgtgttgctggtcgtggaccagccctcgaccatcggcgcgctgcccgtcgcggacgcccaggcggagggcatcatggtcggctatctgcccggactggcgatgcgacgcatcgccgacctgcaccccggcgaggccaaaacggacgcccgagacgcggccatcattgccgaagccgcccgcactctgccgcacacgctgcgctccatcgtcctcgccgacgagcaggccgccgaactgtccatgctgtgcggtttcgacgacgacctggccaagcaggccacagcgacgtcgaaccggatccgcgggctgctgacacaggtccacccggccctggaacgggtcgttggcaagcacctggaccaccccgccatggccgagctgctggtcaagtacccgaccccggaaaagctgcacagggccggccagaaccgtgtcgccatgctgctctcccgccacgcaccgcgggccgggaaaagctgggcagcagaggtgttcaccgccctgggcgagcagaccgtcgtggtcgccggcaccaatgccgccggcatcgtcctgccccagctcgcagccatgctcaagcagctgcgcgcggcccgggaggacatcctcgcccagatcgaggccctcgtggaggcccaccctcttcacgaggtcctgacgtccatgccggcggtcggagtcaggaccgaagcccgcctcatcaccgaggttgccggcaaggaattcaagaccgccgggcatctggcctcctacgccggactggccccggtgacgtggcgctccgggacgtcaatccgtggcgaccacccgtccaagaaaggcaacaaggccctcaaacgggcgttcttcctctccgcgttcgcggcgctcaaagacccgctctcacgggcctactacgaccggaaacgcgccgagggcaagcggcacaaccaggccctgatcgccctctcccgcaggcgctgcgacgtgctgttcgccatgctccgcgacggcaccttctacgaggcaccagcagccaagaccgcctaaatcccatcacccacgagctggcaggcacacctcgccagccaataacacctgcccagaaacagagccccaaaaacttgaaagaaaatcggccccaccccttgacgaaaaacatagggacaccc

SEQ ID NO: 820 - DNA, 1353 bp, unidentified
  source 1..1353: mol_type = unassigned DNA; note = element_0cec75b
  misc_feature 1..5: note = core
  misc_feature 6..237: note = LE
  misc_feature 238..1290: note = CDS
  misc_feature 1291..1353: note = RE
  misc_feature 29..221: note = bridgeRNA
cttttatatttacagactattgataaaaggtcagtatattgttgtcaatcaaaatatattggcttgtgtacgaggggttgactgggctaggtaagcattgctataccgtaaaaaaggattgccccgtacactttatttctcatgagtctgaacagtacttaaggcggtttaaccagccaggataaaacaaaagattagacgaaggggatattagtcaattatgctaaatcaaactttatgtctattacaaaacaatccgtggggatcgacatctccaaagacaccttcaccgcttgcggttgctcacatcagtcagatgggaaattaattttttcagaggttaagaactttacaaatgaacctaccggttttaatcaattgttgcgttgggtaaagggcttcgcagcaccaggaaccgaagttgttttcttgatggaagcaaccggagtttattatgaatcattggtgcatcatctctttaagatcaagaagaaagtagttgttgttttgccaaacacttccaaacattattttgccagcctgaatgtaaagagtaagaccgatgaacttgatgcccgcgtgttgagcagatttggcgtggagcgtatccatagatattggattgcaccaagtccggtaatgttgcagttgagaaaccttaccagataccacttacagcttcaagagcaaaaaactgctttgggaaacatcaaacacagcaaagattcagcccatgaggttcagaaatttatcatgcaaagcaacaaaaggcttatcaagcaaattgatgttcagcttgtaagctgcaagactgaaatagagcgattgattaaatcagatgttgagttatctgaaaagattagaaaattactgaccatcaaaggtgttggactgatgaccgtggcaacaattgtggctgaaacattaggctttgaacactttaaaagcgcaaaacaggtggtaagctacgctgggtatgatgtagttcagagggaatccggaacatctataaaaggtaaaacccgaatatctaagaagggtaacaaatatatccgaaatgcactattctttccagcattggtggcgacccggttcaatcctgaccttaaaacaacatatatgcggattatcgctacaaagacttctaaaatgattggacaggttgcaatccagcgcaaactcttggtgcttatctatacgctctggaaaactaattccaattacataccaggttataatgaagtagcctcaaccaaaatggccgaggctacgctagatagctatttataaataaacaacttctttgtctaccaaaaataaatctttaaaattacttgcatattaaaacagtac

SEQ ID NO: 821 - DNA, 1496 bp, unidentified
  source 1..1496: mol_type = unassigned DNA; note = element_0cece2c
  misc_feature 1..2: note = core
  misc_feature 3..249: note = LE
  misc_feature 250..1476: note = CDS
  misc_feature 1477..1496: note = RE
  misc_feature 13..242: note = bridgeRNA
ctaatgagttctgggagtgagccatccggcagactcctgatgggtaggtagccgccggcagatgagcactcggtgcccctggacgttgagtcctgatgaaagatcgtgccgctgccggtcggtggggagagttgatcgctgatgggatgtcgtgcccgcccagttgtggcgtgagcactgcttcattaggtcgctgatggttctcccactggctactgactgtgctcggtgtcggagacgggagatgcgttgctgttcgtaggagatgactgggccgaggaccaccacgacgtcgaggtgatggacgccaccggacgaaggttggccaaggcccgactgcccgaaggcgtcgcgggcatcgcccgactgcacgcgatgatcggtgcgcagctcgccgacgacgccgacgatggcgtcgggcaggtgaagatcgggatcgagaccgatcggggcccgtgggtgcaggcgttgatcgccgccggctacacggtgtacgcggtcaacccgttgcaggcatcccgctatcgggaacgcctcggcgtgtcgggtgccaagagcgacccgggcgacgcgcacatgctggccgacatggtgcgcaccgactcccatcaactgcgccctgttgcgggtgacaccgccgaggccgaggcggtcaaggtcgtgacccggatgcacaagacactgatctgggaacgaacccgggccgggcaacggttgcggcacgcgttgcgggagtacttccccgccgcgttggaggcattcgaagaccttgacgccacggacaccctggaactcctcgcgaaggccccggacccggccagcgcggccaggctcagtaccgcgcagatcagcgcggccctcaaacgcgcccgccgccgcgacatccccgggaagaccacggcgatccaagcggcactgcgcgcgcagcacctcgggcaacccgctgttgtgagcgcggcctacgccgtgtcggtccgggcgctgctcgcggtcctgggtaccctcaacgagcaggtcaaggtcctgcaggggcaggtcgaggcctattttgggcggcacccggacgctgagatcgtgttgtcccagcccggcctgggaccggtcctcggcgcccgggtgctcgccgagttcggcgacgaccacaaccggtacgcctcggcgaaggcccgcaagaactacgccgccaccagcccgatcacccgcgcctccggcaagaagaaggtcgtcgcggcccggttcgtgcacaacgaccggctcatcgacgcgctgatgacccaggcgttcacctcgctgaacaactctccgggggccagggcctactacgaccagcaacgcgcccgcggcgccaactacaacgccgcgctgcgccaactcgccaaccgcctcgtcggcatcctgcacggatgcctcaaaacccgcacaccctacaacgaggcgaccgcctggtcgcatcacctcaccgaggctgctgcttgacattcaagctcctgggatgt

SEQ ID NO: 822 - DNA, 1469 bp, unidentified
  source 1..1469: mol_type = unassigned DNA; note = element_0cf53fe
  misc_feature 1..3: note = core
  misc_feature 4..225: note = LE
  misc_feature 226..1449: note = CDS
  misc_feature 1450..1469: note = RE
  misc_feature 7..222: note = bridgeRNA
tctaatgggacccgacatcgtcttttaggagatgatgtcaccgagccgctggtcggtgagcactacaacaatctgagcgaagagctctagtcggagaacgtgccccgatcggttggtgaggacagcggagaaggctggaggggtgtcgtgctgcaagcactggtccattaggtcgccaccgctgcctcgaggttcattcactaacgacgagctggaggtgaccggatgatttttgttggagtggattgggctgaagcccaccacgacgtgtgcgtcttagacactgagggcgcggtgctcgcgcgattacggatccccgactcgctaatcggggtgagcgagctgcacacgctggtggccgagcacttaggcgacgacgacgacccgcagagtgtgatcgtcggaatcgagaaagatcgcggactcgtcgtgaccgcattgctggcggcgaactaccaagtcttcgccatcaatccgttggccgcttcgcgctatcgcgaacgccatcacgtttcgggcgcgaagtccgatcccggtgacgccaaggtcctggcggacctggtgcgcacggaccgtcacaaccaccgcgctgtggccggtgacagtgcactcagtgacgcgatcaagttgctcgcgcgcacgcaccagaacaccatctggagtcgtcagcgccacgtgaactcgctgcgttcggcgctgaaggacttctaccccggagccctggaagcctttggaactgacctttccggactcgacgcggtggcgattctggccatcgctccgacgccgactctcgctctgcgtttgtcgcgcgcaaagatcacgagtgcgctgcgccgagtcggccgtcagcgtcacctcgaggaacgcaccgagcggatctacgaggttctgcagcgcgatcaacttcatcaaccaacgacgttagagaacgcctacggcgtgacgaccgagaccgcgattgccaacatcgcacagttgaacgcgtcgatcgccaagctcgagacgtcactgtcggagcattttaagcagcacccgagtgccaaggtcatcctctctcttccaggaatggggacggtcctcggcgctcgggtgctgggcgagttcggggatgatccgaaccgttacagcgacgccaagtctcgcaggaactacgccggcacgtcaccgatcaccagggcctcgggcaggtcaagagtcgtactgtcgcgccacgctcgcaacaagcgtctcgcgagtgcactcgatcagtgggccttcagctcgctgctgccgtcaccaggtgcacgccactactacgacgagttgaaagctcgcgacaagcaccaccgaaaggccatccgtcagttggccaataagtgggtcggaatcctgcacggatgcctagagagcgattgtccttacgacgaaaacatcgcgtggtcagcacgcgaagaacgtgccgcttgacaagttacgaccaaggggtg

SEQ ID NO: 823 - DNA, 1428 bp, unidentified
  source 1..1428: mol_type = unassigned DNA; note = element_0cfd883
  misc_feature 1: note = core
  misc_feature 2..136: note = LE
  misc_feature 137..1156: note = CDS
  misc_feature 1157..1428: note = RE
  misc_feature 1195..1427: note = bridgeRNA
gaatgtaatgaacgcatcccaactatttgagtatgaagccggggttggcaggtaaggtgtggagcctcgcagatttccggcatcatagtgcccaatatgggatgcataaagctccctcagactggagactccacaaatgaaatatacaccggttggcgttgatatcgcaaaacatgtcattcaggttcacttcatcgacgagcacacaggtgaagtgattgataagcagttacgtcgtcaggattttctgatgttcttctgtaatcgggaaccctgcctgattggtattgaggcctgtggaggctcgcagcactgggcgcgtgaactgacaaagctgggtcataaagttcggttgttacaggcccgcttcgttaaagcgttcgtcacaggaaacaagaatgatgtaatggatgcccgggctatctggatggctgttcagcagccatgtaaagaaatcgccgttaaaacagaagaacagcaatcatttcttgttctgcaccgtacccgcatgcaactggtgaagttcagaaccgcacaaattaattcactgcacgggatgttactggagtttggtgaaaccattcacaaaggtcgggcagcgatggatcgggaattccctgaagctctggagcgtctgaaagagagattacccccgtatgtcattagtgttctggataatcagttcaacaagctgaacgaactggatttacagatagatgatattgaaaaacagcttaccagcgtggcgagacagaatgagacctgtagacggttgctggatattcccggtgttgggccacttattgcgacggcagcggtggccatcatgggggaagcatcagcgtttaaatcagggcgagagttcgcggcttatgttggcctggtgcccagacagacaggctcaggaggaaaaatccgcctgccgggaataagcaaacgtggtgataaatatctgcgaaccctgtttattcatggcgcaagggcggcagcattactgaccaaagaacctggtccgtggataaccgaactgaaaaagcgtcgtccggccagcgtggcaatcgttgcaatggcaaacaagctggcgcgaacggtgtgggcaatagccgctcacggacgtaaatacaacaaaaatcatgtcagtatcaggccttattaatcgctgataccgataaacataaactctttacaaaagggtgaatgctgaaaggttgcgtgggcagccgtagtgatgacaacgacaggtaagaccgggactcgctaaacctgaatcagttcctgagattaaagctcgctgggagaataaggcgcgagtcagcgtattacataggggcccgcagcttcatggctgcaacaaggccggatatagagctgcaacctaccgtcaatgtcaaaactacgaaagccttgcaaacgggatgcgttcatata

SEQ ID NO: 824 - DNA, 1387 bp, unidentified
  source 1..1387: mol_type = unassigned DNA; note = element_0d05aa7
  misc_feature 1..2: note = core
  misc_feature 3..87: note = LE
  misc_feature 88..1122: note = CDS
  misc_feature 1123..1387: note = RE
  misc_feature 1115..1374: note = bridgeRNA
agatggggtggttgccgccctccccagacggcatcgcaatgtgccaaaaagtggtgttgaggccactgagcggaaaggacggcaaccgtgacgaacgatacgatgatcggtgtggatctggcaaagaatgttttccaggttcacggtgcttcggagactggtgcagtcctgttccgcaaaaagcttagtcgcactcagtttcagcggtttatggcccagcaggagccctgcgtcgtcgcaatggaggcgtgcggtggcgccaattattgggctcgggaactgcaacggttagggcattcggtaaagctcatttcgccacggtacgtgaagccgttcatcaagcgacacaagaacgatgccgtcgacgcagaggcgatagtcgaggccgcgcagaggccggggatgcgtaccgtcgacatcaagaccgagcaacagcaagcccgcgcgatcttattccgcacccgggagcaattcgtccggcagcgcacggaccttgtgaacgctcttcgctctcatatctacgaatttggccatgtcgtacctcagggcgtcagccaggtcggacgcctggaagacatcctgtgcgagccggggacggacctcccggccttggtcagagagatgggccaagtcctactcgcccagataaagcagaagaccgaaatgattcaggccctcgacaaacggatcagcgctacggccagtgacagcgaagaggcgcgccgattacagtcgatcccgggagtcggcccgatcaccgcgctggcaatcgaggcctttgcccctgacctggcaacgttccgtcgaggtcgagactttgctgcttggttggggctggttcccaaacagcattcgacgggcggcaaacagcggctcgggcgcatgtcgaaggctgggcagagcgacatccggcgcctgttgatcatcggcgccatgtcgcgcctgaactggctcggccgaaagtcgatcaaggaaggctcgtggctcgatcggatcaaaggacgcaaaccgcgactgctcgtcgcggtggctctcgccaacaaaatggcgcgaatgatctgggcgattgctaccaagaaagagctctatagggatccggaactgtctctggctgcgggctaatgtagcagcagtgcaaacggcagcacctgatggacggggagtgtaagaagacgacgacctgcatgggcaaatgatcgacaaatctgggtcaggaaaaccagttggagaccacgagcttgaaagctcgccttcgagatttggacctggtcccgcgcacaccataccggccagcggcacgccgcacgaaaaggcctgacagaagcgcgcgctcgatcactcccctcgcagaacagaatcatcttgcactacgggcggcaaccacaga

SEQ ID NO: 825 - DNA, 1425 bp, unidentified
  source 1..1425: mol_type = unassigned DNA; note = element_0d0749a
  misc_feature 1..4: note = core
  misc_feature 5..205: note = LE
  misc_feature 206..1411: note = CDS
  misc_feature 1412..1425: note = RE
  misc_feature 1..189: note = bridgeRNA
ttccctaagaatggttggcggtccgggaggaccgggtgtggctgatgacgggttgccgttgatggctccgaaggaatggccgcccggtcctccgggacgctccgaccactgattgagaactgcggtcatcgctggttagggacctgtcggcggggtgttcttcgggccacgaagtacgagtcacgagggatacggagcgacgggcttgagtacgcggcaggcgcggatatgggtcggcatcgacgccggcaaggggcaccactgggcagtggctctcgacgccgacggcgagacgctgttctcgacgaaagtgatcaacgacgaggcgcagatcctcgctctcatcgagactgcccgtgagcgggccgacgaggtgcggtgggcagtggacatctccggccgggcctccacgctgctgctggccctgctggtcgcccacggccagaacgtggtctacgttcccggccggacggtcaaccgcatgtccggcgcctaccagggcgaaggcaagactgacgccaaggacgcgcgggtcatcgccgaccaggcccgcatgcgtccgaagagcttcgcagtcctggacacgcccccggagctggtctccacgctccgggtcctgacgaatcaccgggctgacctgatcgctgaccgggtccggctgatcaaccgtctccgtgacctgctggtcggcatctgccctgcgctggagcgggcctttgactactccgcggccaaggggccggtcgtcatgctcaccgagtaccagaccccggccgccctgcgaagggtcggcgtcaagcggctgacgacctggctggaacgccgcaaggtccgcagcgccgacaccgtcgcggccaaggccgtcgaggctgcccagtcccagcagatcgccctgcccggcgagaagcgggccgccaagcttgtctgcgacctcgcccaccagctcctggccctggacgagcgaatcaaggacaacgaccgggagatccgcgaaaccttccgcaccgacgaccgagccgagatcatcgaatccatgcccggcatgggccccatcctcggcgccgagttcgtcgccatcgtcagcgacctgtccggctaccgcgacgccggccgccttgcctcgcacgccggcctggccccggtcgcccgggactccggccgccgcaccggcaactaccaccggcccaaacgctacaaccggcgcctgcggcacatcttctacatggccgcgcagaccgcgatgatgcgacccggcccatctcgcgactactacctgcggaagcgatccgaggggttgatccatacccaggcgttgcttgcgctcgcccgacggcgagtcgacgtgctgtgggccatgctgcgtgacaagaggcacttcacctccgccccgccggccacacaagcggcttgacttcatcattgaga

SEQ ID NO: 826 - DNA, 1564 bp, unidentified
  source 1..1564: mol_type = unassigned DNA; note = element_0d074ed
  misc_feature 1..5: note = core
  misc_feature 6..263: note = LE
  misc_feature 264..1475: note = CDS
  misc_feature 1476..1564: note = RE
  misc_feature 14..245: note = bridgeRNA
ctcctactatctacttatcgcgttttgactgttcccatcgaaccattcagaatgcgatgcagttactggctgggcgggtatgtcgtcatgcggcctgaggcgattagtcgacctcgttaaggagacggacagcctgccccattcggggcggttcgcggattagctggatggcggagccacttgttggctaccccgcgtctcttacaggaggttgcgagcccgtttggtgagcaggtgcctgccacgtacgaaagggcaggaccatgatctacgccggaatcgacatcgccaagaacagtcacgtgataggcgcgaccgacgagcgcggcaaggacgcggcaaagccgatgcagttcgccaactccaccgccgggttcgacaggtgcgccgcctacctcgacgggctggccgaatccaagtccgacctgctggtcggcatggaggcgacaggccactactggctgccgctgttctgccgcctgcaggacgagggctacgccgtcgtcgtgatcaacccggtgcgcaccgacgcgatgcgcaggttcaagggcagctcgcgggtgaagaccgacatgatagattgcgtgctcatagccgagacgctacgctgtggcgatttcgagcccagcaaactcggcgaagagtcgatgatcgagctgcgccagctcacgcgcctgcaccaggagctcaaggagagcgtcgccgacctgaagcgccaggtcatcgtcgctctcgaccaggtgttcccggagtacgactcaatcttctcgaacaccttcggcgagagctcgaaggcgttcctcaagaggtgcccgacgcccgaggagtgcctggcggtgcgcgtcgactcgctggccaggaccctcgagagggccagccacggcaagatcgggcgcgagaaggccgacgagatcaagggcatagcccggaactcgtgcggcatcgacgtcgcgacgtccgccttctctttccagatcaagctgctcatcgagcagatcgacttcatcgaggggcaggtgtccgaggtcgaggccaggatccgcgagggcgtcgaggcggtcgagccgctcgtcctgaccatacccggcatcggccacacgctcggcgcccagatcgtctccgagatcggcgacgtgcgccggttccgcaacgcgtcggccatcgtgaagtacgccgggataaacccatcgatcagccagtctgggaagttcacctccgaggagaaccacatcaccaagcaagggtcgccgtacctccggcgagccctctacctggcagcaatgtcccagttgcagctcaagaccccgttctacgactactacgcgaaaaagcgcgcggacggcaagtcgcaccgcgaggccctcatagccgtggcccgcaagctcgtccacgtcatctacgccgtcctctcgaagcaggagccctacgacccggaaatcacgcggaaccccgagctcgcatcgcgttctgaatgattcgatatggaactgtcaaagtgcgaaatcctactaccaaaactttcctgaaaaacttgccctaagtgtcttgactactcatagctggt

SEQ ID NO: 827 - DNA, 1574 bp, unidentified
  source 1..1574: mol_type = unassigned DNA; note = element_0d0933b
  misc_feature 1: note = core
  misc_feature 2..78: note = LE
  misc_feature 79..1143: note = CDS
  misc_feature 1144..1574: note = RE
  misc_feature 1339..1565: note = bridgeRNA
taatgggatggtccggccgtgctcctgccctgccagcggctgacgctggactggggctgcatcacaaggagcacgcccatgcccaagtcagcaagcacccagatcgctgtgatcggcatcgacattggcaagaactcgttccacgtcgtcggccatgacaagcgcggctcgatcgtgctgcgccagaaatggtcgcgcggtcagatcgaggcgcggcttgccaacctgccgccctgtctcatcggcatggaggcatgcgtgggggcgcatcatctcgcccgcaagctcgctgcgctcgggcacgacgcccggttgatgccggcaaagtatgttcggccctatgcgaaggggcagaagaacgacttcaacgatgccgaggcgattgttgaggccgtgcaacgaccgacgatgaagttcgtcgccaccaagacggccgatcaactcgacttgcaggctctgcatcgcgtgcgcgagcggctcgtctcgcagcgcaccggcatcatcaaccagatccgtgccttcatactggaacgcggcatcgcggtgcgccagggcgtccgcttcctgcgcgccgagctgccgatcatcctggcttcgcgtaccgacgtactgtcgccgcgcatgctgcgcgtcatcgaagatctcgccggcgactggcggcgcctcgacgagcgtatcgacaacctctcgcgcgagatcgaaacgattgcccgacaggatgcgggctgcgaccgcctcatgagcgtgccggggatcggccccatcatctcgagcgcggttgtcgccgctatcgggtccggcgacgtgttctcgaagggacgcgacttcgcggcctggctcgggctggtgccgaagcagatctcgacgggcgatcgcacgatcttgggcaagatctcaaagcggggaaatcgctatctgcgtgtgctgttcgtgcaagcggcgtgggtcgttctcgtcaagccgatgagctgggaacgtcacgggctcaagtcgtggatcgaggccgcaaagaaacgcctgcaccacaacgtgctggcgatcgcactcgccaacaagctcgcgcgtatcgcctgggcggtacttgccaggggacgaggattcgaagtgacgaggacaatcgatggttcgacccaacctgcatgatcctggcgccgtgctcggcaaccctcaaggccaagccctgcgggcggccctggcgggccggccttgaccgcgcctgcgcgcgtcgcatgtcgaggatcaggccgggacgaaggaacggccatcagcgcgaaccaaggaactgacgagatgaggatcgatccgccgatgacgtagcagcgatgcactcaacgccttccccgccgaggtctgcgagaagtaacgacgagatggagacccggtcttccgggcgcgatcgaacactggtgacccaaatggcccaatcaaggtctgtccgctaatcagatcgaccgcgcgctgatatccatggtggcccggagcaatgaaccgctccaatcagaggccggatacattgatgcaagaccgaaaaccagatcgacgaaacttcttgcgacgcacggccggaccataca

SEQ ID NO: 828 - DNA, 1461 bp, unidentified
  source 1..1461: mol_type = unassigned DNA; note = element_0d0ae09
  misc_feature 1..5: note = core
  misc_feature 6..243: note = LE
  misc_feature 244..1446: note = CDS
  misc_feature 1447..1461: note = RE
  misc_feature 23..232: note = bridgeRNA
tccttaagttcgtaggtgcagttacttcgtaagagttacgttgagctgtaacccgggtgggtcgggtgaggctgttagtggtttgccagctctcgggtgtggcttgaaaggactggccgcccgacccgcctggacgcctcggaccgctgattgagatctgcgatgtgatcgctcgtttaaggaagtgccggcggggtcgtccatcggggccatgctggagcacaagcgaaaacgagggatccgatgaccggttcgcacctgtgggcgggagtcgacgtcggcaaggaacaccactggatatgcgtgctcgacacctccggaacggtggtgctgtcgcggcgatgcgacaacgacgaagcaacgattcgtgcggtgatcaccgaggtcgacgcactcggcgagacggtgtcgtggacggtggatctgaccaccgtctacgtcaccttgttgctgactgtgctggccgacaccgggaaaccggtgcgctacctgtccgggcgttcggtgtggcaggcatcgtcggtctaccgcggcggcgaggccaagaccgacgctcgcgacgcccgggtgatcgccgatcagtcccggatgcgctcggacctgcccgttctgcatcccgacgacgagctgatccgcgagctgcagatgctcaccggccaccgcaccgatctggtcgccgaccgcacccgcgccatcaaccggctgcgccagcagctcgtcgccgtgtgtcccgggctcgaacgcgtcgcgcagatctcctcggaccggggctgggtggtgctgctggcccgctaccagcgtccccaggcgatccgccgtgccggcgtggcccggttgaccacgatgctcgtcgccgccggggtgcgcaacgcggagtcgatcgcccacgccgcggtcaccgccgcgaaggcccagacggtgcgtctgcccggtgaggacgttgccgccgacctggtcgccgagttggcgcagggggtgaccgacctcgacgcccgcatcgcagccgtcgacgcggcgatcgaggcccgatttcgccgacaccctctggccgaggtgatcaccagcctgccggggatcggattccggctcggggccgaattccttgccgcggttggtgatccaacgttgatcggctccgccgaccaactcgccgcctgggcgggcctggcaccgcgacccaaggactccggtaaacgcaccggacgcctgcacacgccgcagcgctacagccgacgcctgcgccgggtgatgtacatgtcggcgctcactgcggcccgttgtgaccctgtttcgcgtgcctactacacgcgcaaacgggccgaaggtaagcgcccgatccaggcaacgatctgcttggcgcggcgtcgcgtcgatgtcctctacgccctcatccgcgacaaccgcacctggcaaccggacgcgccggtcgccacggttgcggcttgacgggatcattgagag

SEQ ID NO: 829 - DNA, 1346 bp, unidentified
  source 1..1346: mol_type = unassigned DNA; note = element_0d10b35
  misc_feature 1..2: note = core
  misc_feature 3..273: note = LE
  misc_feature 274..1332: note = CDS
  misc_feature 1333..1346: note = RE
  misc_feature 14..269: note = bridgeRNA
tctgtgagtgtcgttcccggcggtcctgggtggattgccgtcaggatcggtgctggcgggctgggtgactcgctgtggatctggccgccgtaggcgtgccttgcgttagacctgtccctggttcgccggctccggcctggcccaccgtgttgacctgattagaagcctgtccgccgatggcgtgacccgtcacagatatgccacccggtgactccacccaggccggtgccgacttcggccccatcctggaaggagaaacgaggccgcatgaccatgctggcagaggcagtagacgcaatcatcgggatcgacacccaccgcgacagccatgaagtcgagatcgctgatgtaaccggcaagccgctcgcgacgatgcggatcagcaacgatagcggcgggttcgcccagctgctgggagctattgctgagctggcgcccgggccgcgggtggcggtgctgatcgagggcagccgcagttatgggatcggtctggcgcgggcgctgaccgccgccgggctgctggtcatcgagtgcgggcaacccgcacgccgccagcgccgcgggaaaggcaagtccgatgccatcgacgcccatctggcggtgctggccgggctgcgcatggacgccagccgggttccggcgctgcgcgccgacggtgaccgggaagcattgcgcatcctgctcggcgcccgccaggagatcgccgtggccagcaccgcgcaggccagccggctacgcgccttgctgctcgccggcgatgacgccgaccggcaggccgcccgcgccgcgctgaccactgccgctcttcaggtcctggcgcagcgagcggtctgtgccgccggccgtgaccacgcggtccggcaagccgagatacgccggctcgcgctcgctgtcggccaggcacgccgcgacctcaaagaaaacctcgcccagctgctggccatcgtcgaggacatcgcccctggctccaccaagcggtatggcatcggaccggtcagcgccgcccaggccatcgtgagtttctctcaccccggccggtgccgcagcgaagccgcgttcgccgcgctcagcggcaccagcccgatccccgccagcagcggccgcaccatccgccaccggctcaaccgcggcggcgaccgggccctcaaccgcgccatccacgtcatcgcggtcacccggatccgcagctgccccaggacccgcgcctacgtcgcccggcggaccgccgagggaaagaccgggccagaaatccgccggtgcctcaagcgatacatcgcccgcgagctctaccgccacctcacgcactcgatgacaccgcccacagccccttgacaaacatagaagcg

SEQ ID NO: 830 - DNA, 1439 bp, unidentified
  source 1..1439: mol_type = unassigned DNA; note = element_0d1c42e
  misc_feature 1..2: note = core
  misc_feature 3..226: note = LE
  misc_feature 227..1423: note = CDS
  misc_feature 1424..1439: note = RE
  misc_feature 10..222: note = bridgeRNA
gctctacgttctgccgcggggcagtcctcccattcgtaaggtgagggcacccaggggtgtcgggtgtggttctgaaacggctgccgttcgtggctccaccagcttggccgcccgacaccccacgacgactcggccgccgattgggaagtgcgaacaggtcgctgcgtagagccatgccggcgaggtcgtctgtggcacgcactgcaagcacgaccttgggagcacgatgagccggatttgggcaggaatcgacagcggcaagacccaccatcacggtctggtgatcgacaccgacgggaagaagttactgtcccgccgggtactcaacgacgagtccgagctgttggaactgctggcggacgtcctcgcactcgccgacggggacccggtgacgtgggcagttgacatgacaggcggcgaaccagccctgctgatcgcgctgttgttcaaccacggccaggagatcctctacatccccggaaagacggtcaaccgggccagcgacggttatcggagcgagggcaagaccgatgcccgggacgcgtacgtcatcgccgaccaggcgcgcatccgccgggacctcacccccgtgcgacctggcgatgaaaccgcagtcgaactgggactgctcaccggccgccgaacggacctggtccgcgaccggactcgcgcggtcaaccgcctacgctccacgctcaccggcatgttcccaagcctggaacccgccctggaagtgaccaacaccggtccgctggtactgctgaccggctaccagactccggcggccctgcgccgtcttggccgagcccagctcacgcgttggctgcaggcacgcggcgtccgtggtgccgaggcgctggccgaggccgcggtgtccgcagctgagcggcagcacacggccgttcccggggaatcggctatcgccggcatggtcaagacgctggccttggaggtgatcgccttcaacgagaaggtcgcggagatcgatacacgcgtggcgacccggtttcgccgccatgcgctcgccgaaatcatcctgagcatgcccggaatcgggcctctgctcggagccgagttcctggccgccaccggcggtgacctgtcaggtttcgccagtccggaccggcttgccgccttttccggccttgcccccgccccgcacgactccgggaaggtcagcggcaacctgcgtcggccccgctcctaccatcggcggctccagcgcgtcttctatcagtccgccatgaccagcgtcagttgcgaccccaactcccgtgctttctacgcaagaaagcggaaagagggaaagagccacgttcaggccgtccttgctctcgcccgtcgacgagtcaacgttttgtgggcccttatccgtgaccgtcgatgctacgaagtcctaccgccagtggccgcagcagcttgacaaacaccattgggaa

SEQ ID NO: 831 - DNA, 1155 bp, unidentified
  source 1..1155: mol_type = unassigned DNA; note = element_0d206cd
  misc_feature 1..2: note = core
  misc_feature 3..207: note = LE
  misc_feature 208..1143: note = CDS
  misc_feature 1144..1155: note = RE
  misc_feature 12..209: note = bridgeRNA
cttgtcttatgtttatcccggctctcatgtgatggtggagccactgcccggcacgtcatttatgacgggcagtggcgggggccggaccgttcccctcttggtcatagtggaccgcgcatgagtatggtcgcccccgttttttctatcgacctgaacggatacatgggctttgggcccgcatgacaagacgaggtaaggaaaagacagatgaacgacaccatcggggtagatatttcgaaagacgcgttggacacatattggctttcaaaacgtaagcacaaacaattttccaacaacaaaacgggcctgagggcgctcatctgctgggtgcgccaggcgaaggtgtccttggtcgtattcgaggcgactggcgtctatcaccggctgctggaaaccagtcttgcagcgcatgatcttcctttcgcgcgggtcaatcctcgccaggcgcgccgcttcgccgaaggaaccggcacacttgccaaaacggacagagttgatgctgcaatgctggctaggatgggatctctcctggaattgaaagccgacaaacccaagaccgaaacccttcataatctcaaagggatggaaactgcccggcaggctctgatcaaggatcggaccgccgcaagggcgcggttgagtactgcaacatacccgctgctcaggaaacaggctactctgcgcttgcgccagatagaacgcgacatcacacagatcgatgcagccattgaggcgataatcgccgctgacaaagcgctctcccaaaaggccgacattctcatcagcatccccggcattgcaaagataaccgcgtatgcaatgctgactgaaatgccggagcttggcacattgagcggaaagcaggctgcgagtttagcaggcctggcaccgatttcccgtcaatcagggaaatggcaaggcaaagagcgcatccagggcgggcgcgcctgtctgcgaagggcaatctatttgccagcggtggtcgccacgcgattcaatccggatatgaaagcaaaatatcatgaactgattgccaccggaaaatgtaagaaactcgctatcacagcggtcatgcgcaagctcgtggtcatggcgaatgctttgttgcgcgacggtcggaaatggactgaaacacggacttgaccaatacggata

SEQ ID NO: 832 - DNA, 1655 bp, unidentified
  source 1..1655: mol_type = unassigned DNA; note = element_0d21f6f
  misc_feature 1..2: note = core
  misc_feature 3..259: note = LE
  misc_feature 260..1462: note = CDS
  misc_feature 1463..1655: note = RE
ctcactggtgcaccttcggtctgtcgggtgctgtctcgcagattgggatatcatctggcagcccgatcgcctgccgtgacggccaagcaagctcgccgcttgacggcccgcatcagaccagccgcacggcaggtgccgggagaccaggacggaccacagggtgaagcgccagtgcttgccggccagagcgcctgtcagtgagcgatccgcacgatctcccagcccgggcgaggcaaccgcaacccgaggaggtcagcacatgctatatcacggaggtttggactggggtggagccgcccatgccgtctgcgtcgtcgatgcaacaggtcggatcgtcgcccgcatcgaggcccgccacgacgcggccggcctgaccgacatgctcgcccggctcaagcgcgtggcgccgccggccgagctgccggtcgccatcgagcgtccgtccggcctgatcgtcgatgccctggtcgaggccgggcatccggtgatcccaatccaccccaacgtggtcaaggcctgccgccctcgctaccgtgccgccggcggcaagtccgacccgggtgacgcctacatgctcgccgacatcctgcgcaccgacggccatcgcttccgcccgctcgtgccgttgtcggacgacatccgcgccctgcgcgcccttgtccgcggccgcgacgacctggtcagccaacgcgtgacgctggccaaccagcttcgcagcctgctcgaaggcttctggcccggcgcggccgtcatcttcgccgccatcgacagcccgatcgcgctcgcctttgtcagccgctacccgacgccggacagcgccagccgcctgggcgagaagcgcatggccagcttcatggcccagcacgcctactgcggccgccgctccgccgccgaactgctggcccggctgcgcgacgcccccgcgggcctggccagcgacgccgaggcaaaagccaagggcgaggtcgtctgtgccctggccagcctgctcgggcgcctggtgggcgagatcgccaagctgtcgtcgcaggtcgagcacgccgtggccgagctgccggacggcaagatcgtcatgtcgttcccgcgcgccgggcgcatcaatgccgcccaaatcctcgccgagctcggcgacgtgcgcgagcgcttccccaccgaggatcagttcgccgccgaggctggtgtggctccggtcacgcacgcctcgggcaagagccgcggcgtggtgttcagatgggcgtgcaacaagaacctgcgccaggccatcacgtgctttgcggacaactcgcgccatgcctccaactgggccgccgacatctacgcccgcgccaggcaaagggggtgcaagcacgctcacgccgtccgcatcctggcgcgggcctgggtgcgcgtgctttggcgcgcctggcaggacggcaccggttacgatcccgccaagcacaaggccgcggcccgtatcgcatgatccaaacactgttccttggttcggctggaaaggtcgttccttcgtcccggccatatgaccccacgccggggcggcgcggccggggtcaaggatcgccaaaggcgaccggcggcttcgccggcgcaaagcgtccttgaggccgggcgcggcgacacggcaagcttcaaacgccaaggacgttgacacagggtgt

SEQ ID NO: 833 - DNA, 1306 bp, unidentified
  source 1..1306: mol_type = unassigned DNA; note = element_0d255f0
  misc_feature 1..3: note = core
  misc_feature 4..245: note = LE
  misc_feature 246..1244: note = CDS
  misc_feature 1245..1306: note = RE
  misc_feature 26..231: note = bridgeRNA
tactctaagtttgcgtaaagcaagaagctgaggttaatctatatctttgttgtatgaagaaaatagattaaccgactaacggaagtacactaatagaaaatgatagtctttcaagactagttattgtaacagacttccgttagtcaagcaggcaaagactaaatagattattgatatatatgaggatatcatttagagtagtagcccattcctgctttcggttaatccaaaaacaatataaaggtatgaataaattatttatcgggattgatttctccaagaaaaaagtggatgtaagtgtgatagagaaagaaaacatgtcttcaggagtccatcgtgagttcagtaatgatgttgccggacatgagagtctgttggcatggctttgtgaaagctatccgcagacaggcaaggatcagatgctcttttgcggtgagaacacgggactttacagcgtttgtttgagtaacactctcgcgcacgaaggttatacactgtggctggaacatccttacagtatcaagcacagcagtggcatgcaacgcgggaaaaatgataaatcggattcattgctgatcgcacaatacgcttgccgtttcgaggatatggccaaggtctatgcccccaatacggaaaccatacgggcgttgcactcattttttacattccgtgatttattggtgaaaatgaaaaatgaagcattggtacatgccaaagaactccattcggtcctgaaagggaatcgcgcaacggattacatatatcaacatagcctgacacaagtgaaaaacttgacccgtgaaataaaagatgtggaaaaggaaataatggatctgatcaacagtgaagaggagatcaaaaacaattatgagcgtattacatccatcaaaggcgtggcttttgtcaacgcccttgctttgatcgtttataccgaaaacttcacctgttttgacgatccacgcaagctggcctgctatgcgggagtggtcccgttccaacgaacctccggatccagtgtcaaaggtaacgcaaagaccagtggatttgccaataaaaaactaaacacgctactcacccaagcggcacgaacggctgccatacatgatccaatattaagagagtattacaggcgcaaaagggaagaggggaagcatcataatttggttataaacaatattagaaacaaactgatacatcgaatctgcgcattagtcaggaaccaaactttcgaccaagcggcttagatttttgcaatattcttaatttgttttaaaatctttccgtttatttggttgggaacatagat

SEQ ID NO: 834 - DNA, 1557 bp, unidentified
  source 1..1557: mol_type = unassigned DNA; note = element_0d28d7d
  misc_feature 1..2: note = core
  misc_feature 3..268: note = LE
  misc_feature 269..1432: note = CDS
  misc_feature 1433..1557: note = RE
  misc_feature 3..243: note = bridgeRNA
cttgtatgataattccagaagcaaattaccacttttcctttctttttgatctgtggcttaatacattcagatactgtgggacttttgatttttttcctgtagctttgactactttataggagtgtattgccgctacctttatctgaattgtttatagctggatgtgccggagatctttctcctgagtacttatatcaatcaagtctacgatgatatccgttggtggttgccgcagtatcggaacactttgaaagggaggtataacctcatgtactacgttggcatcgacatcgccaaacggggccacttcgcctctgtcatatcttcagatggcgaggtactcattaagccgttcaagttcacgaatgacaatgatggcttctgtaagctgctttctgcactcgctccatacgaatgcggcagcctcatcattggtcttgaatcaacggcacactatggtgacaacctggtcgaattcctcgtctccagacgctaccaggtctgcgtcatcaaccccattcagacttctacgatgcgtaagaacaacatccgtaaaacaaagactgataaggttgataccttcattattgccaaaacactcatgactcagcctcacaggttttatactctggaggacatcgacatgatgcacttaaagaaccttggccgtttccggcagaagcttgttaaggaccgcacacgcattaagatccagttgactgcatatgtggaccgggtattccctgagcttcagtatttcttcaaggccgggcttcatcagaagggcgtttatgccctccttgcagaggcacctacgccggagcttatctcttccatgcatctgacccatcttacgcatctgcttgaagttgcctcccatggtcacttcactaaagagcaggctaaggaattaagagttcttgcacagaagtctgtcggttccagcgacaaagctttatctattcagataacacagtccgttgagcagatcgtgttattggatagccatgtgaaacaggtggaatctgaaatgactgagataatgctcggtctcgattccgtaatcatgaccattcccggtatcggctacattaatggcgggatgatccttggtgagatcggtgatattcaccggtttgctgcccctaagcagctgcttgcatttgctggtcttgaccccacggtttatcagtcggggaatttcaatgccagccataccagaatgtccaagcgcggttctactgcacttcggtatgcactgataaatgcagcacacaatgttgtaaagaacaatgcaacctttaaatcttattatgatacaaagactgctgaaggccggacgcactacaatgcccttgggcactgcgccggcaagcttgtcatggtcatccacaagatgctctctgacgatgtggcatttaacctcgggtaagttctgacccggtttacatcgtatttttgaagcaccctcacgggagccttattaaggttaccctttgaagccacagaaaagattttaattttgcctcaatttatacttgatttttcatagctggt

SEQ ID NO: 835 - DNA, 1524 bp, unidentified
  source 1..1524: mol_type = unassigned DNA; note = element_0d2b80d
  misc_feature 1: note = core
  misc_feature 2..230: note = LE
  misc_feature 231..1460: note = CDS
  misc_feature 1461..1524: note = RE
  misc_feature 14..245: note = bridgeRNA
ctacttgttgacttgccctaggaccgatgcctggcgaggctcggtctaggcacccggttcgtcgctctcaattcggctgcccacgctggtcgtgtggctctcttttggcctgcgcgggccgggtgctgccgtggagcggggagaggctcaagaggggtttgttctgctcgaagtagcggtgccctcccccttgcccggcaaccacagcagggtcgagcaggaggactgagatgagccaggtagtcatcgggatggacccgcacaagcgcactgccacgatcgaggtcatggccggcgatgaggccgtcgctggccagggccggtatgccaccgacgccgccgggtatgcggcgatgctggcggaggccaggcactggccgcagcggatgtgggcgattgagggatgccagggcatcggcaggcacatcgcgaacaggcttctggccgatggtgagcatgtggtggatgtgccacccaagctgtcggcccgcacgcggctgttcgcgacagggcagggccgcaagaccgatgccaccgacgcgcactcggtcgcgctggccgcgacccgcatgcaagggctgcgcccggccgtcgatgaccagcagctcgcggtgctgcggatcctggctgaccggcggcggtccctgggcgaggaccacacccgcatgatctgccagctgcaccggctgctgctggaactcatccccggcggtgcgaagaaggccctgtcggcggcccaggccaaggccctgctggccagggtccgtcccagggacgcggcgggcagggcgcgccgcatggtcgcagccgagctgatcagcgacctcgaacgcatccaccagcgcaagaaggccgccaacaaggaactcaatgcgctgctcaaagccagcagcaccaccacgctgaccacgctgcacgggatcgggccctctggcgccgcccggctgctagtcgaggtcgctgacgtgaccagattcccggacaaggcccacttcgcgtcctggaacggcaccgcgccgatcgacgcctcctccggcgaccaggtccgccaccggctgtctagggccggcaaccggcagatcaaccgggtgctgcacatcatggccgtggtccagctccgcaacccgaccgaaggccgcgcctactacgaccgcaaagtcgccgccgggaagacgccgatggaggcgatgcgtgccctgaaacggcggctctccgacatcgtctaccaccagatgatcaccgatgcccgggcagcagtaacgggcccgggaggacacgtggggacggctactggctccagcgcggccggtttgcaccccgctgccggcacttcggagaagtcacttcccggacccgccaccagcgaccctacccctcccaggccggcccgtttttcaggtcgttccgccgccccggccccacgccggaccgcagccgctgtcaagcgccccttagcttgatagcggctgcggtccggcgcacactcgcaagggcggaaacgaccctcttgacacagaggggagc

SEQ ID NO: 836 - DNA, 1439 bp, unidentified
  source 1..1439: mol_type = unassigned DNA; note = element_0d39aec
  misc_feature 1..2: note = core
  misc_feature 3..137: note = LE
  misc_feature 138..1160: note = CDS
  misc_feature 1161..1439: note = RE
  misc_feature 1200..1439: note = bridgeRNA
gaattaaatgaacgcgtcccaccccgtgaccgggtgagcaaaagaagcggatgaggaagatggatcctcgtgggctgccggcatcgatgtacccaaagtggaaaatacggagttttccaaggtaaccggaggatccagtggtcaattgtccggcagtgggcgtggatattgcgaagtcgatttttcaggtgcattacgttgatcaggaaaccggggagatcgtgaataagccgatcaggcgcgggaagtttcttgagttctttgcgaaccgggcagcttgcttgattggtatggaagcgtgtggtggtgcgcaccactgggctcggcaactgacgaagatgggtcaccaggtcaggctgatgcctgccgagttcgtgaaggcgttcaacatccgtaacaagaatgatgcggcggacgctcgggcgatctggttggccgtacagcagccgagtaaggcggtcgcagtgaagacggagatgcagcaggcgatgctggccttgcaccggatgcgccagcaactcattaagtttcgcactatgcagattaatggattgcgcgggctgctcacggaatacggtgaggtgatgagcaagagtcgggcgaagctggacaaggaaattccggaagtgcttgagcgtatcgcggagcgtttgccagcagttttcgtccacacattgcgcgaacagtggaatggattggcgaagcttgacgagcaggtagcgcagatcgagcaacgcatgcgcgagtggaagaaagaagacaaggcggtgaaagcgattagcgagattccgggtgtcgggctgctaacggcgacggcggcggttgcaatgatgggcgatgcgaaggtcttcagatccggacgtgaattcgcagcctgggctggtcttgtacccaagcagacaggctccggtggcaaagtgaacctgcacgggatatcgaagcgtggcgacacgtatctgcgtacgctgctgattcacggtgctcgatcggtactggcgcatgcgaaggaacccggcgagtggattgagcagatgcagaagcgtcgaccaacgaatgtcgtggttgttgcattggcgaacaagatggcgcgaatgatctgggcggtactcgcccatggtcgtccgtaccgaaaggactacgtgagcgtgaaaccggcgtaagcgacggcacggcacatcaagatcaatgtttggcacagggtgaacgtcgaaaggttgcgcagcaatcgagtgtgatgacaagccaggtaggaccgggatctactaaacctgaattgctccaagagctgcgagctcgccgaaggaatgaggtgtagatcagcggatttcatagggggccgcagcggcagtgcgagctgcaagcaagtccggatatagagatgcagccatcctgtctgtcagaacacacgaaaactgttgcaaacgggacgcgttcatata

SEQ ID NO: 837 - DNA, 1622 bp, unidentified
  source 1..1622: mol_type = unassigned DNA; note = element_0d43c03
  misc_feature 1: note = core
  misc_feature 2..274: note = LE
  misc_feature 275..1513: note = CDS
  misc_feature 1514..1622: note = RE
  misc_feature 12..294: note = bridgeRNA
cctgttactatatatttgggtgaggacatggccgccagccatgtctttatccatcttgttgcctaagctgttagaatgagaggacaagcggcctgacaaatccctccaaggactgtgcgtccgtatgaaagtcagtcagccatcctcttgttcgcagcgttcgatttgtgcaggtagagccgccactgggtgcgttcgcgtcatcaaacagatagaatcggcagtgagaaaagggtggtttgccaattgcatatctgtaataggagcgtgggttatgaacgcagtgggaattgatgtttctaaaggaaaaagcatggtgtcggttatccgtgccttcggagaattggtggcgaagccctatgaggtgcgtcacacttccagtgaactcagtgagctggcaagcacactgaaaagtctagagggtgaaacacgagtggtgatggagcacacaggacggtattatgagccagttgcccaactgctccacgatgccggagtttttgtcagcgcggtcaatccgctgctcatcaaggaatacgggaacaactctctgcgtaaggtcaaaaccgacaaggcggattccctcaaaattgcccggtacggtcttgacaactgggccgaattgcgccaacatactcctatggatacaattcgttaccaactgaaaacgatgaaccggcaatacggcctgtacaccaagaacaagacggcgataaagaacaatctcatcgctctgcttgaccagacctatcccggtgtaaacgccctctttgacagtcccacccgtgcggatgggagccaaaagtgggtggattttgccgcgtccttctggcatgtggactgcgtgcgagggatgagcctaagtgcttttaccgagcgctatcgcaaatggtgtaagcggcatggctacaatttcagcgccgcaaaagctgctcagattcacacagaggcgaaagagatgattgctatgctgccgaaggatgcgctgtccaaggtgatggtacaggaggcaattacacagcttaataccgtttcgaaaacggttgaggtgttccgcgcagagatgaaccggcttgccaaggagcttcccgaatacgatgtagtcatgggattatacggcaccggaaaatcgcttggtcctcaacttatggccgagattggcgatgtgcggcgttttgcgcacaagggatccttgacggcgtttgctggggttgacccgggggccaaccagtccggaacctatgaagcgaaaagcacgcgttcctccaaacggggttctccagagctgcgaaagacgctctttgtactcatgacggtgcttctgcaaaacgcgccgccggacgaccctgtgtttcagtttctggacaaaaaacgagccgagggcaagccgtattacgtctacatgaccgctggctgcaacaagtttctgcgtgtttactacggtagagtgaaggagtatatgaacaccctcaatgaatctgtggatatggattcaaccggtctttccagataacttatcaccttacttacgttaggtcggcgcttcggcggcggcctcgttgtattgctcatttgtcctttgcttgtttttctcattttgctattgactttttatttgcagg

SEQ ID NO: 838 - DNA, 1384 bp, unidentified
  source 1..1384: mol_type = unassigned DNA; note = element_0d47596
  misc_feature 1: note = core
  misc_feature 2..129: note = LE
  misc_feature 130..1110: note = CDS
  misc_feature 1111..1384: note = RE
  misc_feature 1154..1375: note = bridgeRNA
taatgagatggtccgccgcttgatttctcagcttcatagagggattgtggtggcagcttgtacaaggaggatcctcgttagcagatacattcggttggcatagatctcggcaagacaacgttccatctcgtggcgctgggtgcggctggcaaggtgcttgtgcggaagaagttcacacagaagcagctcctgatcttcaccgcgaacatgcagacgtctttgattgggatggaagcctgctcgggggctcactttctgggccgggcactgcggagtcaaggccacgatgtgcggctgatcgcggcgaagttcgtgaagccttttgtgaagtcgaacaagaacgacttcatcgatgccgaagcgatcgccgaagctgtcgagcgcaagaacatgcgcttcgtaccgatcaaaaccgacgatcagttggacctgcaggcgattcatagggtgcgcgatcgcctgatgtctcgacggactgccgtaatcaaccagttgcgagcgttcctgcttgaacgggggcttgtgttcgcgaagactccttcgaagctccgtgacgcgatgccggaggtccttgaaaacgccggtgccagtctgacgccgcagatgcttcacctcatcgagatattgtggggcgagtggaagatggtcgagcaacagatcgaacaactcggcgatgagttggaacggatctccgcggcggacgccggatgcacgcgcatccgcaagatccccggcatcgggccagtggtagcaacggccattgtggcggccatcggcaacggtgccgcctttcgcaagggccgcgactttgccgcctggcttggcctcgtcccaggccagtactcgaccggcggcaaggcgaagctgctgagtatcagcaagcgagggaacgtctacctccgcaagatcctcatccatggtgcgagagcggccgtactgcggatcaagcgcgatcgagcgccgatcggagcctggttagacgcgcttgacctcagagcacacaagaacgttgtcgtggttgctatggccaacaagctggcacgcatcgcttgggccgtcctatcaagcggagaagagtacaggcccttaccgaacaaactgccagcgtgagctgacacttccttcgcatcacgaacttgagcggcttaactttacccaccgaagtctgcacagagaacagcaaggacgaaagaacagtcacaacggcgtatcttcaacctgatcccgcaaatggtcgatcgcgaccgaccgactttgaaggatagatacgcgcgcaactcatcctggtcaggagaatccttctccacgaagaccgaatacatttgcgcagacttgtcttctcgaccccaaacttttcccttgcagtcctgcaacggaccataca

SEQ ID NO: 839 - DNA, 1424 bp, unidentified
  source 1..1424: mol_type = unassigned DNA; note = element_0d5340c
  misc_feature 1..4: note = core
  misc_feature 5..207: note = LE
  misc_feature 208..1410: note = CDS
  misc_feature 1411..1424: note = RE
  misc_feature 1..193: note = bridgeRNA
ctccgtaagttgttgtgcggcccgggagggccgggtgtggctcaagagtttctgccttcagtggctcgccaggagtggccgcccggctcttcggggcgccctggctgctgattgagatgtgcgcgctgtgtgcggtcgctgattacggagatgacagcggggtgttcctcgggccgacggcatgctgttggaactgaggaggggcgagtgagcgagcgacgggcccaggtctgggccggcatcgatgtgggcaaggtccaccactgggcggccgtggttgacgagaccggcgcgaccctgtggtcgaagaagatcgagaacgatgagtcggcgatcctgaccgcgctcggcgagatccttgagctggctgacgaggttcagtgggcggtggacatctccggcacgtcgtccgcgctgatgctggctctgctcgaagctcacggtcagcaggccgtctatgtgcccggccgcacggtaaaccgcatgtcgggggcctaccggggcgaggcgaagaccgacgcccgtgacgcctacgtcatcgccgaaaccgcacgtcaccgcagggacttcgccgcgatcgacgtgccagcgcagctggctgccgatctggctctgctgaccgcccgccggtccgatctagccgctgaccgggtgcggatgatcaaccgactgcgcgacgtgctgaccggtgtattccctgcactggagcgggctttcgactactcggcccacaagggtgccctggtgttgctgaccggctaccagaccccggcagcgatccgccggcgcggccgagccaggctcacggcgtggttgaccaaccgcagcgtacgcagcgccgacaccgtggccgctgccgcgctggatgctgcccaggcccagcacaccgcgttgccaggcgaggacgtcgccgcccagatcgtggctgacctggcggcacagatcctggcgctggacgaccgactcaggaggatcgacaagcagatccgcgagacgttccgctgtcatccgcaggctgagatcatcgagtccctgcccggcatgggtccgatactcggcgcggagttcgtcgtcgccgcgggagacctgaccgcctatgcggacgccggccatctcgcctcggcggccgggctggtgcccgtcccgcgtgactccggacgccgcaccggcaatctgcaccgccccaagcgctacagccgccgccttcgacgagtgttctatatgtccgcgcaaaccagcatcatccgcgagggaccgaaccgggacttctacctcaagaagcgcggcgagggctgcaaacacgtccaggccgtcatcgctctggcccgccgacgagcgagcgttctgtgggctctgttgcgcgacgaccgtgaattcacctctgccccgccggccgcgaaagcggcttgactccgtcattgaga

SEQ ID NO: 840 - DNA, 1439 bp, unidentified
  source 1..1439: mol_type = unassigned DNA; note = element_0d58049
  misc_feature 1..2: note = core
  misc_feature 3..82: note = LE
  misc_feature 83..1186: note = CDS
  misc_feature 1187..1439: note = RE
  misc_feature 1257..1378: note = bridgeRNA
taattggatggactcaccctcaccgaggcgtcgaagcgccacggtggcattctaagaagccagcgacagtgagggtgaggccatgaaaaagcatacgacgacgacgaagcccatgtctgcagtggatgtgtcggcttgcacgacagtcgccgtggatttggcgaagcaggtattccaggtggccggggaagatgcccagggccagttggtgtacgagcagcggatcaagtcgcgtgaagcgtttcaggtgttcctgcagaagctgccgaggggcgtgacggtgctggtggaaaccggtccgggtgcgcaagcctgggcccggttgctgcagatgcagggcaacccggtgcgtatcctgccggcccagcgtgtggccgagcatcgtagcggggcaaagaatgatcgcaatgatgcccatgccattttgcgagcgggacgggattgcagcatcgcgtcggtgccggtgaagagtgtcgcggcgctggcgatgcaggcctgccaccggattcggcgtggctatgtgcggcggcgtacggccacgggtaatcagatacgtgggctactgctggagcagggcatcgccctggctcagggggaggcggccttgagccaaggtgtcccccgggtactggaagacgccagccagcccttgccggatctgctgcgtgagctgatcgacgagatgctgagcgagtggaggcgactgggcgagcgcatcacagcgctgaccgagcgtctggaagcgtgtgccaatgcggaccaggcagcgaaacggctgatgacggtgcgtggcattggtccgatcactgccacggcgctgctggccaagcagaccgaaccggaacgtttcgccaatgcgcgccagttcgccgcctacttcggtatcgtgcccgaccagcacagcagcgggcagaaggtgcgactgggcaagatgactaaacgtggcgacgcctatgtgcgcagcctgatggtggtgggcgcgcatgcggtattgaagcaactgcggccggattccgagcacccggacgaccgtcgcctgcaacgctggctacagcgcctggggcgcaagggggcggccgtgcgactggccaaccgcaacctgcggatcgcctgggtactgttgcgcagcgagcagacctaccagcgcaagccgaacgcttgccaggagattgagatgagtcactgatccaacgagttcccgccaccggggcgccaagccgctccaacccctgctgaagaacattgacccctggtcagaccgtcgcggattgatgcctacgctcctactggccttcgaggcctctttgtaatcggcattccgcgggcttacccaatgttggccagaagcccgacgtggcttcctcgaacaggcctaatacatagatgcaatcgggttcctctgttcaaaagcgggttgacggtgggggtgagtccataca

SEQ ID NO: 841 - DNA, 1182 bp, unidentified
  source 1..1182: mol_type = unassigned DNA; note = element_0d5b9e5
  misc_feature 1..2: note = core
  misc_feature 3..215: note = LE
  misc_feature 216..1166: note = CDS
  misc_feature 1167..1182: note = RE
  misc_feature 22..191: note = bridgeRNA
cttgtatgtttgacctcggcaagcgagaaagagcttgccggggtggagggaccaagctggcatctggccgaaggcacagacggtaggagacttcgtcccgcccctcaccaccagcgcccataaggaatctatcggcttagagaccgacgatttgtggcaagccagcgcaggtgagttcccggcaagcaccctgaagctacgcgggagagttcctcatggcaatgcacgttgaaccgtcgttgatcggtgtggatgtgtccaaggccgagctggtgattcgtcaatcctggtcgtcgaacctggtcaaactgggtaatgagcgcaaagcgatcgacagctacctcaaggcgttgacgggccccgtgtgcctggcggtcgaagcgaccaacatctttcacgtcctgctgatcgagcgggcccacgcgttggggcatgccgtctatgtgatcgacggcctgcgcttgaagcgctaccgcgaaagcattggcggacgggccaagacggatgcatcggacgcggcgttgctgttgcgttacctcacgcatgaaaagagcgatctacggccgtggaccccgccgccggccggctacgccaccgtccagcgcttgctgcgacgtcgctcagtgctggtccagacggaaacgaccctgcgccaaagcctgcaatgtctgccggagctgaaggcttccgtccgagccatgctggcccggatgaagcacatgcaacacctcatcgaccagcgcctggcgcaaaccctgaagcgtcagggctggaagggcgatgtacgacgctgccaaggcatcgaaggcatcggtccgatcaccgccgcagcgctcaccttgatctttcaccgcggcgcgttcaagagcgccgatgcctacatcgccttcatcggcctggatgtccgcgtgcgcgagtccggcaccttcagtgggcggcgcaagctgaccaagaagggcgatccggaactgcgccggttgctctacatggccgccatgacggcctgccgatcctccacgtggaaacccttctacgagcgggccctggcgcgcgggttgagctgcatccaggcactggtcgcactcgggcgcaaactcgcacgcatcgcctttgccctgctcaaaactcaatctgactacgtaccaaaggtcgttcaggtggcttgaccatccaacatagaat

SEQ ID NO: 842 - DNA, 1332 bp, unidentified
  source 1..1332: mol_type = unassigned DNA; note = element_0d6212a
  misc_feature 1..2: note = core
  misc_feature 3..256: note = LE
  misc_feature 257..1318: note = CDS
  misc_feature 1319..1332: note = RE
  misc_feature 24..226: note = bridgeRNA
ccgacttatatgtgtgtcacggcgtggtgagcgggattgcagcccctagcgtgccgtagcagaccggagggaatgactcgcggtaaccctgtcacccgaggtttgggttgactccaacgtggtgtgtcacccctccggtctgcgttcgcggcgtgactcgagagatgcatgaccacaagctgctttgcgaggtacttgaagtcggattgtccgccgcggattccccacccacatcagcgaagggaacccgcactccatgatcgtcatcggtgttgatccgcacaagtcgacacacaccgccaccgccttggacccgagcaccaactccgatctggggtcgctgcgcatcgaggcatcagttgccgactacgagcgcctgatcggctgggcgaaggtttggcccgaacggacctgggcgatcgagaacgccgacgggctcggacaccacttggcgttgtggctgctggcacgcggtgaggtcgtcttggacgtttcggccaccgcgaccgcgcgcgtacgggaactctcccgcggcggccggcgcaagaacgaccgcatcgatgccgccgccgcggccagtgtcgccgcgctgcagggcgatgcccgccccgttcattccgagaccaccaccgactccctggcgctgctagacgagcgtcgagtcaatctgtcccagcacagaacccgcaccatcaaccagttgcatgccctactgcgcgagttgatagccggcggcgtgccgacctcgctgacgcccgccaaggccaccaccgcgctgcgtggacttcgtccccgcactggcaccgaccgggttcggctggagctggccaaagacctcatcgccgacgtgcgtcgtctcgacgaccaactcgccgccaacgccgccaaggagagcgccctgctcgaggagcacggcaccaggttgcaacagatcgacggcgtcggacccatcctcgcggcccgcatcctgggccgcaccggatcggccgccaggttcgcctcggccgcggcgtacgcgaactacaccggcaccgcacccgtgcaagtcgccagcgccgactcctcccagcaccggctgtcccgctacggagaccgacaactcaactgcgcgatccacaccatcgcgatggtccagatccgcatgcccgccagcaccggccgcgccttctacgacaagaagatcgcccaaggaaagccaccacgccacgccacgcgcgcactcaaacgacacctcgccgcccacctctggcgagtcatgcacgccgatgaactacgcatcaccggccgacctccaacaaccatccagaaggcgtcttgacaaatagagaggca

SEQ ID NO: 843 - DNA, 1356 bp, unidentified
  source 1..1356: mol_type = unassigned DNA; note = element_0d692e7
  misc_feature 1..2: note = core
  misc_feature 3..74: note = LE
  misc_feature 75..1100: note = CDS
  misc_feature 1101..1356: note = RE
  misc_feature 1124..1353: note = bridgeRNA
ttaatgagatggtccccctccaccctgcaagatactaatcttgtggggtgagttctttctgaatggaggccatcatgcaagacgttacgctcatcggcatcgatctcggtaagcacggttttcacctgcacggacaggatcgacacggtaaggcgctgctgcgcaggaagttcgaccgcaagcacctgatcacctttctcgccaacttcccaccctgtacgatcgtgatggaagcctgcgccggcgcgcactggatggcgcggcagctgtccgcactcggccacaaggccaaactcatctctccgcagttcgtcaggcctttcgtcaagggcaacaaaaacgacttcatcgatgccgaggcgatctgcgaagcagccagccgtccatcgatgcgtttcgtgacacccaagaccgaagcccagcaatgcctgtcggccctgcatcggacgcgcgagtcgttggtgcgcgctcgggtcaaggcaatcaatcagatccatggattcctgctcgaattcggtatcggcctgcccaagggcgcgggcattatcaagcggctgccttccgtgctggcagagcgcgctctgccagcacggctggtgagcctgattgaaagactgcgtgcccatattcagtatctggacgagcagatcgacgagctcgagaaggatctgggcaggcaactgcaggaagacgatcttggacagcgcttgatggcgattcctggcgtcggaccgattacggcgagtgctttgtcggccgaaatgggcgacggcaagcaatacagctgtggacgcgatttcgctgcatcgcttggtttggtgcctcagcagcacagtaccggcgggcgagcgaatctgctgggcatcagcaaacgcggcgacaagaatatccggcgcctgctggtacagtgcgcgcggtcttacatgcgcggcttggaccggcacaccgaccgcctggcgcagtgggcgcgttccatgctggggcgacgccattccaatgtcgtagcctgcgcgctggcgaacaagctcgcccgcacagcatgggccatggcggcacaccataccgaatacaaaatgcaagaggccgtcacatcgctgtgacggcctcccgagcttgctgtacctaaggacctacctggttttgcgacgctgatactggatgacgtgaacggcacaccggcctgacggataacctggcataaaaatcggctcctgaagccgcgggtttttttaggacccatcaggcgcgaactctcatcgtggcgcggagcaagtctccaacatgacgccggatagatttgagcaagccaactacatcatacaaaaatcagcttgcaaaaaggagggggaccataga

SEQ ID NO: 844 - DNA, 1392 bp, unidentified
  source 1..1392: mol_type = unassigned DNA; note = element_0d6fd21
  misc_feature 1..2: note = core
  misc_feature 3..76: note = LE
  misc_feature 77..1123: note = CDS
  misc_feature 1124..1392: note = RE
  misc_feature 1127..1379: note = bridgeRNA
tgatggtgtggacggcccctacggcatcagttgtgccagaatgaggttgtcaaagacccattcacaggagccgtccatgagccagattatccgcattgggatggatacgtcgaagcatatttttcaactccatggcgttgacgcttcggagcaagtggtgttgcgcaagcggctgagccgcaaggcgatgctggagttttttaccaagctgccggcgacggtgattgtgatcgaggcttgcggggcggcgcactacctggcgcgggagcttggcaagctagtgcacacggtcaagctgatcgcgccgcagctggtcaagccttacgtgccgcgcaacaagaacgacgggcgcgacgcggaaggactgtgtgaggcggcgagccggccgcggatgcgctacgttccggtgaagacggccgagcagcaggcggcgctgatgctgcttggcgtacgcgagcaattggtcgcgcgtcgcacccagctctccaatacgatccgcggtcatgcggcggagttcggtttgatagcagccaaggggctggacaagcttgccgcgttcctggcgacgatcaaacaggacgatcgtgttccagcgctggctcgcgagctgtttgcaatgcttgcccgccaatatgaccaggtgcaagtcgagctgaaggcggtcgaggccaagcttgtggcctggcaccgtgccgatgccatgagccggcgattggcacaaatcccgggggtcggtccggtcaccgctgcggcactggtcatgaaggcgccagatccgcatgccttccgctcaggaagactgttcgcggcctggctcggcttgacccccaaggaccattccactgcgggaaagaccaggctcggcaagatcacccgcgctggcgatgagagattgcgtcaactgctggtggtcggggcgacctcggtggtcaagcaagcgatggcgaaagattccggtccacattggctcgtcgagctcttgaagcgcaagacaccgaagcttgccgcagtggcactcgccaacaagatggcccgcatcgcctggaagctgatgacgacggcacaggaatatgacagcgcgcggctgaatgcccgagccgaccaagcgccagccgccgcatagttgagagattcggccgaccggcgggttcacccaccggccgaaccggagctgcaagagcagaggagatggtgcgatcgatcgaccgaagatgcgagcaaatccgtgggacccattggccgatcaaggtcgcgtggttgattggagctcgtgtcgcggaaaccatcttggccagcggtctaacacgccgaaccaacaggccggacatatggatgcaagcgatccgatcaaaaccttcacaaagctcttgtgccacggaggccgtccacata

SEQ ID NO: 845 - DNA, 1633 bp, unidentified
  source 1..1633: mol_type = unassigned DNA; note = element_0d71c32
  misc_feature 1..2: note = core
  misc_feature 3..294: note = LE
  misc_feature 295..1479: note = CDS
  misc_feature 1480..1633: note = RE
  misc_feature 61..273: note = bridgeRNA
ctggtatattgtaaatgactcatctaagtagtcatctacaatatacctttttcctttccatcaacccttctaaccgtggttgattacggtttggttattctgtatcatttgaaatatgtgaatgtggatttgtatcgcctcctgtggctttgactactttcgaaaggttcttaccactccgtattccaaaataatgattagttagatgagtctttgaattcgtatcacgcaccaggatttgtggaatccgtgatgtggtcgcacttcacatatattttgaaaggatgtgtttttatgattctcgttggtatcgacattggcaagaaaagtcatatgttctgtgtaatggatcagtctactggagatatccttgttgatcctttgtcatttaaaaacaataaggaaggatttgatcagctcattcaagctatcaagccttattcaaaagaaaacattttaattggcatggaagatactggccattatcacttcaatttattaaagtatttactagatgccaagtatacagtcgctctgatcaacccgatcacaacggatctgacacgcaagatgcagcttagttcaaccaaggacgatgatcttgatacgttgaccatttgcgatgtactagcttctggtcctcgtcgaaaaggataccgtatttctaaatttgactcctttgatctctacgaacagaaacggttgactcgtgaacaccacgacttgaaagaacaaaagaacgtctatacgaacaagcttcaaaaatgtattgatatcgtgtttccagaattcaatgacctgtttaagtcaaaatacggaacagtctatatgaatatccttaaaacttttggaagcgccgatgccattgctcatgccaatattcgatcaattcgaaaatgttttgagacgtatactaaaggcagaaaaatctctttaactgctgagcaacttaaagaagcggcgaaaaattccattggttttccttccacggctgaaacaattgaaataaagcatttgattgaaataattgagatgctggatcaacaaattgaagaaattgacaaaaaaatagaagagttcgcccacgaaaacgactctcctatcttaagcatcccagggatttcatatttctctggtacttctattttagcggaattaggagatttacacaactattcgaaagcttctcaggtcataaaatttgccggagtgtctccaagcaaatacaaaagcagtcagttcgaagctcagcataccgctatcaccaagaaaggatcaaggtatcttcgtaaaacgctttatcaagtcattcttccggtcatcaagttcaatccagttttcgaaacattctataaactcaaacgatcacaaggaaaaagtcaccgatgtgcacaagggcattgcgttcgaaaactattgcgaatcatttatcatttagaaacgacgaatcaaaagtttgatccatcaatgattagataagaaaacagtcgttaaaaacgggacctggaaaaggtcttttcgtcatgcctttttattcacaaattcaaagatcaatacaaaatcagttaactatattcagcccaataacgttttcaaactttttcataattaggattgatttttatatagttag

SEQ ID NO: 846 - DNA, 1377 bp, unidentified
  source 1..1377: mol_type = unassigned DNA; note = element_0d79312
  misc_feature 1: note = core
  misc_feature 2: note = LE
  misc_feature 3..1106: note = CDS
  misc_feature 1107..1377: note = RE
  misc_feature 1146..1375: note = bridgeRNA
taatggaatggacccatccccttttaatcggcctcacaatgggccacgatgaagttgctacaactcatcagaaagaggacgggtccaccatgaagattactacaattggtttagatatcgcaaagtctgttttccattttgttggcgtgaataaagcaggaaagcttgtcaaaaagaagatgattaagcgtaaagacttaattcatttttttgcacaagtagagccaagccttgttgtcatggaggcttgtggtggagcaaattactgggctagagagtttcaaaaggtaggccatgaagtcaaattgatagctcctcaatacgtcattccatacaggcctggtaataaaaatgattataacgatgcgcttgcaatagctgaggcagcccaaagagcaaatatgcgcttcgtacagccaaagcctgtcgagcagcaggatgtacagatgcttcaccgaatgagggaacgtctaaacaaacagtctaccgccttagtcaaccaggttagaggcatgctggcagaatacggcatcgtaatagcaaaaagcaaagcggcctttaggaaagcttttcctgacattttatctgatgagaacaatgaactgacagtgaaaggacgctacatattcaatcagttgcatgaagaatttaccgatatagagaaacgcctaaaaagctgtgatacgcagatagtagaagagagaaatacaaaccctgtttgcctgcgtatagagacatctccaggtattggtcctgtcacttcgacagctttttatgcggcagtgggtgaaggaaaagacttctccaatggtaggcacttctcagcttggtgtggcttagtgccaagacaacatagcagtggcggcaaagataacctgctagggataagcaaaagaggcaatgcctatttacgaactttgtttatacatggagcaagagcggtcttgcagcactgcggaggaaaacaagataggttgagccgctgggcatacgctttggcagaaagaaaggggtttaataaggcctgtgttgcagtggctaacaagcttgcaagaataacctgggctatcgccgctagggaagatgaatataggacatttgcgtagcagtggtcctaaagtaagacgaaccgagttagcgtaaaacataccagcaagttgctatgacacttgatttgatgatgagacagtcagactgctctacttaaaacctaacagccgcaagggctctaaagaagccgtgtaggtgatcaggaaagtagaggcaaatatccatcagggccagaggttaacctcataaacaggccgtatatatgggtgcaatgaactcttctcaaaattgatatcaaatgtcttgcaaacgggatgggtccatata

SEQ ID NO: 847 - DNA, 1358 bp, unidentified
  source 1..1358: mol_type = unassigned DNA; note = element_0d84758
  misc_feature 1: note = core
  misc_feature 2..66: note = LE
  misc_feature 67..1116: note = CDS
  misc_feature 1117..1358: note = RE
  misc_feature 1130..1352: note = bridgeRNA
taatgagatgacctgccccgccctccagcctcaccatgaggctccaacaggaaaggaggaactgacatgattcgaaacaccccccgtgatgccgcggtatacggtgtcgatctcggcaagaatctcttccacgtcgtcggtctcgacagctgtggcgcggtggtccagcgcgtgaagttccgacgcgagacgttgctcaacttcttcgagcgtgccggacgcgccgtcgttggcatggaggcgtgtccaggctcgcaatggctggcgcgcaagctgctcgcaatgggtcacacggtgcgcatcgtcccggcgcagtttgtgaagccctatgtcaaatcgcagaagaacgacactatcgatgccgaggcgatcgcggaggccgtgacgcgaccgactatgcgcttcacacaggtacggacaactgaacaggtggatctgcaagcgctccaccgcatccgagatcagctggtcgccagccggactcggctcatcaaccaggtgcgcgcattctgtcttgaatacggcgtcgcgatccggcaaggcgcaggcgtcttccgcctcgatcttccccgtgtgctcgccaatgaaggaaacgacctcacgccggcgatgcggcggatgctgaccgagctgttcgaagacgtcggacgcctcgatcagaggatcgccaccgtaacgcgggaggtcgagggactggccgcgcgcgacgatcgcgcccgacgcctgatgacaatccccggcatcggcccactcgccgcgacggcgctgctcgccgcggtcggcgacggccggcaattccgtcgagcgcgcgacctagccgcgtggcttggtctcgtcccgcgggagcactcgaccggcggtaaaacaacgctgctcggaatcagcaagcgtggaaaccgttatgttcgacggcttctaatccatggcgcccgctcgtgcgtgacgcatctcgaccggacgcgcgaccgtcttggcggatggctcgacggtctacaggcgcggatgcacgtgaacaaggtcaccgttgcgctcgcagcgaagatcgcccggacggcatgggcgatcatcaccaagccgggagcgctctatgaacgcagggatccgaccgtcgcctgagcgcgccggccgggcagaaagcgaggctcgaggaagtgatgacgaaacagtcgatcggcgcatcgtaagctctgtgcaaaaaaccgtgcccctgcacgaaccatttatctgagaacgaagcgcgcggatctcatcatggcctggctgcaacagcagtccactcgcgagaggccggatacatttaggcggactgccgtcgtcagaacaaccacgacccttgcccgggcggggcaggccataca

SEQ ID NO: 848 - DNA, 1211 bp, unidentified
  source 1..1211: mol_type = unassigned DNA; note = element_0d90075
  misc_feature 1..2: note = core
  misc_feature 3..267: note = LE
  misc_feature 268..1119: note = CDS
  misc_feature 1120..1211: note = RE
  misc_feature 12..190: note = bridgeRNA
cttgtatctttcctccggtggtgattagctatcaccaccgcacgccgatgaccgcgagttggtgcccaaagcgaggactttgtgggacagatagcggctcggcagcgcactgctgggccggcgagacactggacggtatcgtagggcgaggaccctgtatgtacaaggcaagtgggcgcagtggctgacagcagtttgttatctgcaggaggccaagtccatgttttcataggtattgatgtatcaaaggccaagctggattgcacgttgctgacggctgaggctgacaagcgtaagaccaaggtggtggtcaacaccgccgcgggcgtacaagccctgctggcgtggtgcgccaaacacggcgcacagccggcgcagttgcacgccatcctggagcctacgggtctgtatcacgagcaagcggccacggcgctgccccaggtccgggtctctttggtcaatcccgcccaggcccgggactttgccaaggccttggcgctgcgctccaaaaatgatgcgctcgacagctacgtgctggctcgctatggacagacgctgagcccggcgctgtggcacccggcgcccttgcatgcgcgtcaactgcgcgccttgttgacgcgacgcgaggcgctgagcaaggatctgttgcgtgagctcaatcgcaaagagaagagccagttcagcccctcggcgcccgtggtcgatggttccatcgacaaggccatcgcgttcttgcgcgaacagatcaaacaaatcgagcgggcgatcgatcagcacatcgacaaccaccccgacctcaagcaagactgcgagctgctgaactccatccccgccatcgggcctcaggccggcaacgccatcctggccgtcatgcacaatcggcatatcgactccgcccagagcctggccgcctatctcggggtggtccctgtgcagcgccaatccggcagcagtctgaacagctgcgcacgcctgtccaaagccggcccctcccaggtgcgcgccacgttatacatggcggccctggttgggacccgccacaacccccacatccgcgccctttaccagcgcctgctcaaagcaggaaaagcaaaaaggccgcgctgggcgcggccatgagaaaactggtgcatctgtgcttcggggtcctcaaaaaccgcatcccctaccagcccaattacgccatgaacggttgactgccaagacggtat

SEQ ID NO: 849 - DNA, 1944 bp, unidentified
  source 1..1944: mol_type = unassigned DNA; note = element_0d94b95
  misc_feature 1..2: note = core
  misc_feature 3..133: note = LE
  misc_feature 134..1420: note = CDS
  misc_feature 1421..1944: note = RE
  misc_feature 1587..1823: note = bridgeRNA
agcattcctgtatataaaaaaatatgaaggtaagtggggctagaatcgattgtacaaaaatagagccctcttggtacgatagagagtgtcatcgcgatgacctcgaaattagataccaaggaggactcctaccatggattctacacaaaataatcgcttagagcaaatcacagacaagacacttattatcggaatagacgtggccaaggacaaacatgtcgcgcgtgccatagatgatcatggacgcgacctggctaaacgattggtgtttgaaaatagtctaacaggttttcaatcattgttggattgggcagagcatcttgctgagcaacaacagcgcccccattttatgtttgggatggaaccaacaggacattactggctcaacctggcttatcatttaaaggcacaagggttgcacgctgtggttgttaacccaacgaaagtcaaacgcaccaaagagttggatgatgactcgccaacgaaaaacgatacaaaagatgcgaaagtaatagcacaggtagtgcgggcaggacgctttcatgaaccgattttactggaaggtctttatgctgaattgcgggaagggatgaaactccatgacataatggagaaagatttgacatctataaaagcgcaggtacagaatgcgctagatcgctatttcccggagtttacaactgtttttaaagactggacgaagaaaacaccgatccatttcttgaaaaaaggttatcttcccgttgatatcgcctcctgttcggaagaggctttactggcggaaatcaaagaagcggcgaagcgtggcgttggaatcaagcaagctcgatccctgaaacatgcggctgaaacgagtgtaggtatgaccgttggactgaccatggcacgagaggaaatcagctatttaatcgatcaatatgtagctataaagggacgtatcgaggctcatgaagcacgattggaagaacttgttctccaggtgcccggtgcccgtcaaatgatcgcgataaaaggggttggtgtcatgaccgttgccgggtttttcgctgaagtaggagatttatccaattatcaagatccacgccaaatcattaaattagcgggacttaatctgcagctgaaccaatcaggcaaattcaagggtcaaacaacgattacgaaacgtggtcgccgtcgattaagatctatactgtaccttgccgcacgccctttatcagctaataacgaaggtttcaaacagctgcatcattattatagaaatcgcccggaccatccactgacaggcaaagaatcgttcgtagcacttggccgaaagcttatcaagatcttttatgtcatgggtacgcgcaactgtgcattcgatggagaacgcatgatgagggatatcccttcattgagatccctgcagaaagtagcttgatgagacagattgcagacagaaacgcgtgaatgcttgatacaggcgaatgtaggatagcttgtataacaggctatgcctccaccaaaaccaaataatgcatgatatacaggaatgtggcgtgatacaacagaaaatacgctgtctatttgtttaaattcgatgacatctgaagcacggattagccggtcggtatctactccgttagggcatagacccacttagaaagcatatccggcatccacacatggtaaggttgaacaaaggaatctacgcgcacgacgccgagaaacatgggaggatccaccgccatgttgaatgtggagatccaaaggtgcaatcatacggtatattttacttagttttcataaatatggatgctaagttcgtgaggggctacttattatttccatacttaaccccccgggcgtatactttccttcaccttaaccagatagcttcaccaaatgtggtagaaaaagatagaaaaacagcgatattttaaggaaatcaaaataaattgaggg

SEQ ID NO: 850 - DNA, 1387 bp, unidentified
  source 1..1387: mol_type = unassigned DNA; note = element_0d9dfec
  misc_feature 1..2: note = core
  misc_feature 3..248: note = LE
  misc_feature 249..1286: note = CDS
  misc_feature 1287..1387: note = RE
  misc_feature 24..224: note = bridgeRNA
ctcctatgtttgttgtcataatataagcaaataaatttgcattatgaagtgagaaggaatgagagcagagtgtgccccaaacaaccattaaggtatgttgagagagagatgctgcctcattcctttttactctttggagtttgaacagaatgtaaggaatattgctttgcgatatatccaggatatccggcaggagaaaagacgaagaagagttttcactttaatattattcatattaaagcacagtgatgacaaacattttaaaacaggtagtaggtattgatgtagcacaggatgagctggtagtatcccttggcagaatggaccaaaatgtgcaaataaccatttatgcattcaagcaatttgccaataagctatccggcttcaaggagcttgaaaaatgggttaaaaagcatacggatcaacaggtaaccgtacgttatgtaatggaagctacaggtatttaccacgagaagctggcttattacttaacagaccagggacatgaagtaagtatagtgctacccaacaagatcagtaactatatgcgcacgctggataccaaaacagtaaccgataaaaccgcatctcaggcaatttgccagttcggcctggaaagaaaacatgaagtatggcagcaacctaaaaagatttttcgtgaccttaaacaacttacacgtgaacgtgaccagatcattgcagaacgtacagtaagtaagaaccagctacatgccgaacaagctgaagcttttccgaatgataaaagtataagcaggcttaagcaacgcattcagttatgtaacagtcaggaaaaagagatcaaagaagatatagcggccattattaaacaggataaagagctggctgagcggataactaatgtagctactatacccggagtaggtaaacttacggtagtaatatgcattgcggaaaccaacggatttgatcttgttgaaaacaaaagacaggttaccagctatggagggctggatgttgaggagaaagaatcaggcacatcagtaaagaagaaaccgaagatttccaaaaaaggaaaccggcatttacgtaaagcaatgcatatgcctgcgttaaccgccataagatacgatgaccggtttagagcaatatatgccaggcttgtatcaaaacacggcatcaaaatgaaagccgcagtagcaatacagcgaagactattggaactgatatatactttgtggaaaacaaacgagaaatatgagaaaaaccatatccatcaatccattgaaaacactcaagtcgtataaagggttagggcagccattaataatgaactgccctaaacaggctggcataaagccgccttaagaaaacaaaattaaaaattatttgataattaacacagaat

SEQ ID NO: 851 - DNA, 1605 bp, unidentified
  source 1..1605: mol_type = unassigned DNA; note = element_0db045e
  misc_feature 1..2: note = core
  misc_feature 3..119: note = LE
  misc_feature 120..1154: note = CDS
  misc_feature 1155..1605: note = RE
  misc_feature 1351..1553: note = bridgeRNA
agatggggtatcggggctggtcgccgcggttagcgggccgttaggtggctgcgcttcagactggtggtgaaacgaggtccgcatgaggcggcctcaagcatcagaggagaagcgcagccatgcaatattatgccggattggacgtctcagtaaaagagaccagcgtatgcatcgtggataagacaggcaaagtgatccgcgaagtcaaggttgccaccaagcccgtggcgatccttgcggttctgacagagcaagcgcttgccattgagcgcattggtcttgaggcgggacccttgtcgcagtggctgtacagcgcattggtcgaagcggatttgccggtgatctgtgttgagacccgccatatgaaggcggcgctgtcggcgcagatcaacaagagcgaccgcaatgatgcgcgcggcattgcacagatgatgcgtgttggcctgtaccgaccggtgcatgtgaaaacgctggccagccagaagcgccgcatgctgctgaccagtcgccagcttttgcagtccaaggcgctcgacatcgagaacgacctgcgtggcacgctgcgcaatttcggtctcaaggtgggcatggtgggcatggtcaaattcgaggctcgaattcgtgacctggtcgcggagcatccggatttggccgcgatcgtcgaaccgctgctgatcgcccgcagggtcctgcgcgagcagctcggcgtacttcaccgccaactgcttgagatcgtgcgccacgatgaggtctgccgcagactgatgacgacacctggcgtcggaccagtggtcgcgctgacctttcgcgccacggtcgatgtgccctcccggttcactagctcgaaggcggtcggtgccgccttcggcctgacgccgcgccggcagcaatcgggcgagattgaccggatggggggcatctcgaaatgcggagacgccatgatgcgcgaaaggttgttcgaggcggccctggtcctgatgacccacagccgcaagtggtcgtggctcaaggcctggggcatgaagattgcccggcatcgtgggatgaagcgcgcgatcgtcgctgtggcgcgacgactggcggtcatcatgcatcgcatgtgggtggatggcaccgagtttcgctggagcacgaaagaagctgctgcggcctgaccgtgagcgtcagatgatggtgcgcatcgcgacagcacggatgattgctcggtcggcgcattcgccgtcaagccgcgcgcctgcgccgcgccgctgtgcggctttggggcttgaccgctcagcgcgaccgagcagacaagagcgaccgtgcctcaatgcacacttgtacgttcatctagaacacggggagaaaacctgaattccgccgatcggtggagcgatgtccccgcagggacgatggatgaggcgagtccgttttgagtcctgatacctgccgtaggtcttacggcaaggacgtctcgagagattggtccgccgcatcctcctgatcccatcatgggagggccaaagtgccgatcccgaagagaagcgaggaccttgcgagtgacatcgaaaccaggatcgacggagcagtctgaaagcgcttgacacccacccgccccgatagaga

SEQ ID NO: 852 - DNA, 1547 bp, unidentified
  source 1..1547: mol_type = unassigned DNA; note = element_0dc6e32
  misc_feature 1: note = core
  misc_feature 2..91: note = LE
  misc_feature 92..1138: note = CDS
  misc_feature 1139..1547: note = RE
  misc_feature 1306..1545: note = bridgeRNA
taatggaatggttcgccccgctccctaaacggcctcaaatgggccatgatgcaagtgttattcagacatcaaaacagaagcgaggtgaaccatgaagaaggataacaagaaaacccaggttgcagtattgggaattgatctggcaaagaaaagttttcaactgcacggtgttgatcaagccgggaacacggtattgcgcaagaagctcaaccgaaatcagttgagtgcatttgttgcccgattgccaccctgcctgattgggatggaagcttgtggcggtgcccaccattgggtcagggcattcaaaccatttggacatcgagttcggatcatggcaccccagtttgtaaagccctatgtgaaatccaataagaatgatgcggtggatgccgaagccatctgtgaagccgtacagcgccccaacatgcgcttcgtgccggaaaaaagcattgcgcagcaagacatgcaaagtgtgcatcggatacgcagccagttggtggccaggcgcactgcgcaaagcaatcagattcgtggcttgctcatggaatacgggatcatcattcccaagggcatctgttatgttcgcaagcagctgcctgagattctggagaatgcggaaaatggcctgagtgatctgtttcgggaactactcaatgagctgtacgaggaactcgtgcacctggatgaacgcgtagaagtattggagaaaaagctgcaccgcctcagtgcacagaatgaagattgccaacgcctgctcacgataccgggaatcggcttgttaagcgcaaccgcactggtggccgccattggtgatattacggtattcaagaatggccgtgagctggctgcctggctcgggttggtacccagacaacactccacaggagggacaacgacccttctgggtatcagcaagcggggtgaccgttatctgcgcaccttgttgatacacggcggacgcacagtagtccgggtagcgcacaaacaccaggatcggcgaaaccgatggatctgtgaaatagaacagcggcgcggaaaaaacatctgtgccgttgccgtggccaacaagaatgcccgcattgtctgggcggtgttgagcaacaagacaacataccaggtgcatgcgaatgctgtgtgaaaatagcccatgcacccgggttgccactttttcgcaacactggcggacagccatggtggaaagcggagacagggggaagccagtgtcgcgaaaaagcgccgtcaataaaggaagcggaatagaccggaaccgatggttggaacagaaacacatgggaaaatgggaggacagcaacgagttgcgtggataaagttcagatgatggcagaaaaggtagcacctgcatctccgaaagcctgttggggtctcgggcccgttgagaggccgaagacttgatgaggcaggagatgcgcggattccatcagggccagaggcagtaaagttgcctcatcccaaaggccggatatatggatgcaatattcttcctgtcacaaacgaacttttccttgcatcgcggggcgaaccatata

SEQ ID NO: 853 - DNA, 1428 bp, unidentified
  source 1..1428: mol_type = unassigned DNA; note = element_0dcffd3
  misc_feature 1: note = core
  misc_feature 2..125: note = LE
  misc_feature 126..1145: note = CDS
  misc_feature 1146..1428: note = RE
  misc_feature 1187..1427: note = bridgeRNA
attgaaatgaacgcgtcccaccccgtgaccaggtgagcaaagaaaggtggatcctcacgggccaacggcatcgatgttcccacgaggaaaatacgaagttttccagacaacccggaggatccatcgtgaagcttacgcctgttgggattgacatcgcaaagtcggtttttcaggtgcattacgtcgatcaggaaaccggagaaatcgtgaacaggccaatcaagcgggcaaagttcctcgagtacttcgcgaatcgtgcgccatgcctgatcgggatggaggcgtgcggcggagcgcatcactgggcccggcaactggcgaagatgggacatcaggtcaagctgatgccggcggagttcgttaaggcgttcaacatacggaacaagaacgatgcggcggatgcacgggcgatctggctggcggtacagcaaccgagcaagccagtggcagtgaagaccgagatgcagcaggcgatgctggcgctgcaccggatgcggcagcaactgatcaagttccgcacgatgcagatcaataacctgagagggctgctcacggaatacggcgaagtgatgagcaagagccggagcaagctggacaaggaaacaccggctgtgctcgaacggttggctcagcgtctgcccgccgtgctgatcgatacgtttcgtgagcagtggaacgccctgacgaagctagacgaacaggttgccgagatcgagcgacgtatgcgcgagtggaagaaggaagacaaggccgtgaaggcaatcagtgaaattcccggtgtggggctgctgacagcaacggcggcagtcgcgatgatgggcgatccgaaagtatttagttcggggcgggagtttgccgcgtggattgggatcgtgccgaaacagacgggctcgggcggcaaggtgaacctgcacgggatcagcaagaggggcgacacgtatctgcgcacactgctgattcacggcgcacgcagtgtggtgacacgtgggaaggcgcccggcgagtgggttgagcagatgaagacgcgacggccgaagaacgttgtggtcgtcgcattggccaacaagatggcccgaacgatctgtgcggtgctggctcatgaccggccctaccagaaggactatgtgagcgtgaagccggtctgaaaggctcgcacacgatgtagaagatcaacttttaacacagggtgaacgtcgaaaggttgcgcagcaatcgagtgtgatgacaagccaggtaggaccgggactcgatagacctgaggggtaatacgagctttgagctcgccggacgaatgaggatcgagtcagcgtatttcataggggccagcagcagacgtcgtggctgcatcaaggccggatatagatccgcagcccatcctgtctatcggaacacacgagaaactagcgcaaacgggacgcgttcatatag

SEQ ID NO: 854 - DNA, 1620 bp, unidentified
  source 1..1620: mol_type = unassigned DNA; note = element_0dd9b36
  misc_feature 1..3: note = core
  misc_feature 4..258: note = LE
  misc_feature 259..1458: note = CDS
  misc_feature 1459..1620: note = RE
  misc_feature 28..278: note = bridgeRNA
tttggtacgataaaagtgtaaatgcaagacattcttagtgatgttgagcgtttgcacttatttttttacaatgagagggtaattggtctggcgtgggcttttttggatccgtgcatccgtcaataaaaactgtcagccatctcttattgtgagcattcgattaagcaggttgaaccagatagcgttcgcgtaactaaccaaactgaatgggcaatgagtgcagatggattgcaattacaataactcatggaggttgttatgataagcgttggaatcgatgtatcaaaagaaaaaagcatggtttgtattttaaagccatatggtgaggtccttttatcaccaacagaaatcgtgcacacagaagaagcggtatcaaaattagcagatacgatactaaagcttggaagcgaggtaagagtagtattagaagcaacaggagcctatcatctacctctattaagcatttttacagagaagaaaatcttcgttagtatcatcaatccactcgtgatgaaaaaatacgcctcaacggctattcggaaaggcaaaacggataagattgactctgtgaggattgcaaattatggtctcgataattggtttcatctacgaaagcatgaacctagcgaagaagtttatgaagaactcaaatttctcggaaggcagtattctcattatattcgaatgaagatagacagcaagctgtcacttaatgggatattggacagaacaatgcccggcataaaaaaattgctttcaggaaaacggtctgactatccgacaaaagacaaactcagtgattttgttgagcattattggcattacgacaacatcactaaattaagcgaggaagactttatcaagagctatcaagaatgggctaaaaagaggaaataccacgccagtgaatccaaggcgagaaaaatctacgccatggccagcagtggtattccaacgctctcttctagcacaccatcgacgaaaatgctcgtgctagaagcagtcagagttcttggtgaaatcaacaagactctacaaaatattttaacacagctgcaggccacggcaagtactttaaaagaatatgagaccgttagagcgatgagtggtgtcggcgatgttctagcgccaagactaattgcagaaattggagacgttagaaaatttcacagtggcagtgcactagtcgcctatgcggggttagattctccgccttttgaatctggaaatttcgtaggtacaaggcggaagatatccaaacgtggatcatcattacttagaaaaactggttatgaagtcatgaaatgcttaaaagcaatacagcctgtgaatgatgctgcggtatatcaatatatgttgaaaaaagaagcagagggtaaggctaagaaagtggctaaaattgcagctttaaataagttcttacgcatttattatgcgagggttatggaactgcaatagcatgtgttaaaacaattttacaaaaaaacaggctaaccgcagataactggttagcctaattgccgtgctcataaacatcatctttttcaaggtggtgtttttttattgcttcgaaaaatctaatcaaggattttaaacttcttcttgatttttcttagcagg

SEQ ID NO: 855 - DNA, 1236 bp, unidentified
  source 1..1236: mol_type = unassigned DNA; note = element_0ddc166
  misc_feature 1..3: note = core
  misc_feature 4..233: note = LE
  misc_feature 234..1214: note = CDS
  misc_feature 1215..1236: note = RE
  misc_feature 7..210: note = bridgeRNA
gctattagatttgtattcaataactttaagtagtaacaaagaaaataaatctgaacaaccagagggaataggagaactagttcgactcttaaacagtaggtttatactgagcattagtcctattttcctctttggtttatagtaccatttagaatgttaagcatcaaggcttattaatagcgttagcaataaaaccaattggttgccagagttattttcctaaatctaaaattatgaaaaaaaatgtaattggtgttgacgtatccaaagatacacttgattattgcatcttagatgtagaaaatcattcaaaaattggtaaaggaaccattgctaatgaagaaaaagctattctgaagtggttacgagagtttgatgttgaaaatacaataatcagttttgaacacacaggtcactacggagccctattagcttgggttttggaagattcaaaatttgtgtattatataatcaatcctttagatctccagcgttcgttgggtattcaacgtggaaaatctgatgttgttgatgcttacagaatcgcagagtataccattgggaataaacataagctaagcccatttaaactcccaagtgaaggtttgaggaaattaaaagtcttaatgacagctagagaacgttatgtgaaaattgctgtacagattaaaaacagtttgaaagccgaagagattttagcaacgaaagtggatataaaaaagctaattacgcttgaaaatcaacaattaaatgtcattgaaaaaacaatcaaagctttagaaaaagaaatgatggatatcctaaaatcgatagatgaattacagctttcatacaaaaaaattactaggataattggtgtaggtcccattacagcattgaaatgcattattgaaacagataattttatgaagtttactgatgcgcgtaaattcaattgtcattgtgggttagcaccgtttccatatcaatcaggaagcagcataaaaggtcggactaaaacacattttctcagagataaaacccttaagactattctgtttaatgcagcaggatctgctatacaacacgatcctcaattaagaaactattatctcgataaaattgaaaaagggaaacataaactaaccgctcttaatgcagtagcaaacaaaattgtacttagaatatttgctgtcgtaaaaagagaagagccttttgtgaaattaactacttaaaaatttgcttttatcttagaat

SEQ ID NO: 856 - DNA, 1403 bp, unidentified
  source 1..1403: mol_type = unassigned DNA; note = element_0df55f2
  misc_feature 1: note = core
  misc_feature 2..87: note = LE
  misc_feature 88..1122: note = CDS
  misc_feature 1123..1403: note = RE
  misc_feature 1173..1398: note = bridgeRNA
taatggtatggacgccccctttctcaactggcatcgagatgccaaagtggaggttcaggccaaccacttctgagagggagcgtcaccatgaagattacgacgattgggatcgatttggcaaagacgttgtttcaagtgcatggcgtcgacaagcagcggaaagctgggctaaaaaagcagctcaaacgcaaggacgtaatgagcttcttcgcgaatctcgagccctgcctgatcgggatggaagcctgtgggagcgcgcattactgggcgaggaagctctcggagctgggccatacggtgcgtctgatggcgccgcagtttgtgaagccgtacgtgaagacgaacaagagcgaccgcaacgacgccgaggcgatctgtgaagcggttgggcggccgaacaggcgctttgtgccggtgaagacggcgccgatgcaggcggtgctggcgctacaccgagcgcgccaggggttcgtgaaggcacgcacgcagggcaaccagattcgagggttgctcgccgagttcggaatcgtgatcgccaagggcatcagtcacatcaccgagcgcttgccggcgattctggaagacggcgagaacggtctgccgggaatgatgcgcgagttgctgcagcggctggatgagaatctgaaggacatggacaagcaagtcgcagaactggaacgccagatcaagctttggcatcgggggcacgagccaagccgccagcttgaagcgattgccggcttcggacccatcaccgcgagcgcgttcgtggccacagtgggcgacgcgaagagcttcaagaatgctcggcaagtaccggcctggctgggcatggtgccgcgccacgagggcaccgggggcaaagcgaagctgggccggatcagcaagcgaggtgatgtgtatttgcgcacgatgctgatccacggggcccgctccgtgatcgcgcacattgagcgcaagcccgatcacgccgatgaatggttgaagaagctgcttgcccggcgcaacaagaacgttgccgcggtggcgctggcggcgaagaacgcgcgtatcgcctgggcgttgctggcgcacgagcgcagctaccagcacgattacgttgcgacacgtaaggccgcgtgatcgcggttggttgaatttgagcgagcgaaccgtttaggaaaggaggacttccgccgattgctcaggcaatcatgaggtgatggcaagacaggtaagaccgtgacggggtaagcctaggtaacccaatgcacttcgagtgcgcaaatctgatcaggcccccgtcagccgattccatcagggaccgaggcgaaggcctcaaacaaagtccggatctatggctgcaatcttaaccttctcaccgtcattgagtgatcgcttgacaaaccgggggcgtccatcta

SEQ ID NO: 857 - DNA, 1469 bp, unidentified
  source 1..1469: mol_type = unassigned DNA; note = element_0dfd931
  misc_feature 1..5: note = core
  misc_feature 6..247: note = LE
  misc_feature 248..1459: note = CDS
  misc_feature 1460..1469: note = RE
ctcactggtccaccattggggtgttggaggcggtcaggcttccgacgcacccctggtgaccgttggtccatcgccactgccgcttgcgagtcgatcgccagcgtgagttctgcgaggaccggcggcccaggacgtgccgactggctacagggctgagcgccagcgagcgccgatcagtgagcgaccggctgacacgtccatggaccaccgggtgcttccccactggtgcaacagcgaggaggctgacatgcatgatcccaccgtccgttacggaggcgtggactgggcaaccgacacgcacgcggtgtgcgtggttgatgacgacggccgggtggtcgtcgagttcgacgtcgatcacaccgctgaggggctgagcgcgctgtgccggcgacttcgggcagccggtgttgcccgcgtggccatcgaacggcccgacggacccgtggtcgacgcgctcatggcacacgacttcgaggtggtggtcatctcgagccggtcggtcaaggcgctgcgcgagcgttatggcaccgccggcaacaagtccgaccgcagcgacgcctacgtgctcgccgactgcttgcgcaccgacgggcaccgctgggcgagcttgaagcccgacacgcccgcgaccgtgacgctgcgatcgcacgtacgcgcccgcaaggatctcgtcgaggcccgagtcgccgcgtgcaaccagctgcgcgcgcacctgcgcgtcgtgttccccggcgcggtcgggctgttcgcccacctcgacagcgccatcagtctccggttcctcgagcggttcccatcggcaacccgcgcggcatggctgtccgagaaacgcctcggtgcgtggctgcgcgccaacggctacagcggccgcacgcaccccgccgagctctaccgtcgcatcgccaccgcaccgcgcggccacgacgacgacggcgacaccagcgccacagtcgcgctcgcgttcgtcgccgtcctcaaggccctgcgcacccagatcgacgagctcgatcaccgcatcgctgagctcctcgacgcccaccccgacgcgcacatcttcacctcgctgccccgcgccggggtgatccgcgccgccaccttgctcgccgagatcggcgactgccgcgaccggttccccacacccgacaccctcgcgtgcctcgctggcgtcgcaccctcgacccgcgccagcggccgacaccgcgtcatcaccttccgctggagcgccgacaagaaactccgcgacgccctctgcgatttcgccggcgacagccgacacgccaacgcctgggcccacacccgctaccgacaactccgcgccgccggcaagacccacccccacgccacacgcatcctcgcccgcagctggacccacatcatctggcgctgctggcaagaccacaccgcccacgaccccacccgccacgccgccttccaacacctccaccagcacgcggcttgacacagggcta

SEQ ID NO: 858 - DNA, 1363 bp, unidentified
  source 1..1363: mol_type = unassigned DNA; note = element_0e020ac
  misc_feature 1..2: note = core
  misc_feature 3..78: note = LE
  misc_feature 79..1098: note = CDS
  misc_feature 1099..1363: note = RE
  misc_feature 1105..1350: note = bridgeRNA
tgatggggtggacggcccctgcaccagcgtagctgtgcaatgatgcggccgtagagccacgtctagaggagccgttccatgcaacaggatattgtgaccgtcggagtcgatctggcgaagaacgtgtttcaggtccacgcgatcggcgcggatggcaaggtgctggtgcgccggcagcttcggcgcgcggaggtgctgaagttcttctcgacgctgccgccttgcctcgtcggcatggaggcgtgcgcgtcggcgcatcactggggccgcgagctgatggcgctcggccacgacgtgcggctgatgccgcctgcctatgtgaagccgtacgtgaagcgcgggaagaccgatgctgccgacgcagaggcgatctgcgaggcggtgacccggccgacaatgcggtttgtggcggtgaagacgcccgaacagcaagccgtgctgatgcttcacaagacgcgcgacctgctcgtccggcagcggactgggctcatcaatgcgttgcgcgcccacctcgctgagtatggcatcatcagcggcaaggggccgggcggggtcaacgtgctgatgaaggtgctgcacgaggcgcaggagcggctaccggcgcacgcgcgatcggccctccacacgatcggatcgcagcttcgcgcgcttgccagtgaggtgcagcggcttgaggcccagatccttgcctggcaccgatccgatgctgcgagcacccggctcgccaccattcccggcatcggtccgatcaccgcgtcggccatcgccgcggccgtgccggacgcgaccatgttccgatccgggcggcagttcgcggcgtggctcggcctcacgccgcgaccgcacagctcaggcggcaaggagaagctgggcggcatcagtaagcagggcgacggctatctacggcgcctgctggtggtcggcgccacggcggtgatgcgcatggcgcgcaaagatgcggcccggcagccatgggctgcccagctgctcacgcgcaagcccgtgaagatcgccacagtggcgctcgccaacaagacagcgcgggtcgcttgggccgtgatggcgcgccacgaggtctacgcggcagctgccgcgtgatcgccatcctcgccgcacgctgagctgcggcggggtggtgtagagggtagctcggcatgatgacagaccggtcagaccggggatcgcacaaacccaggggagcagagcgcttcgagcgcgatgacgtgattagggatgcggtccgcggagttcatcagggccagcagccatgcggtgctgcgcgaacaggccgaacacatggatgcacccgaccggtgctcatcacgctgcagataccccttgcaccgcaggggccgtccacaca

SEQ ID NO: 859 - DNA, 1377 bp, unidentified
  source 1..1377: mol_type = unassigned DNA; note = element_0e033c8
  misc_feature 1..2: note = core
  misc_feature 3..206: note = LE
  misc_feature 207..1193: note = CDS
  misc_feature 1194..1377: note = RE
  misc_feature 13..192: note = bridgeRNA
cttgtatgtaatcaacgagcgatgattagctaccatcgcatgaagcggagagaacctaccccatcatctaaggtaataaccttcgtcaacagctatagtcctctgcttcacctttcacgccagcattaacattgaacggttgccaagagctaagactctgcatgaacaagacaaattggcgtgatggttatgtgaaaggagaaaaaatgccaatgtatcaattaggtattgatgtcagtaaaaacactcttgatctatgtctcttacgggagggcatcaaagggaggatcaaaactcgtaagctaaaaaataccgctgatgcggctaaagtcgtgacagagtggcttaagaagcaatcctgtgaactgggcgaagttcatatcatcatggaagccactggggtatatcatgaaccgctggcttatggccttcactttgctggcgccagaatttctttagccaatcctcaccgtacaagggaatttgccagagggatgaatatcctgaccaagaatgacaaagtcgatgcctggatgctggcttgttatggctctcttaaagagcctgaggcatggactccaccaccggaatctgtgcggtatcttagagctcttttacgccgcagagacgctcttgttgcagatagcaccagagaaaaaaacagacttgaaaaatctgtttttacagacagccctgatgccgtcagggcatcaattgaacacatgcttcaggagctgaacaatgagatcgaacatcttgatgtcctgatccaggaacatattgaacctcacccggaactaaaccaggatttcagactgttaacatcaataaaatctgttggttatctgctgggattaaatatgctggcgatactcaaaagccattcattcgaatcagcagagcaggcagcagcattccttggtgtagttccggtagaaaggagatctggcacatctgtaaagggaaaacctaaattatctaaaattggaccaccagagataagaacaaaactttatcttgcagctttatgtgggctgaggttcaaccctgtaatgaaacagatgtatacgaagttatgccagaggggaaagtcaaagatgtgtgctattggagcattaatgcgaaaacttgtgcactggtgctatggtgtgctgaaaacgcagttaccattcgatgctgaatacaatcaataaaatcattataaaacaacatggtaagcaataacaccggagcaatgctgaagcaacatgtttgtatcttttaccttctttcatggtatctaactgagcatctgctcttttataaaaactcagagaaaatttctcctgaagatggaatgttcaaacatcacataattttcttgactaaacacggtag

SEQ ID NO: 860 - DNA, 1393 bp, unidentified
  source 1..1393: mol_type = unassigned DNA; note = element_0e05277
  misc_feature 1..2: note = core
  misc_feature 3..209: note = LE
  misc_feature 210..1220: note = CDS
  misc_feature 1221..1393: note = RE
  misc_feature 13..192: note = bridgeRNA
cttgtatgtaataacagtgtggtggttagctaccagcacatgaggcggagtgagtcagtaactatccttaaggctatgaccttcggtgtcagctaaaaccctccgcttcacctttcacgccagcattaacattgaacggttgccaagagcgatgactctgcatgtacaagggtaataggcgtgatggttctgtgaaaggagaaatggctatgtttcagttaggtattgatgtcagcaagaaaaccctggatttgtgtctgctgcgggaaggggtgaaaggcagagtaaaaacccgcaagcttaaaaacgatttcaatgctgtcggtactgtagtcagctggctccgcaaacaacactgcgaaccgggtgatgttcatataatcatggaggccaccggcgtttaccatgaatcactggcttacggtctgcacgatgccggagcaaaagtatcactgtccaatcctcatcgcagcagggcatttgcccggggcatggatattctgacgaaaaatgacaaggtggatgcttatatgctggcctgctacggggcgcttaaagagcctgagccgtgggaaccaccaccagagaatgtccgctatctcagtgcgcttctgcgtcgccgcgatgcgcttgttacagacagtagccgcgaaaaaaacagactggaaaaatgtcgggcaacagatactcccgctgctgttgctgaatccatcgaaaacgtgctgcgaaacctgagtgcagaactgcagcgcctggatacccttatacagggtcatctcggtcagcatcctgaattaaaaaaggattttgacctgctgacatcgataaaatccgtaggttttctgttgggtctgaatatgctggtcattctgcgttgccatcacttcgaaacagcagaacaggccgcggcctttctcggcgtagtgcctgttgaaaagaactcaggtacttcagtcagagggcgggggcggttgtcaaaaatcgggccgccagagattcgtgcaaaactctatctagcttcgttatgcggcatgagatttaacccgacgatgaaggcaatgtatgagcgattatgccagcgtggcaaggcaaaaatgtgtgccattggcgcactgatgcgaaaacttgttcactggtgctatggcgtactgaaaacacaaaaaacgttcgatgcaaaatacctcgtttctgatgagcatagcgcatgcaaggtgacatgatgcggtggttccatgtagcactggattcattaacgtaaatctgcggtagccgattagagaggtacctacgataaatcaaaagctaacgcaggcagtttgctgacagtccctcagtgcacaggaggctattcaccaaaagttgaaatctattttttcttgacttaacacggtag

SEQ ID NO: 861 - DNA, 1280 bp, unidentified
  source 1..1280: mol_type = unassigned DNA; note = element_0e1d2b5
  misc_feature 1: note = core
  misc_feature 2..195: note = LE
  misc_feature 196..1158: note = CDS
  misc_feature 1159..1280: note = RE
  misc_feature 30..199: note = bridgeRNA
ttgtatgacgggaaaagagcattgtgaggggcgacgggggttcggtcatgaccgtcttcctgtcgcgaccggaagcccgcggccgtttcggatagcaaaccgcgagtgagcttggagctccggtcgcttcttccatacccgaacagttgccggggcacgagcccgcatcagcaagaaagggatacgaagatggcaatgctttcttttggcggtatcgatgtgtcgaaggatcggctggacgtcatggtgttgcccgaagagcaatgctcttcggtgccgaacgacgccgccggctgggccaagctggtcgagcagttgcgcggcttctcgatctcggcggtcggcatcgaggcgagcggcggttacgagcgtggtgccgtgcgggcgttgctcgcggccggcatgtctgtgcgccaggtcaacccgttcaagctgcggcagttcgccagggccagtggagttctggcgaagaacgatccactcgatgcccgcatgatcgcgtcgttcatcgccatcatgccgacacgtccggcgcagcctcacgcgccggcggtcgaacggctggccgagatccttaccatgcgccgtcagctcagcgacgcgaaagtcgccgctgaaaatgcctccagactgctggaagatgcgatgctgcagcgtctttctcgccgccgcatcgctcggctcgccgccgatatcgacctgctcgatggacgcttggtcgagatcgtcatggccgatgccgcactcgttcgccgctaccagctgctcacctcgatgccgggggtcggcccggtcttggcttgcacgctgattgcgctcttgcctgagcttggccgcatgaaccgcaaacaggtcgcagctctggttggccttgcgccctacgccttcgacagcggcaagctcaaaggagctcgctgcatctggggcggtcgcgcgtccatccgacgcgtgctctacatggcggctctgatcgccatgcgttgcaatcctgcgctcaaagctttccacaatcgcctcgcggccaccggaaagaagccgaaggtcgtcatcgtggcggtgatgcgtaagatgatcattacgctcaacgcaatgctccgcaacgagacgccgtgggtcgaccgctccagcggtcggcacagcgtgctgaccgcacggtagccgctgcgctgatcgattgagccgagtcaaggtcgcagccgcgcgcagcgcgggggcgcgaagcgccagccttgacgcggccaaatcgatcagcgatccccctgcgacacgatgacagttgc

SEQ ID NO: 862 - DNA, 1427 bp, unidentified
  source 1..1427: mol_type = unassigned DNA; note = element_0e1f539
  misc_feature 1..2: note = core
  misc_feature 3..220: note = LE
  misc_feature 221..1411: note = CDS
  misc_feature 1412..1427: note = RE
ctgacataactcctcgttgagggcccgatgatgtttcggactctcgcggggagaccggtattcggctatccggcagatgaccgttgcagctagatgccggccctcgccctccgtctcggaacggtgatcgggatccggcggcttgtgaccggtgatcggacgcgtcagccaacgtcgagcggagcgtgcggggaccccctgagcagagcaggaggtcaaggtggcgacgatcggcatcgacatcggcgggcacacgcacgtcgcggcccgctgccgcgacggtcaggctcaggcggagcgcaagatcctgcgtgtgagccagagccgggcaggtttcatctctctcgacgcctggcttgctgctgagccggagccgatcgagctagtcgtcatggagtcgtcgggccactactggatgccgcttgcggcgcatttgcgtcggtccggcgtcccggtggcagtggtcaatccgctcgcagcgcgctactttgcgaaaagccggctcgaacgcaccaagtccgatccggccgatgccaggagcctcgccgagatggccatgcgcgacagcccaccagcacgagatccactcgccggtgtcgagctgcgccaggcggcccgcttcgcgatgaccctggtcaccgaacaggccaaggtctgccagaagctgtatcgcctggtcgagcttggcttccccgagctgcgcgaactgttcgaggacccgacgtgccgaacggcgcgagcggtgctccgacttgctccgactgccactgctgcgacccgtcggcgaacatccaccctcgccaacgctaatggaggcgccggacatcgtcgtcttggccaggccaaggccgaacgcctcgtggccgccgccgcagactcaatcgccgtgccggagctcgacgccgaggtgagctttgaggttggcctcctgctcgaccagttcgatcttctcgagcgccagatcgaggcggccgaagctcgcgtcggcgaacttctcgatggcaaactcgcacggcggctgagaaccatcccaggcgtcggaccggcgatcgtcgcgacgctcatcgccgagatcggcgacatcttccggttcgacgacttcgaccaactgcttgccttcgcgggtgtccatccggccgagcgaagctcaggccgcaagggcgtcagccccgagaccagctggcacatgtccaaggcaggcaacagctacctgcgagcggccgcctatcggatggctgtcgtgggagtccagcacaatccggtcatcgccgcccactacgctcgcaagcgcgccgccggcaagagcccgatgaacgccctcggccattgcatgcgcaaagctctctcgatcgtctggggagtctggcgaaacggtcaggacttcgaccccaactggggactcgaggcttgacaaggcgctatgggat

SEQ ID NO: 863 - DNA, 1493 bp, unidentified
  source 1..1493: mol_type = unassigned DNA; note = element_0e2671c
  misc_feature 1..2: note = core
  misc_feature 3..231: note = LE
  misc_feature 232..1446: note = CDS
  misc_feature 1447..1493: note = RE
  misc_feature 12..197: note = bridgeRNA
tccatacctttcttcctgggttgatcgcggtcattcgtaagatcgggacacccagggatgccgggtgtggctgtcatgaggttgctgcgttcgtggcttggaaggattggccgcccggcatcccgcgacgactcgactgctgattgggatgcgcgaaccgaatcgctcgtatggacgtgacagcgaggtcgtctgccgggacagcacagaagaacgacgaaggagggtccggtgcccgaactgtgggcggggacggacgcggggaaggccgaacaccactgcaccgcgatcgacgcggacggcaccaaggtgctctcgcgtcgggttccgaacagcgaagacgagctgctgcaactgctcggtgacgtcctgaacctggccgacggcgaccctgtcacctgggcggtcgacctcaacgccggcggcgccgcgctgtggatcaccctgctggtcaaccacggccagcggctgttctacatccccggccgcaccgtccaccatgcctccggctcctaccgcggcagcgggaagacggacgcgaaggacgccttcgtcatcgccgatcaggcccgcatgcggcgcgacctgcaacctctccaggagaccagcgagatcgcggtcgacctgaagatcctcaccgcacgacgcctggacctgtccgcggaccgcacccgcgcgatcaaccggctccgcgcgcagatgctggagtacttccccgccctggagcgggccttcgactacagcacatccaaggccgcgctcatcctgctcaccggctaccgaacgcctgccgccctgcgccggatcggccgagcccggctggccacctggctgaagaaccacggcgtccgcaccgtcaacgtcgccaagagcgccgccgatgcggcggtcaccgctgccgaggcccagttcaccgttgtccccggggagaagaccgccgcgacgatggtccacacgctggccagggaggtgatcgccctcgatcaggagatcgcagaactcgaagtcctcatcgagggccggtttcgcgagcatcccgacgcagaggtgatcaccagcatgcccggcgtcggtgacatgctcggtgccgagttcattgccgcgaccggcggcgacatgtcggccttcggcagctccgacaggctcgccggtgtcgccggactcgccccggtgccacgcgactcgggcagggtcagcggcaacctgcgcagaccaagtcgctacagccggcgcctgctgaggatgttctatctctccgcccaggtcgccgccctgcactgcccacagtccaaaaccttctaccagcgcaaacgcgccgagggaaagtctcacaagcaggccgtcctcgcgttggccagacgccgcctgaacgtgctctgggccctgatacgcgaccaccgcaccttcgaggccgtcacccccagccatgccgtcacagcggcatgacccagtcacaagacgtcaccgcccggacttgacatcatgattgggaa

SEQ ID NO: 864 - DNA, 1578 bp, unidentified
  source 1..1578: mol_type = unassigned DNA; note = element_0e29e7c
  misc_feature 1..2: note = core
  misc_feature 3..294: note = LE
  misc_feature 295..1518: note = CDS
  misc_feature 1519..1578: note = RE
  misc_feature 39..270: note = bridgeRNA
cttgtacaatagagtcgtacagggtggtttaaatgtcaagcacgatctttgaaaaccacataggaatatcggttaatactggctaactattctcgtaggcagggggcttcgaccactagccctgggaagcaaagctgtctcgagggtagagaatgaagcccctcccatacgagtggactcgaatgagcacgttgttgatacagcttgctgtatgctacgagttatgcgcaaggttgagtttcgtatgggttagcgggcaccctgccgaattaaaccaacagggggtagggagctatgttttactgtggtatcgacatcgctaaacaccgccacgagttatgtctgctggagcaagacggtacccagattttaagcatgcactttgacaacagccaaaaaggtttaagcaagctacttgacgctttaagcacttttgaggttaaacctgataatatcctgttctgcctggaggctaccggtcattactggctcgccctatactgtcatcttcaggagcttagctttgaggtgcgggttattaaccctctgcaatccgatgccttacgcaatctttacatgcgtaaagcgaagactgacaaaaaggatgctttcattttagcagacctgatcaggatcggtcgggcgcctgttactaagctggcaactgaaaaatttttgaaactgcagactttgtcaagattgcgccttgagtttgtccatcaaatcggcgggttgaaaagcagggtcctgggaatcttggatcgcatttttccagaatatccggagtgtttctctgatgtttttatccgtacctccagggaactgctcaaagaatacccagaaccggagttattggccgaagcagacctttcagagttaactgctttcttaaagcagcattctaagggcaggctagaccggcaacgagcggagcagattcaggatttagcccgcggtactttcggtatccgtctggctctcgatgctttcactttagaactgaagctcttagttgagcagatcgagttcatcgaagagcaggtcaacatccttgaagaagctcttttccaagtcttggaggagttcaggacaaatcctgaacaaccttatcgccatgtattagagaccattcccgggatcggtcctgtcctcgctgcggcaattatcggtgaagttggcgatatctcccggttccctaatgctaaggctttggttgcttatgccggacttgatgcaactgttagagcatccgggcagtttgaaggaaccagaaaccgaatgtctaaaaggggctcccccgttttgcgcaatagcctctggatggccgctgtcaccgcccggcgttttaacccggaactaaaagcttactatgaagcaaaaaaaactgagggcaagcattcaggtgtagctaccggagcggtggccaggcgaatggtacacttgatttactccatctggaaggataatcggccgtttgaacccgattacaaatggtctcctcccggtagtgattgttagccagaatcctatgtgattatcaaagaacaaaatatttttacttgacttttcatagcacgt

SEQ ID NO: 865 - DNA, 1632 bp, unidentified
  source 1..1632: mol_type = unassigned DNA; note = element_0e2ccd1
  misc_feature 1: note = core
  misc_feature 2..241: note = LE
  misc_feature 242..1459: note = CDS
  misc_feature 1460..1632: note = RE
tcgtataatacatttatcaatcaaagtttaaaatattgattgaagttctatgaaactcatagctctcacaaaggctaataataaacaagtttttttccttttaggatttaaatacctacatataaaacgtcttgtgttagctttattaaatcatctataggatgctcgggagaaaaatattttctacctgttataacacgaagctatgagattttaaactatcacattatggaggattattatgtattatgttggagttgatattgcaaaagaaaaacactatgtttgtattttagatgatactaaagagttagcttgcaaacctttttggatttatagtgatatattaggattaagagaactactcaaacgattagctgaactatcattagatatgaatgactttattattggtatagaatcaactggagcatttagtgaaaatttctatagttatattactgatgctgattataaagtgatacttttaaattcttatcaaacttctaagtatagagatttctctactcttaaaaagattaaaaatgattcaattgatgcttatgttattgctgaattacttgctagtggtaaatacaaagctagttatattagcaatgaagattatcacaatttaaaagttttaaatcgattaaaaaaatcattagatgataaaataaaaactattaaaagagagatatcaactgttgttgctactgttaatccagagattgaaaaagtatttccaaatatctttacaaaatctgctttagcgatcattaaatcttacccaaccgcaatggatatttcaaaagctacgccagaaaagttgactagactatttcgacatatcaaaggtaacaactttagtgaagacaaagcggagtatttaatctctcttgctaaaacttctatttatacaggtcgtgcaaatgaatctagagctttaatgatcaagactaatattaagatattagagctttatattcaagaaagagatgaagttgaagaacaaattcaaattcttatagacaatcaacttgatgatgattcaagtaatattgaaaatcttaaatcaattcctggagtatctaataaaactgttacagcaatattaggagaatgtggcgatttaagaagatttgaatcagctaaagctttcataggttttttagggttctatccaactttatatcaatcaggcaaatctttatcaactggaactttagctaaaagaggaataccaatagccaaacatgctctttatatggcagcagtatcatctgtaagacacaatactgaactaaataaactatttagagataaattatcagctggtaagtcaaaaaaagaagctttaataattattgctaaaaaattagcatcaattatatattcactttttaaatataaccaagcatataatccatatagagtactaatccaacataaaaagtaaacttgttagtttaacacttgtgagaacaatgagttttcatagaactttgaccaaaatgtattattatttttaaatttgatcatttgaacatttcaaaaaatgctcaaaaaatcaaaccataaagcacgccttaaaaaatagcctagtcgtttaagctattctttataggatgg

SEQ ID NO: 866 - DNA, 1207 bp, unidentified
  source 1..1207: mol_type = unassigned DNA; note = element_0e3cef1
  misc_feature 1..4: note = core
  misc_feature 5..209: note = LE
  misc_feature 210..1181: note = CDS
  misc_feature 1182..1207: note = RE
  misc_feature 34..197: note = bridgeRNA
tcatcctatgcttgttgtcgttaggtttctaattaataatcctagcacaaaggcaggacacactatcaatagtcatgcgtagttagataccgtctgggatgtaagtacctgcctttatttacgagagaaaagctgaacagttcgagaggtattctaacctgcatttaggattgcgagctaagatctcaatattaaataagaggcttcagatgaaaaaatttgtcggtattgatatttccaaaaaaacatttgatatttattttgagcaagaaggtaacggctcccatgttaaattaaatcaaacagcagaggattataaaatcttacttcatttgattgaccatgacgccatttgtgtcatggaagcaacaggaaattatcacttaaaattagcagactaccttcaccaatccggtataaaagtagtcgctgaaaatccgttgaaaataaaacgattttcgcaaatgagtttacaaagaaccaaagcagataaagcggatgccaagctaattcatgaatatggccggttgattttatcatcgacagggcctcacttttggcagcctgatgtagcagaaataggtcatttaaaacaatatgataccgttcgacatcaacttataaagcaacgaacagccttaaataatagtgaagaggctttaaccgctttaacgaacctaaatgaagaagtgacgagcgtcttacaggatatggttcctgccatagagaaagcaataaaacagcttgataaaggcatgctcaagctagttaaagcacatcatgcagaaacatttgagttggtgaccagtgtaccgggagtgggtgccaaaacagccactatgatgatttgtttaaccgatggttttaaaaaattcacgcctgcgcatgtaaaacaatttatcagttacatcgggatgagcccacgaacatttgagtcaggaaccagtgttaaagggcgctctcatatcagtaaagtaggtaatagtcgacttcgctcaatgttgtatatgtgcagttggacagccaaaagaagcaatcaacagtgcgcggcattatatgaacgattacatgaaaaaggaaagcctgaaaaagtgattaaagtagccatatcccataagctaattcgccaaatttttggggtaattaaaacaggaattcctttttcaaatgaattcgcttgatgtaaatgcttgacttgaagcacagt

SEQ ID NO: 867 - DNA, 1613 bp, unidentified
  source 1..1613: mol_type = unassigned DNA; note = element_0e42b0a
  misc_feature 1..3: note = core
  misc_feature 4..280: note = LE
  misc_feature 281..1369: note = CDS
  misc_feature 1370..1613: note = RE
tcttgtataatataaacatataatatagtttataagtttatattaaatcctttctttatttttttatataagcataataaattatgttataatttaactgtactgtggatttgtttctgtttttatacagctttgactgttcgaggagactctcaccacagtttttattttattgtcaatagttagttaacactttgatgttttataggcaaggatacattgtaaaaactgcatggatcatacccagtacaacaaatttattaacaaggaggtacgataaatgtacttaatcggtattgacatttccaaatttaaacatgactgtttcatcgctactgaaactggtcaagttgtaaaaagttctttttcttttgataataatcaagaaggattcaatcaactattaactgtgttattatcattagatcattctcaacaaataagaattggtcttgaagctacaggacattatggcaccaatttaaaattatttcttcatgaacacaatttttcatttatggaatttaatcctattctaagtgaccgattccgacaagtttcttcacttagaaaaactaaaaatgataaaattgatgctaaattaatttctcaaatgcttttgtcctttgactacaagcccaattcattattatcatatcacatttcaaaattaaaatcacttacaaggttcagaaaaaaattggttaaagattgtactatttataaagaacgtttaattaacattttagatttagtttttcctgaatattctaactattttactcaagtttggggtaaagtatcgttatatattcttaagaactatccaactattcaagatatagctaatattaatgttgaaagtgttttgcctattattaaagccctttctagaggccattattcaatgccaaaattaattaaattaattgaagctgctaaagtatcaattggatgtaaaaatgattctcatactttagaacttaaattaactattaatttaattgaacaaatgaattatgctattgaaaatgttgaaaacgaaataactattattatgaataaatataatttcaaaacggctactattcctggcattggaatcattagtgctgcttctattgtttcggagtttaatgatttttctaatttcaatagcagtaaccaattattatcttttgctggattagaaccttcgatttatgaatcaggtactcaaactacatatggtcatttagttaaacgtggttcttcttatttacgtgaaacattaatgaatgtggcaccttttgtaatgaactataataacgttttttaccaatattacttaaaaaaagaaatgaaggcaaacaccatagagtggctttaacacatttagttaaaaaacttcttagggtaatttattacctagaaactaatgccgttccttttgattcttctaaacttaaataatttatattgtagcgaataataaattattaatatatcagtttttaacattttttctataaaaagacagtcatttaatcgtttcgagagtgacatcccctttcacgctctggtctctcttttttacaaaaaaattatcatttatcttgactattaatagttag

SEQ ID NO: 868 - DNA, 1365 bp, unidentified
  source 1..1365: mol_type = unassigned DNA; note = element_0e45074
  misc_feature 1..2: note = core
  misc_feature 3..236: note = LE
  misc_feature 237..1121: note = CDS
  misc_feature 1122..1365: note = RE
  misc_feature 1129..1352: note = bridgeRNA
cgatgggatggaaggctcccgctccgccggtgctaggttggcatcggttaggatggacaaacagggagcgttcgaatggaagagatttctactgtcggcatcgaccttgcgaagtcggtgtttcaggttcatgcgattgatgccgccggcaatgttatcgtccggcgacagttgcgacgccagcagatgttgaagttcttcgagcagctggagccttgcttgattgggatggaggcgtgcggcactgcccactactggagcgcgagctttcggcccttggacacgatgtgcggctgatgccgccggcctatgtgaaaccctatgtcaagcggcagaagaacgatgtcgcggatgctgaggcgatctgtgaggccgtgatgcgcccgacgatgcgtttcgtgccgatcaaatcggtagagcagcagtcagcagcgatgttgcatagatcgagagcgctactggttaagcagcggacgatgctcatgcattcgatccgctctcatctcgcggagctcggcatttctaccggagccgggatcagtcaaatcgcccgtgtcgtccgggaacttgcgcaaggcgaacgttccgagctgcccgagcttgcccggtttgtcctcgaagcactggccaggctggtctgtgacctggctcagcgacttcaggcgatcgagaagaagctgatctcctggcattaccgaaacgatctctcgaaccggctggaaaccatccccggggtaggattcgtcacggcgtcggcgctcgcttcgatcgttcctgacgcggaggttttcagttcaggtcggcatttcgctgcctggcttggcttggtgccgagacagaactcctcgggaggcaagtcgcgcctcggccgtatcagcaagcaaggaaatcgatatatccggcagctgctgatcctcggtgcgacatcggtgctgcgatacgttcgccgcgacggagacggagggtcgagttgggttagcggtctgctgcggcgtcggccgccgaaggttgtcgccgttgctcttgccaacaagatggcccgcatcgcatggtcgatcatgcggcgtggcggtgagtacgaaatcaatgaactgagagcggtgcagcacaccagcagctgaggccgttcgaggtatgaggcgaaagaggtaagtgaaggcagcaactcgatcccaaggatcagccgaacccgtttagcgtagcggacctcaaagtccgtctaatcgattgggggcataatcctggcggaacccttcaaggccagcagtcgaaagatggctgcatcaaaggccggacacacgactgcactcgagatgcgctgcacgaccgaaccaaattcccctcaacgcgggagccttccacaca

SEQ ID NO: 869 - DNA, 1411 bp, unidentified
  source 1..1411: mol_type = unassigned DNA; note = element_0e46636
  misc_feature 1..2: note = core
  misc_feature 3..151: note = LE
  misc_feature 152..1411: note = CDS
ctcctaccattaattcctgtataactatcatataagcaggtaagattgccccaagaaaggcagggggacttgctgcttcctgggtcgtccgaacccttattttcagtctgtcccctgtctcttggagccatgataagttgattgggccataatgagcccttgtcactatggaggattggccggaggcatccctgtttttcttataataccacgggaggtgttcgttatgaactgttttgttggaatcgatgtatcgaaagaaaagtttgatgcttgctgcatagacgaacagggagagaagatattctccttcatgtgctccatggacaggggagggtttgaaaagttcatcgttcgtttgcccatggacaagacatcgttcctcctgggcatggaatccaccgcatcctaccacattgctcttttttcttaccttaccgcgcagggatacaatgtggtcattatcaacccccttctcatctctaacttcgcgaaacgttccctgaggaagacaaagaccgataaaaaggatgcccatactattgccagattcttaatgcacgagaaagggtccttcactgtgcaggccattgactacctcatggcagaactcaaagatcttgccagaagaagggaaaggctcgtcgatcacgtaacgtcactaaaaactgacatgaagaggatcctatctgtcacgttcccggagctcgaacgtatcaccggggtcttcacccaatcatcacttcgtcttttagtcgagtatccttctgcccatgccatgcgggaggccgatagatcccgtatagcagatatatttataaccggatccaggggcagaaaatcccatgcttctgtcaaaaagcttatagccacggcggaaatatccgtcggtgcggtgagccgggcaaaagagctaatcttaaaacaggaagcttcattgcttctctatatgcaggatcagatgaaggagacaacaaaactgattatgggccttttgaacgaaaagatgaaacaggacatggagattctctgttccatgaagggagtcggggagaaaacggcgatgaactttttaatcgagatggggggcgacgttgaaatgtatgagaacgataagaagttgatcgcagcttctggccttgatccttcgacctaccaatcgggtaaatacgaaggaaaaagcaggataagcaagcgagggaaccgacatctaagaagagtgatctggctcatggcgacgagggtaatcatcagcaataatatcttcaggacttacttctataaaaggaggaaagaagggctgccgtacaaaaaagcagtcctcgctacggcccataaacttattcgtatcatttttgttatgctaagccgtaaaacatattttgttgaaggaggaattaaatatagttga

SEQ ID NO: 870 - DNA, 1327 bp, unidentified
  source 1..1327: mol_type = unassigned DNA; note = element_0e4ce8d
  misc_feature 1..2: note = core
  misc_feature 3..74: note = LE
  misc_feature 75..1109: note = CDS
  misc_feature 1110..1327: note = RE
  misc_feature 1094..1309: note = bridgeRNA
agatgtatggactccctccccacaggggggttatggtcttaatccgacgaaagattagccaaaggagtccatacatgcgcaatcctaatatattggccattgatttagcaaagaacgtctttcaagtttgcaaaaccgattcacaaggtaacgtcgtttttaatcgggaagtcacccggttgaagctcaaagcgctcctttgtaagcagcaatcctccttggttgccatggaggcgtgtgcgagtgcccattattgggcccgatacgcacgagacttggggcatcaagtgaaagtcattagtgctcgaagtgtgaaggcttttcaaaccaaacaaaaaaccgataaaaacgatgcgcttgccatcgcaacagcggcctctttacagcatattcatagtgttaaaattcataccgtcgaagagcaggcgttacaagccttagagagggctaggcatttggccttggcgcaacaagttgcccaaagtaatcaaattcggggtttgctgtccgagtttggtattgtcatcgctcaagggatgtcagcactgagggtcaatatccctctcgttcttgaagatgcagagaatagcctaccggatagctttcgtgctgtcttacatcgattgtgggcacagttaaatgtgcaaatagaacatgtcgatatgctcactaagcaattggagttatcagtcaacacagacccggtttgtcagcagctgatgaagttggaaggtgttgggccactcggtgcgttggggctggctttacgtttagggaaaggggaaaactttactaacgggagagaggcttcagcgaacatcggcctgacgccaaagcaacatagctctggtggcaaagaacgtattggtcatatctcgaaaagaaatgcagataagcgactccgaagtatcctttttcaaggagcgctttccgttatctccaacgtcattaagcggcctgcaaggacgacaaaagaacaatggctaaaaacactgatagagcggagaggtaaaaaagttgctgccattgctttagccaataaaacagtcagaacggcgtatgcgttactgaaaagcaattcggtgtatcagccacaacttctggcttaatcaccagcaatattcaacaaagagcgatgtaaaacaggtaagaccaaccaacagcagctcgttaggtcctaaggcatgaaatgccgtctcctagattaagcctgttggtgcgaatacatttttgggcgaggtagctcctcattacagcccgtatataagcgcgcatcttaatccgttttacaaaagcttcttgttgaatcaccgagggagtccatata

SEQ ID NO: 871 - DNA, 1503 bp, unidentified
  source 1..1503: mol_type = unassigned DNA; note = element_0e5676c
  misc_feature 1..2: note = core
  misc_feature 3..252: note = LE
  misc_feature 253..1482: note = CDS
  misc_feature 1483..1503: note = RE
  misc_feature 14..254: note = bridgeRNA
ctaatgattcctgggagtaggtcatccggcagactcctgggttgacagccgccgatgagtgagcactgagccggcctggaccgcgtggtgcgagtcctggtgaaagatcgttgcccttgtcggtcggccgggagagttgatcgctgatgggatgtcgtgcccgtccaagctgggcgtgagcaccgattcattaggtcgctggtagctctcccgcaggctggcgaaatagcggtgtcggaccaaggagggacgttgcgactgttcatcggggatgactgggctgaggaccatcacgacgtggagctgatggacgaacgcggcaagcgactggccaaggcgcgagtcgctgaaggcgtggccgggatcgccaagctgcacgcgatggttgccgagcaacttggcgagcggcccgaggacgacgacaccgaagtcgtggtcgggatcgagaccgaccgtggaccgtgggtgggcgcgctgctggccgccggctacacggtgttggcggtgaatccactggtagcggcccgctaccgggaacgccgtgcggtgtcgggggcgaagagcgacgccgcggacgcgcacatgctcgccgacatggtccgcaccgacggccaccagctgcggcccgtggccggggacagcgacctggccgaggccgtcaaggttgtcagccgcgcgcacaagaccctgatctgggaacgcacccggcacacccagcggctacggcacgctctgcgggactacttccccgcagcgttggctgccttcggcgacctggacgcccccgatagcctggaactgctggccaaggccccggatccggcatcggcggcccgcctgtcccggtcacagatcgccgccgcgctcaaacgagcccggcgccgcgacgtcgaggccaaggccgagcgcatccaggccgccctgcgcgcaccgcacctggggcagccgcaggcagtgaccgctgcctacgccgccagcgtccgtgccctcaccgcagtcctcaccgtcgtcgatgcccaggtcaatgctctgcaatacgaggtcggagcgcattttggccagcacccggccgctaagatcgttatctcccagcccgggctgggaccgatcgtcggcgcccgggtgctcgcagagttcggcgacgacccacaccgctacgccagcgccaaagcccgcaaggactacgccgccaccagcccgatcaccatcgcctccggcaagaaaaaggtggtcattgcccgccacgtccacaacgaccgcctcatcgacgcgctgatgttccaggcctccaaggccatcaacgtctcaccaggagcccgcgcctactacgacaagcaacgtgcccgcggcgccggctacaacgccgcactgcgccaggtcgccaaccggctcgtcggcatcctgcacggctgcctgaaaacctgcaccctctacgacgaaaccaccgcctgggcaaaccaccccaaaccagctaccacttgacacccctaactccagggatgt

SEQ ID NO: 872 - DNA, 1329 bp, unidentified
  source 1..1329: mol_type = unassigned DNA; note = element_0e586ba
  misc_feature 1..3: note = core
  misc_feature 4..69: note = LE
  misc_feature 70..1104: note = CDS
  misc_feature 1105..1329: note = RE
  misc_feature 1114..1309: note = bridgeRNA
cgatgtatggaatccactcatcttctgccaaacttaagtatcagtggcaatattaaaatggggtacatcatgctaaaaacgaatattatcggaattgatttagcaaaaaatgttctgcaagtctgccatatcagcactcatggagaattgctcagtaacaaagcggtgagtagacagaagttgaaagagttaatcgcaaagtcaaaaccatcgttagtcgcttttgaaggctgtgcgggctgccactactgggggcgatatgcagaatcttttggccatgaagtcaggatcattaatccgaaaaaggttaaagcctatgtcgatggacataaaaccgatgcaaatgatgcacttgctatcgcaaatgcatcactccaaattggcattaaatatagcaaacctaaatctgtagatcagcaaaccctaatgtcaattgaatcaagccgtcagtttttatcgaagaccgtagtatcattagggttacatatacgaagtctcatccatgaatacggtatgattgcagcgaaaggccccaaaggcttagctgaactggtaacaacagctttagataatgaacagagtaatctacctgcaagtgtatccatagtgctagcgaagttatggcaacaatatctccaaatcaagcaagagctagatgatcttcagaaatccatgaatgcgaccactcgacaaatagaaccttgtaaaatacttatggagcttgagggagttggagaaacaacagcgtccatgctttatgcaacattaggtaatggaagtcagtttgttaacggtcggcaagcatcggcttttgttggagtgacacccaaacaatacagttcaggtggtaaagtaacaatggttggtattgataaagttggcggtgtcaaagaccttcgctcaatgctatatcttggcgcgatggcatatatttatcgattgccggagcaacctaaaacgctgaagcaggattggttaattaaactcgtgaatagagttggatttaaacgggcttgtattgcattagcaaacaaaactgtcagaacggcttgggcaatgctgcgcaacgaaacaaagtatcaaccacaaactctattgtattagtctgaaaattttaagtttacaaataatgatgttcaatggttagaccaacctactggaaacctgactacttcgcaacgctataaaaagcttctttcgcgacaaggacggtaggtgcgcatacatctatggttagaagttcgctccttcgacaaaaaccgaatatacgaccgcatcttatcttatccattaacatttttatcttgtaaagcccgtggattccatata

SEQ ID NO: 873 - DNA, 1383 bp, unidentified
  source 1..1383: mol_type = unassigned DNA; note = element_0e5f8de
  misc_feature 1..2: note = core
  misc_feature 3..84: note = LE
  misc_feature 85..1110: note = CDS
  misc_feature 1111..1383: note = RE
  misc_feature 1087..1370: note = bridgeRNA
tgatggcgtggatgcccccgaccaaccggcatcgtagtgtgccaatgtggtgtttcagaaagcatcaacaaagggagagtatccatgtcagaagtcgccataatcggcatagaccttgcaaagcgtgtgtttcaacttcacggggcttgcgccaatggaacagttgtttttcgtaaaaaactgacacgtattcagcgtcttgcgtttatgagccaacaatccgcctgcatcgttgcgatggaggcgtgtgcgactgcgcatagctggggccgccagttcgagaagcttggacataccgtgcgattgattgcaccaaactatgtgaagcctttcgtcaaacggcaaaaaaacgatgttgcggacgccgaagccatcgttgaagcggcatcacgaccgaccatgcggtttgtagaactcaagtccgaagcccagcaggcacgtgccatgctgtttcgcacacgacaaatgtttgtcggtcagcgcacccaaacaatcaacgcattgcgtggccatctagctgagcacggcgttgttgcaccacaaggcgctattcaggttaaacgtttggccgatgcggtaacggatgagaccgttggcttgccggcaggcgttcgagaactcgccaaagtatatatcgtccagattgaagacctcagtgctcagattgcagcattggatcgacagatgaagggtgccgccaaagaagctgaagcggcacgtcgtgcccagaccatgccgggcgtggggccaatcacggctttggccatagaaacctttgcgcctgacctgaactgctttcgccgaggtcgggattttgccgcatggctgggtttggttcccaagcagacctcgacgggcggcaggcctcgccttggtaagacatcaaaaatgggccagcgtgacattcgacggctgctgatatctggagcaatggctgttctgcaggccgttgagcgcttcggaaagccacataacggttggttaatctccatgttggaacgcaaaccccgtatgctggtcgccgttgcattagcgaataaaatggctcgcggcctgtgggccatggtgacgaaacaagaggactaccaaaacccggcgatgatggcgtgaacgcaatgcggcagaaatcaaaatccgggacttgagcgtgtgaggagatcgatgaacagtaagggaaaatgatcggaaagatccgaaccagacaaaacagttttactgcaggagccaatgagctcgatttgttgatctgtctttggttcgcgcatcgccataccggcccacggctgtattattcgccgcaacatgaggcctgatacatgaccgcatccgatcacacgcttaaaccgttcagaaatctcttgcaccaatgggggcatccataca

SEQ ID NO: 874 - DNA, 1500 bp, unidentified
  source 1..1500: mol_type = unassigned DNA; note = element_0e607d4
  misc_feature 1..2: note = core
  misc_feature 3..244: note = LE
  misc_feature 245..1480: note = CDS
  misc_feature 1481..1500: note = RE
  misc_feature 6..237: note = bridgeRNA
ctaatgagacttatcgggtcggccatccggcagactcggtacctggtggccgccggcaggtgagcactgtcccctcctgggccctggagcccctggtgacagatcgtgcccctgccggtgaccgggagagttgatcactgctgggatgtcgtgcccgccggtggcgtgagcactgcttcattaggtcgctgatggttctcccgcaggctgctgacatatttcgacatcgttgacgggagtgccggtgcggctgttcgtgggtgatgactgggcggaggaccatcacgacattgaggtgatggaccaggccgggaaggtgctggccaagcggcggctgcccgaaggcgtggccgggatgacgcagctgcacgagctgaccggccggttcctgccgggggacgcggcagatgcggaggtggtgatcgggatcgagaccgaccgcggcccgtgggtcgccgcgctggtggccgccgggtatgtcgtgtacccggtgaacccgctgcaggcctcgcggtaccgggagcggcacggggtctccggcgccaagagcgaccagggtgactcgcacatgctggccgacatggtgcgcaccgattcgcatcagctgcgcccggcggccggggacagccccgaagccggggccatcaaggtggtcgcgcggacgcataagacgctgatctgggagcggacccgggcggtgcagcggctgcggcaccagctgcgcgagtactttcccgccgcgctggaggcgttcgcggacctggacgcccctgatgtgctggagctgctggccagggcgccggacccgggccgggcggcgaagctcacccgcgcccaggtcgccgcggcgctcaagcgcgcccgccgccggaacatcaaggacaagaccgatgcgatcctggccgcgctgcgcggcgggcacctcggccagccggccgcgctgaccgccgcctacgcggccaccgcccggtccctgatcgccgtcatcaccaccctcgatgagcaggtcaagatcctggaagagcaggtgagggaccattttggccggcacccggacgctgagatctaccagtcccagcccggcctggcagccatcctcggcgcccgggtgctcggcgagttcggcgacgacccgcaccgctacgccgacggcaaggcccgcaagaactacggcggaaccagcccgatcacccgcgcctcgggaaagaagaaggccgtgacggcccggtggatccacaacgaccggctcctcgacgccctgatgtcctgggccttcgcgtcgctgaacgcctcgcccggcgcccgggccttctacgacgagctccgcgcccggggactcgaacacaatgacgccctgcggcggctggcgaaccgtctcgtcggcatcctgcacggatgcctcaagacccgcaccctctacgacgagaccatcgcctggggccaccgggaaaacctccctcaatcctccgtagccgcttgacacttaagctcctgggatgt

SEQ ID NO: 875 - DNA, 1483 bp, unidentified
  source 1..1483: mol_type = unassigned DNA; note = element_0e66052
  misc_feature 1..3: note = core
  misc_feature 4..122: note = LE
  misc_feature 123..1154: note = CDS
  misc_feature 1155..1483: note = RE
  misc_feature 1183..1363: note = bridgeRNA
aacatggagtaatcgcggcgcgaccgccctgccgttttggctggcgagggtggttgcccccgataagatggaaaaacgggctctcgattggaaccgggcccaaacatcggatggaggcaaccatggaccaatatattgggcttgatgtttcattgaaagatacggcgatctcggttcgggaagacgggaagcggatctggcgggggagatgtccttcggaccccaagcttcttgcagagatgatccgcaaaaacgccccgcacgcccggcgcgtcgtattcgagacggggccgttgtcgacgtggttctatcatgtgctgacgaccgagggggttcctgcgatctgcatagaagcgcggcacgcgcaaaaggtattgaacgagacgctcaacaaaaccgatgccaacgatgcggatggtttggctcaactcgctgacgcaggcttttacaaagcggttcgcgtcaagtcgtttgacgctatgatggcccgcgcgttggtggctgcccgcgaacaactcctgaacatctcaacacaacctggcaatcagatccgcggtctgatgaagacattcggtcttatcatccccaaaggagcgggtcgggtgtttgatggcaatgtgagaaggcttttggagggcaatgacgggctcgcaaagatcatcttgcctctgcttgaggcatggtacgatatgcgcaatcgagtggccggccttgatcgccagttgcttactgtcgcacgggagagccaggctacgaagctattgatgacaatcccaggcatcggcgctatcacggctgtatcctacgttacggcagttgaagatccagaaaacttccgaacgtcgcgctccgttggcgcctggcttgggttgacaacccggcgctaccagtcaggcgaggtcgattatgacggccatatctcgcgaagaggcgacaatcgtttgcgggggctgctttatgaagcggcaacagcgctcctgacgagaaccaatcccaggaccgagagcagtctcaagagttgggggcttaagctgcgtgagcggcttggcttcaaacgggccgctgtggccgtcgcccggaagctcgcggtcatcatgcacagcatgctcaagacgggagaagtgttcaacgcatcggctggcgccaccgtataggagacgctcagccttcgtccctcagcgcgccatctaacttttggtgctgagcgtccctgctgcggacgtgggcaggatcattccgctttcgctggctgcagctcgttgagactgcgcctcgaacattaggaagatcccacctgcgaagaccattgtgcggcgacatttgtcgaccgcggagacaaccctgctcccagcactggatagctctgaagacacggccggtgagggcagatttacccaatcagttttagccgtgttgcctgcgccgcaagccggcaaggtcgctggatgctcaaaccagcttgacggatggaatgcgattagac

SEQ ID NO: 876 - DNA, 1217 bp, unidentified
  source 1..1217: mol_type = unassigned DNA; note = element_0e6963a
  misc_feature 1..2: note = core
  misc_feature 3..219: note = LE
  misc_feature 220..1194: note = CDS
  misc_feature 1195..1217: note = RE
  misc_feature 12..192: note = bridgeRNA
cttgtatcttggccactgtagtgattagctatcgctacacgcggaccgatgagcgtgttcagacacctagagcctggactttgtctttaagattacgcctcggttccgcacctctgagccggctggacactggacggtagcctagggcattggaccctgtatgtacaaggcaagtgggcgcagcgggcttctttggtattggcaaaggagcttaggtttatgttttttctcggaattgacgtttctaaggcgaagctggattgcacgctgcttggcagtgacgccaacaaacgcaaagccaaggttgtacccaactcgatagcgggcgtgcagacgctgctgcagtggtgcgacaagcagggagccgagccggcgcagttgcacgccgtgcttgagcccacagggcaatatcacgagcaggccgccacggccctgcatgacgcttcagtcagtgtctcgttggtcaaccctgcccgggtgcgcgacttcgccggggcgctggcggtgcgctccaaaaccgatgggatcgatagctacgtgctggcccgctacggtcaggcgctcaagcctgagctgtggcgccccgcaccgctgcatgcccgtcaactacgggccttgttggctcggcgcgacgcgctggccaaggatctgcagcgcgaactcaatcgccaggagaagacgcagttcagtgattcgcccgtgctggttgagggatcgatcgccaaaacgatcgcgttcctgcgcgaagagatcaaacgcctggatcatgcgatcaatgaccacatcgaccgccacccggacctgaaggaggatcgggaactgctgaccagcatccccggcatcggggatcgagcggggaactcgatcctgtcgatcatgcataaccggcccatcaagtcagccgagggcttggcctcctacctgggggtggtgccggtgcaacgccagtccggcaccagtctgaacagccggccgcggctatctaaaacgggtcccagcacggtacgtgccaccctctacatggccgctatcgtcagcaagcgcttcaacccacacgttggtgcgctttacgcgcgactcttagcaactggaaagagcaaaatggccgcgctaggcgcggccatgagaaagctggtgcatctatgcttcggcgtgcttaaaactcggacaccgtatcggcccgactacgcctgaacgcttgacggtcaaaacggtat

SEQ ID NO: 877 - DNA, 1346 bp, unidentified
  source 1..1346: mol_type = unassigned DNA; note = element_0e6f476
  misc_feature 1..2: note = core
  misc_feature 3..75: note = LE
  misc_feature 76..1101: note = CDS
  misc_feature 1102..1346: note = RE
  misc_feature 1119..1343: note = bridgeRNA
atgaaatggctacccccgccgcctcctgtgatcgcccactaagctttcacagggggctcatcggagatcattgccatgaacaacgtagctattgccgccatcgatctgggaaaacactcctttcacgtgcatgcgcaagatgatcgtggccatgagctctaccgtaaaaaattcaatcgggtttcgctcatccagcacctggcgaacgtccccccttgcaccgtcgtgatggaagcctgtggcggcgcccattttatggcacaggaggtcgccaagctggggcatacgcccaagctcatcgcacctcatctcgtacgtccttacgtgaaaagcaacaagaacgacttcgctgatgccgaagcgatctgcgaggcggcgactcgtccgacgatgcgttttgtgccggtcaaaacccagtcccagcaagcgctggccatgtccaactcgatacgcgattcgttcatcaaagaccgcactgcaaccgccaatcgaattcacgccgctcttctggaggttggcatcagcctggcccccggtttcaaatcgatcaacacgctgccggcgctgcttgaagcgaactctatttctcagtccttcaaaaaaagcctggcgaccctgtatcgatacttcaagtatctggatgaagaggtcaagtcgcaggacaaggatgtggaacgccaggccgctgaagatgatctggcagcgcgcttgatgaccatgccgtgtgtcggcccgatcacctccaccgccctggctgccgagttgggcgacggcaggcagttcaaatgcggacgaaattattcagcctcgatcgggctggtgcccaaacaacacggcacgggcgacaagaccgtgctgctgggcatcagcaagcgcggcgatcgaaatcagaggcgcctgctcatccagtgcgcccgtgtttacgtgaggtacctggatcgccagaaaggctggctggcggactgggtccggcagcttttggctcatcatcactccaatcatgtggtctgcgcgctggccaacaagctggcgaggatcgcctgggcgattgcggcacatcacaccgaattcgatgcagggccaagcacgatgaacgcctgaccctgctgtcacccgagcaccacccacctggttttgcgatgctggataactgatgacgtgaacggccaaccggcctgacgacaaccctgggctcttacacggctgaaaggccgtcccgctaataaggatcgtcaggcatcgattctcatcgaggcgcgggggccaccccactcagacgccggatagatgaaagcaaaccaaacacgacatcaaaaacagtattgcagaaaagggggtaaccatag

SEQ ID NO: 878 - DNA, 1590 bp, unidentified
  source 1..1590: mol_type = unassigned DNA; note = element_0e700c2
  misc_feature 1..2: note = core
  misc_feature 3..404: note = LE
  misc_feature 405..1463: note = CDS
  misc_feature 1464..1590: note = RE
  misc_feature 11..259: note = bridgeRNA
ttagtaccataaatagtgtaagaaaggaagtaattcctatcttgcactatttttgtataatgaagaagtagtatgacgaggctcttttagggttgaaacatccgccattaaaactgtcaactaccttttcattattcatattcggttaagcaggttgggcaaaacgtccgtgtcacaagctaaaaagagtgtaatggtgcaggtagaagctacaaaataaacagaaagaaggaaaaataatgatatctgtaggaatagatatatcaaaagacaaaatcacagtttgtgcattagaacaaggaagtaaaataatttggaaaccatttgatgtttctttaaacaaaacataagtagaagaattaatagagaaactagaaaaattaaaagaagaagtaaaaataacaatggaagcaacaggaaaatatcatctactaatactttatgaattaaaagatagaggatactttgtagcagtaataaatccactaaagatgaaacaatattgccgagcattaaactttaggaaagcaaaaaatgacaagatagatgcaaaacaaatagcagaatatggactaatgtattggaaagacttagaagaacacaaagtagatgaagaaaactacagagtcttaaaagaattaaatagaaactaccaacattacatggatttaagaatcaatcaaatgaacttcatagatcaaacgatacatcaaacatttccaggaataaaaaaactaattacccatggttcaggagacttttcaaaagataaactattagactttttggaaaaatggtggcataaagacttaatattagaaaaaacagaagaagaatttgtagaagaatataaaacgtgggcaaaagaaaagagataccatccaaatgtaaataaagcaaaatccatttacaaattagcagaggatagtatctcaacacaaccttcccataactcaaaaatagaaacgaatatcagagaaggaataaacctgataaaacaaataaatcagattctaaatagcattttatcacaaatgatagaaatatccgagcccttagaagaatataaagaagcaaaaaaattctcaggaatatcagaaaaattagcagtacaaatagtagcagaatttggagacttatcaaaatttaaaaacaaaaaaagtttaatatcctttatgggaatagacgcaccgccatatgaatcaggaaactttaaatcagatcaaaggaaaataagtaaaagaggaaacgcgatactaagaaaagtgggctaccaggcaatgaaatgtatgatgagtgctaaaaaaccagaaaatgaaatatataagtacatgataaaaaaagaaaaagaaggaaaagccaaaaaagtatgtaaatttgcaggattaaacaaattcttaagaatctactatgcaagagttatggaatcaaaagcccaaaaacaagaattaaaagtagcataaaatctaaaattacactaaaaaaaccgattgattacactcggtttgtttgccatgcactaatttaattactcaaataatcaaataacctgaaattaatttcaggttatgcttgacttttgttagcagg

SEQ ID NO: 879 - DNA, 1349 bp, unidentified
  source 1..1349: mol_type = unassigned DNA; note = element_0e782cf
  misc_feature 1..3: note = core
  misc_feature 4..81: note = LE
  misc_feature 82..1104: note = CDS
  misc_feature 1105..1349: note = RE
  misc_feature 1121..1338: note = bridgeRNA
tgatgatgtggacgcccctgcaccggtccgcagccgctatgctgcgagtcggtcacccgaacagaaagaggagcgttcacgatgaggattgcgacgataggactggatctggcgaagagcgttttccaggcgcacggcgtcgatgagaacggcgccacggtgctggtgaagaagctgcaccgcaagcagatgctgccgttcttttcgaagctgtcgccatgcctgattggcattgaggcgtgcggaacggcacattactgggcacgcacgctcgccgagatgggacacgaggttcgcttgatcccaccatcctacgtgaaggcctatgtgaagcgcggcaagagcgacgccctcgatgccgaagcgatctgcgaagccgtgcagcgtccgacgatgcggttcgtgcccgtcaagacagtcgagcagcaggccatcctcatgacccatcgcgcccggtccctgctcgtgcgccagcgcactatgctcgccaatgccctgcgcgcgcatctggcggaactgggcttcgtcactaaccccggcattgccaaccttgcaaagctgaccgaccaggtgctggccaacaaagatgcttttccatcctatgcaagcgcggccgtagagatactgatccgtcagatcatgggcgtcagtagccagattgcggtgctcgaccagcaactcgcggcctggcatgccgagagcgaggcctctcgcaggctcgccgcgatcccggggctcggcgtgatcacggcaaccgcgatcgctgctatcgtcaccgatcccgatcagttccggtcgggaaggcaattcgccgcctggctcggcctaactccgcagcagcactccaccggcggcaagaccaggttgggtggcatctcgaagcagggagaccgatatctgcgccgactgctcgtcgtcggcgccaccgccgtcatgcgccacatcaaggataagccaacgcccatggccgactggatcaggaaactctcggagaaaaagccgttcagggtcgtctccgtggcgcttgccaacaagttggcccggatcgcctgggtcgtgctgacccggaaggaagcctatgggccctatcaactgacgacctaacagaataccgaacaaccgaattggcagtggcagtcaatgatgagtaacgatcgagccaatggtgaaaccaacccgtctgattcaatgcgcttcaaccgcgcgccaacttgattagggacctcaccggcggatttccatcaaggccagcggcactcaaaacgccgcacaaacaggccggacatatgaaagcaaccgatcaaagccatcgcgaccacaaagcccttgccatagggggcgtccacata

SEQ ID NO: 880 - DNA, 1183 bp, unidentified
  source 1..1183: mol_type = unassigned DNA; note = element_0e8ba70
  misc_feature 1..2: note = core
  misc_feature 3..205: note = LE
  misc_feature 206..1168: note = CDS
  misc_feature 1169..1183: note = RE
  misc_feature 6..210: note = bridgeRNA
cttgtatgtttagccatgaccggtgcggtagagtttggtcgtcgttgaggcgaccaggccggcccgtgcagtttggtaggcgctggggtgatcgagcccgtacatgagtaaagaacgcacggttgccgcactggtcttcatgaagcccgaacggttacgcgcgcgaccatcgagcgcgcatgcacaagcaggggatccgaagaccatgtctgcaaccttagtggtggtgggcatcgacgtggccaaagcgcaggtcgatgtcgcggtattgggcgcaacgctcgacgctcagcggttcggcaatgaggccgaaggacacacggcgctggcggcggcgctggcgccactgggggtggccctggtggtcatggaggccaccggcggttacgaagcggcgctggcctgcgcgttgcaggcggccggcttggcggtggcggtggtcaatcccaaacaggcgcgcgacttcgccaaatccatgggcaagctggccaagaccgaccgcatcgacgcgcgcgtgctggccgaattcgcggcggtgctggtccgccgcgacgacctcgcacatttcatccgcccgctggctccttccgagcagcgggcgctggcggctctcgttacacgtcggcgccagttgttgaccatgctgttgggagagcgccagcgactgcagttggccatggcgctggttcgtccgagcattgaggccatgatcgcggccatccgcgcccaactcgacgacgtggaggcgcagatggccacccatgtgcgcgaacacttcgccgaactcgatcagctgctgcaatcggccagcgggatcggccccgtagccagcgcgaccatccttgccgaactgcccgaactcggacgactcaaccgccgcgagatcgccgctttggtgggcgtggctcccaccgccaacgattcgggtacgtcccgtggccggcgtcatgtgcaaggtggccgcttcgagatccggcgcgtgctgtacatggccaccctcagtgccacccgacacaatccttccatcaaggcgttccatgaccgccttctcgcggcgggcaagtttcccaaggtcgcgctcgtggcatgcatgcgcaagctgctgactatgctcaacgccatggtcagacacaacaaaccttgggaccaatcgcttcataacgcttgacgccaaagacggtta

SEQ ID NO: 881 - DNA, 1373 bp, unidentified
  source 1..1373: mol_type = unassigned DNA; note = element_0e8ea0b
  misc_feature 1: note = core
  misc_feature 2..90: note = LE
  misc_feature 91..1125: note = CDS
  misc_feature 1126..1373: note = RE
  misc_feature 1145..1368: note = bridgeRNA
caatgggatggactccccctcacctttcggcatcgatgtgccaaactgagattgatgatttccattaacgatgaaaaagaggagcccactatggagattagtcgagttggtgttgatttagcaaaacgagtatttcaattacacggcctagaccgaaaaggcaaaacggtttggaagcgtcaattgtccagagacaaatggataaaggtgttgtcagagaccgtgaaacccggtgctgaaattggtattgaagcgtgttccggtgcccaccattgggcgagattgctaggtgataaaggatatcttgttaaaattatcccacctcagttcgtcaagccgtttgtgaagagtaataaaaatgacgccaatgatgcccaagccatatgcgaggcgatgataaggccaaacatgtatccggtgaaagtcaaaacagttgaacaacaagatattcaggccatacaccgggttcgggaggagattaaaagtcaccgaatagcaaaagctaatcagatccggggactagtcgcagagtatgggttggttgctcctcaaaaactgccttcattgcggtgtgctattcctatttggcttgaagatgcgaccaacgggctgactagctgtttcagacaactcctacaaggattatgggaggacttgttggccttagataaaagaatgaaggcgctggacaaacaaatcagccagttagcaagcgagccagaggccaaacgccttcaacaattagatggtattggccctttgatcgccacagcaatactggcgacagtgggtgatgctaaacaatatcgtaaaggccgagatatggccgcagctattgggttaacgccaaggcagcacagctcaggaggaaaagataagatgctcgggataagtaaacgcggcgattcatatctacgatatttacttatccatggagcgcgctctgttgtcgtcagagccaagggtaaagatgaccgactgagtcgatggataaacagtttgatggtgagacgaaatatcaatgttgtaacggtagctgttgctaataagctcgcaaggatggcgtgggtaatgttgagtaaagaagtcgattacgaccctggctattgctcaatgaaaagttagaaataaaacaagttcaatgtacgattgcgaagcaagctaaatgatggctaacaggtcgaaccggcgcagataaaacccgacaatgtccgagtgtgtcaaaagcacgtaaaagcgatagggaatctgcgcgcgaacaacccattatggcccggcatactcgtatgccaccttgagaggccggatatacgtatgcagtcgagccaactgccattaactagattgcttgcaaacgagggggagtccatata

SEQ ID NO: 882 - DNA, 1418 bp, unidentified
  source 1..1418: mol_type = unassigned DNA; note = element_0e9c20d
  misc_feature 1: note = core
  misc_feature 2..78: note = LE
  misc_feature 79..1110: note = CDS
  misc_feature 1111..1418: note = RE
  misc_feature 1196..1412: note = bridgeRNA
taatgagatggtccgccggcttgatcatcctgaccgtaggatgatctcagccagcagcatatagaggaggatcatcacatgcacatcgcttctatcgggatcgatctcggcaagacaacatttcacctggttgcagttggggagcaaagcaaggtagtcgtcaagaagaaattttcgcgcaagcaactgctagcctacaccgccaacctgcaaagttcgctgataggcatcgaagcctgctcgggagcacatttcatcggtgcaaccctgcgcaggcagggacacgacgtgcgactcatcccagcccagttcgtaaagccctacctgaagtcgaacaagaacgacttcctcgatgcggaagcgatcgccgaggcggtggcacgacagaacatgcgctttgttcccatcaagaccgaggaccagcttgatcttcaggcgctccatcgcgtacgcgaccggctcgtgcatcaccgcaccgcgatcatcaaccagatccgcggtttcctgctggagcgtggcattaccttcgcgaaaggaccggccaacctgcgcagccagatgccggcgatgctcgaggacgccgagctgaagatctcgccacgtatgcggaccctgttggctcgcgtctggcaggagtggaagcaactcgagatcgacattgccgatgccagcgacgagatcgagcgcatctccagcgaagacgcgggctgcaagcgcctgcggcagatacccgggatcggacctctggtctcgacggccacggttgcagccattggcaacggcgccgccttccgtaaggggcgtgacttcgctgcctggctcgggctcgtgccccgtcagcactccaccggcggcaaggcgaagctgtacggcatcagtaagcgcggcaacatttacctgcgacgcatgttcattcacggcgcacgcgccgtgctgctccgggtgaagtacgacaccggaggcttcggccagtgggtacatcagctcgaagcgcgagcgccccgcaacaaagtcgttgttgctatcgccaacaagttggcgcggatcgcatgggccgtgctgttccgagaagaggattaccgccatatggcggtctgcgcacaggcgtgaacttggccgtggaaaagacgcttcgcttggaaagcgctgacgcgcttcccactttcccaccgccactacgtccgagaatatctaaccaagtctgctgagaagaggacaagacgaaagaacagtcaaacggcgtgccggagaacctgctcccacaagaggtcgatcgtgaccgttcggcttataaggaccggcacgcgcggatcatcatcgtggcccggagaacgatctccaactagaggccggatacatttgcgcagactgtacttcgtccaagaatctctccttgcagtcgagcggcggaccataca

SEQ ID NO: 883 - DNA, 1464 bp, unidentified
  source 1..1464: mol_type = unassigned DNA; note = element_0e9ec31
  misc_feature 1: note = core
  misc_feature 2..229: note = LE
  misc_feature 230..1450: note = CDS
  misc_feature 1451..1464: note = RE
  misc_feature 13..228: note = bridgeRNA
ctactagaggattgtcggcaggaccggtgtctggccagactcggttcaggtacccggcgggacgctctcttctgggctgcccactcgcttgcgggtgtggctcacttccggtctgctgcccgccgggtgccgtgacgaggcgtggctcaagaagggactgccctgctcgtagtagcactgcccacctcgccgaccctctatcggtacacatgccaggtgggagtggagcatgcaccagtcagagcacgtcatcatcggggtcgatccccacaagctgtcggccaccatcgaggtggtcgaccgtcacgagaagcggctgggcgcgggacggttcactaccgacaaagccggctacgcggcgatgcgcatctacgcgaaggcctggccggatcgggtctgggcggttgaaggcgccaacggcgtgggtcgcccgctggcgcagcggctgctggaggccggcgagcgagtcgtcgacgtgccggccaagctcgctgcccgggtgcggttgttcgacaccggccacaaccgcaagaccgatgccctggacgcgcactcgatcgcgatcgtggcggtgcgcaccacaacgctgcgggtgctgcaggtcgatggtgagctcgaggcgctgcggatgctcaccgaccgccgtgaggcattgacccgtcgccgggtccagaccgtcgaccgcctccaggcgctactggcggaactccttccaggacagtcgaagaaggacatcaccaccggtcaggccaaggccatgctcgccaccgtccgaccccgtgacatcgccgggaagacccgacgccggatcgccgccgaggagctgtccgagctggtcgcggtcgaggcgaagatgaagaaggccaccgccgagctcaaggccatcgtcaccgcccgcggctcgcacctgatggacatccacggcgtcggccccgtcgtcgccgcgcgcgtcctggccgacgtcggcgacgtcgcccggttcgccgaccgcaaccgcttcgcgtcctggaccggcacggcacccctggacgcctcatccggtgagcagaaccggcaccggctctcccgcgccggcaaccggcggatgaaccacatgatccacatcgccgcgatcacccagctccgcagcgacaccgacgggcgggcctattaccggcgcaagcgagccgagggcaagaagccgctcgaggcgctgcggtgcctcaagcgcaggatctcggacgccctgtaccgccagctcgtggccgacgccgcagccgcgacggcacggggcgtggaggcgggtccgggagggcactgcggggcgtctcaagaatccagcgcggtcgacctgcccccgcacatcgacacttcggatcagccacttcccggacccgcgaatccgacgctacgcccggcaccgacaccacggaagaccaaccctggaacccccatcgccgcgacgggttgacaacagaagggagc

SEQ ID NO: 884 - DNA, 1466 bp, unidentified
  source 1..1466: mol_type = unassigned DNA; note = element_0ea2bdd
  misc_feature 1: note = core
  misc_feature 2..254: note = LE
  misc_feature 255..1451: note = CDS
  misc_feature 1452..1466: note = RE
  misc_feature 9..245: note = bridgeRNA
cgttaccttgttgatagctccctcacccgaggatgatgggagctgtcggccggccaatcccggcatggtgtcttgcccctgcatatccaatagtccggggggtgttgccaccgggattggatggcagcgaggtgattgctaatcaggggcacggcgccaggaacactggacgccagtcgtaacgtgggtgtaaggctttgctaccgacggttggtcgaccttgaacaaatcatcggttcaaaggagcaccggtcatgaaaaccgacgacatccagatcttcctcggcctcgacgtcggaaagaccgaccattggggctgcgcagtgacggcaggcggcaccaaaatctggaacaaaaccctgcccaacgacgaagccaaactcaccaaggtctaccaggatctcagcgcccaaggcgccgtactggtggtcgtggaccagccagcgaccatcggcgcactggccgtcgcggtcgcccagcacctcggcatcaccgtggcctacctgcccgggctgaccatgcgacgcatcgcggacatgtatccgggcacggccaaaaccgacgaaaaggacgcgttcatcatcgctgacgcggcccgcaccatgccgcataccctgcgcagccttcaggtctcggacgaggaagaagcagccctgggcatgctcaccggcttcgacctggatctctcccgccagatcacccagaccagcaaccggatccgcgggctattcacccaaatccacccctgcctggagcgggtggtaggtccgtggctggagcatgatgcggtgctcgaagtcctcgctgcctggcccaccccagcagcgctgaagcatgccggcaaggccaggatcgatgcgaagctgacaaagcacggagctcgccggcacaccgcgtgggccggcgccattctggacgccgtggatgagcaaacagtggtcgtggttggcaccgaagcggccgggctggtcgttccccacttggcccggcagctgatcgccctgcatgcccagcgggccgacgtagccacgcatcttgaagctatggtggaagcccaccctctttgcccggtcctgacttccatgccaggggttgcggtcaggaccacagcggtattcattgccgagacctccggcaagacctttgatagtgccgccgctttggcctcctatgctgggttggcgcccgtcacccgccagtcgggcacctcgatcaagtccgaacgcgtcagccactcaggcaacaagagattgaagcgagcgttgttcctttcagcgttcgcgtccatccgtttcgaccctgccagccgcgcctattatgaccagaaacgggcccagggaaaacgccataatcaggcgctcatcgcgttggcccatcgcaggctgacggtgctgttcgcgatgatccgggacgggtcactctacgatgctccggcggtggaagctgcttgacaaaatacatagggg

SEQ ID NO: 885 - DNA, 1443 bp, unidentified
  source 1..1443: mol_type = unassigned DNA; note = element_0ea48f2
  misc_feature 1..2: note = core
  misc_feature 3..150: note = LE
  misc_feature 151..1170: note = CDS
  misc_feature 1171..1443: note = RE
  misc_feature 1210..1441: note = bridgeRNA
aaatgtgatgaacgcatcccactctttaaatgcggggcagaatgatggttgaaaaagagaagtcggcaggtgtggagcctcgcagattttcggcatcatagtgcccaatacgggatgcataaagctccctcagactggagacttcacaacatgaaatatacaccggttggcgttgatatcgcaaagcatctgatccaggttcacctcatcaatgagcatacgggtgaagtggttgataagcaggtgagcaggcagggttttatgacgtttttcagtaacagggaaccctgtctgattggcatggaagcctgtggaggctcgcagtactgggcacgcgaactgacaaagctgggacataaagtccggctgatgcagggccggttcgttaaagcgttcgtcatgggcaacaagaatgacatgatggatgcccgtgctatctggatggctgttcagcaaccgggcaggaagatagcggtgaaaacagaagagcagcaatcagtactggttctgcatcgttcacgccgacaactggtgaagttccggacagcacagattaacgcgctgcacggaacactgctggagtttggcgaaaccatccataaaggtcgggcagcgatggacagggagctaccggctgcactggagcgactgaaaacgaagttgccgccgtatctcaccaacgtgctggaagaccagtacagcagactgattgagctgggcacgctgatcgatggccttgaaaaacagcttatcagcgtggcgagacagaatgaaacctgcaaacggttgatggaaatccccggagtgggtccgttaatcgccaccgcggcagtcgccactatgggagaggcatcggcgtttaaatccggtagggagttcgcggcttatgtcggcctggtgccaaagcagacaggctctggggggaaagtacgcctgctggggataagcaagcgtggcgatacttacctcaggacattatttatccacggagcaagggctgcatctttatgtgcaaaagagccggggccatggataacggaactgaaaaaacggcgtccgactggagtggctatcgtggcgatagcgaacaaactggcgcgaaccctatgggcgatagcggctcatggacgtgaatacgacaaaaatcatgtcagtatcaggccatattaatcgtcgataccgataaatataaactcttaactataagggtgaatgtagaaaggttgctctggcggccagcgtgatgacaaagacaggtaagaccgtgactcactaaacctgaattatttactgggtgtgaaacccgctggaaaaataaggtgtgggtcagcggatcacataggggctcgcagcatatggctgcaaaaagccggatataaagctgcaacctacccgtcaatgtcagaacaatggatgctgtgcaaacgggatgcgttcatataa

SEQ ID NO: 886 - DNA, 1463 bp, unidentified
  source 1..1463: mol_type = unassigned DNA; note = element_0eaf2d3
  misc_feature 1: note = core
  misc_feature 2..225: note = LE
  misc_feature 226..1449: note = CDS
  misc_feature 1450..1463: note = RE
  misc_feature 12..237: note = bridgeRNA
ctactagacgattccggcaggaccggcgtccggccagactcggtccaggtggtcggcggggtgctctctttgcggctgcccaccctcgttgggtgtggctcgttttcggtctgcgtccccgtcgtccaccgtgtcgaggtgtggctcaagaggggactgcccggctctcagtagcagtgcgcgcctcgcgtcccagttgatgtcgcgagatgaggcggaatgcagatgacgagagtgttcatcggggtcgatccccacaagttgtcagcgacgatcgaagtcgtcgacgcacaggagaaggtgctggccacgggccggttcgacaccgacaaggccggctatgccgcgatgcgcaagcacgtcgcgaggtggccggaccgagtctgggctgtcgagggcagcggcggcgcgggccgtccgctggcacagcggctgctcgctgacggcgagcacgtcgtcgatgtcccgccgaagctgtcagctcgggtgcgactcttcgacaccggtcacaaccgcaagaccgacgcccacgacgcccacgctgtcgccgcggtggcagtgcgcaccaagaacctccggacgctggcctacgaccaggagctcgaggcgctgcgcatgctgtccgagcgtcgcgccgagctcatcagccaccgggtgcagaccgtgaatcggttgcagcggctgttgtcggaactgctgcctggtcaggccaagccgaacctcacagccccgcaggccaaggcgattctctcatcgcgtcgacctcgcgaccttgccaacaagacccgcaagaggatggcgctcgagcaggtggaagacctggtagtggtcgacgcccggatcaaggccatcaacaaggagctgaaggcgatggtcctcgcgaccgggtcgcacctgatggaccttccgggcatcggacccatcggcgccgcgcgaatcctggccgacgtcggggacgtgacccgattcgccaatcgcaaccggttcgcgtcatggaccggtaccgcgccgttggatgcgtcctctggtgagcaggtccgacaccggttgtcgcgagcaggcaaccgcaagatcaaccacatgctgcacatggcagcgacgagccagatccgactcgacaccgagggccgcgcctactaccgacgcaagcgcgccgccgggaaaacgcacctcgaagccatgcgctgcttgaagcgacggatctcagacgccgtctatcgccagctcatagccgacgccagcgaggccgccgccgcaaacgtcatccaggagtcagaggcgagcccgggagggcactgcggggcgactcaagaatccagcgcggtcgacctgcccccgcacatcgacacttcggatcagccactcccggacccgcaaccgcaacgctacgccgctcagaacccgggtcggaagaaggaagcccacgacgtcctcctccgcaccggttgacaacagaggggtgc

SEQ ID NO: 887 - DNA, 1512 bp, unidentified
  source 1..1512: mol_type = unassigned DNA; note = element_0ec213a
  misc_feature 1..2: note = core
  misc_feature 3..290: note = LE
  misc_feature 291..1490: note = CDS
  misc_feature 1491..1512: note = RE
  misc_feature 21..181: note = bridgeRNA
ctgatggctctaccttcccttcgcacggtggatcccggcagggagcgcttgcggcgcttgtcccttgaggactgtcatgagacggcgcccctgccgggctccggtgagggcctgacgtccaggagggtgtagtcccgcgaggactggttcatcagcacgacgcagcgctttcccggtccgccgagcagcacgggcatcattgccatggcggaaggaggaccggtgctggaatcggtatcgactgggcggaagattttcacgacatcgccttgggaacgcaggagaaaggggtgatcgagcagttccgtatcgaccacggaccggccggggtcgccgcgctgatcgagcgggcgttgcggctggaacccgacccggccgaggtccgggtcgtgctcgagacccgccacggcctgctggtcgaagcgctgatcgacgccgggttcaccgtcgtgcccgtgaaccccgacgtggtcgcccgccggcgcggcccggcccggaagaaggacgacgccgaggacgcccggatctgctgcctgctcgccctggaccgccacgccgcgctcaagacgctggtcccgcacggggagatcggcggggagctgcgcgcgatcggccgcgacgacgaacgcgccgcccgcgaccaacgccggttgctcaaccggctgcgcgcggaccttcagaccacctaccccgccgcgctcgccctggccggcaaggacctgggcgcgcccacggtgttgcggctgctggagcgctggcccacccagcccgagctggcccaggcctcccacgcggagctcgtcgcgttcgcccgcgcagggcgtcatggctggcccgagcggttcgccgaccgcgtcaccgccgcgctcgccgcaccgtcgttgccgacccgggactacctcgtgcgtgccaaggccgccgggatccgcctggccgcggtgcaactgctcgccctgcacgaggcccgccacggctggcaggcccggatggccgagctgttgctcggcgggccgcgcaccgggcgtgatcacaccgtgaaagatcccgacccgggaaaagcgttcccgggcggtgagatctacctgagcatgcccgggctcggggacctgctcgccgcccgggtcgccggcgagatcggcgagcacatcaaccagttcgaccaccccaacgggttgcagtgctacgccggttccgccccggtcacccgccgatccgggaagagcgatttcgtcgtcgcccgccggctggcgcacaaccactaccttggcgccgcggtccatcaatgggcgttctgcagcctgctgcgcagcggctgggcccgcgagttctacgacagcaaaatcgcggccgggaagagccaccacgccgcgctgcgggcactgagcaaccgctggctcgaagtcctgtggcactgcctgaccaagggcgtgctctacgacgaagccgtgcacgtcgccaaccgcaaccgggccctcggacacgcagcctgagccggaggttgacagagggtgt

SEQ ID NO: 888 - DNA, 1254 bp, unidentified
  source 1..1254: mol_type = unassigned DNA; note = element_0ec2872
  misc_feature 1..2: note = core
  misc_feature 3..232: note = LE
  misc_feature 233..1231: note = CDS
  misc_feature 1232..1254: note = RE
  misc_feature 56..213: note = bridgeRNA
taccttagatttgcatctgaggattacagataaaatagaaaggataaatttgtgaagcaaagaaagaatgcaggaagtgaaccatgaatgattaaggactgtacagttccattgccataagcggacttcctgcttgtttgaacccagaccaagatagtaggttaacatccattgttaaggtagttaggttaagttcaatctctttcttgcttaaatcattaaagacaaaagtatggaaaatttttattttatcggtgtggacgtgtcgaaaaagaagttggacttctgtgtgatgtttgaaggaaaagttgtgcatgaagaagaaacatccaaccatcaaagcgcgattatgtcgttgctgcatcatttggaagaagattacggaatagataatgcccgaatgcttgtctgtgcggagcataccggtcagtacacttttcctttggcttgtgcctgcaaagccgttgaatgtaagctatggcttgaaaacgcggcagaaatcaaatactcatcaggcgttcagcggggaaagaatgacaaggtggatgccaaacgtatcgccatctatgccagccgttttcaggacaaagtgcagtattatgaacgtccgactgaagatattgaaaggttgaaacagcttgaatccgaacgcaccttgtatgtgacggatttggctaaatataaaggacagatgaaagaccagaaggattatatgcccaaaggcctttatgagcgcaagatgaagcgtcttcaggcattgatggatgacttggaggaagccatacaagccattacggacgaaatggatgaagtgatagcctcttgtcctgtactgttcaggcagagggaactactgatgtccatagatggcgttggacgtgtagtggcaactaacatgataatcattacggaagcctttacccgttttgatgatccgagaaaattcaactgctatgccggagtcgctcctttctcatattcttccgggagttccttgcactcgaaagcaagagtttcgcatcgggcggacaaggtggtgaaaaggctgctacacctggctgccgtagccgtgacgcatcgagttggaggtgaactgaagaagtattacgaaaggaaagttgcagaaggcaagaacaagatgtccgtaatcaatgcgctgcgagctaaaattgtggcaaggatgtttgcggtcatcaaaagaaatgagaaatataaacctattttatcgtaaataatttgcaaaaatcatagtag

SEQ ID NO: 889 - DNA, 1205 bp, unidentified
  source 1..1205: mol_type = unassigned DNA; note = element_0ecab58
  misc_feature 1..2: note = core
  misc_feature 3..188: note = LE
  misc_feature 189..1172: note = CDS
  misc_feature 1173..1205: note = RE
  misc_feature 12..197: note = bridgeRNA
cttgtatctctccatgagtgctgattagctaccggcactcacgggtcgggttaaagcccgtggaactcctgagggcatagaccctgtgctgtagatctggctccgacccatattctcttaaatctgaacggtatccgggctctccccaccgcgggatgaagccgcataagcaagggaagacacgagagatgcagtttgttggaattgatgtcagcaagaagaagttcgacacgctttggctacgccaaacccggccccagaaggtgaagacgcgggttttccagaataagcgagaccaggaaaaggccgttgtgcagtggttgctcaaacaaaccggtgcaaacccttccgagatccatgtggtgctggaagccacctgtgtttaccacgagaacctgacctatgccctccatgaagccggcatgcaagtgtatgtggcgaacccggcgcgtacccgagacttcgccaagagcgaagggttcttgagtaagacagacaagctcgattcgctgtgcctggctctgtacgcgaaggagaagcatgagcggcttcatcagtggcagccggaagcgccggagatcaggcaattaagggcgttgagcgctcgtctggaggctctggagaaagaccagcagcgggaagaaaacaggctggaaaaagcggagttcaaccagtccagcgaccgggtgattgcgtctatcaaggacatgattgcagcgctaaaggaagagatccgcaagctgaagcaggatatcgatgatcacattgatggccacccccaactgaacaaagaccgagccttactcgatagcatcaagggggtgggtgatgtgatgtccagggagctgttgtcgctgatacacagtcgacagttcaagtcggccaagcagtgtgctgccttcgtgggcttaacgccgatgcacaacgaatccggcgacgcgagaaaaccggcaaggatccgcaaagcggggcactccaacgtacgcggcaggctgtatatggctgcggtcaccgcatgcacgtacaacccggacatacgggcattacggcggcgcatggaagccaagggaaagtcaggcatggcgatagttgttgccgccatgcgcaagatggtgcaaatcgcctatggtgtgatcaagcaccagcaggaatataccccgcaggtcgcatagagaggacttgcagggtatggagagagacggtat

SEQ ID NO: 890 - DNA, 1142 bp, unidentified
  source 1..1142: mol_type = unassigned DNA; note = element_0ed13c7
  misc_feature 1..2: note = core
  misc_feature 3..170: note = LE
  misc_feature 171..1127: note = CDS
  misc_feature 1128..1142: note = RE
  misc_feature 10..185: note = bridgeRNA
cttgtatctttggggctcggactggcacaggtagcccgacgcgcctctgggttgatttgatttaagcccgcccctgagctttgggcacctgagccggaccgtcctttcttgcaacccgaacggttgtaggaacttttagttcgcatagacaaggatgggagcgaaaggacatgtccgactctgtttttatcggtatcgacgtctccagccagactctggaggtggccagcagtgcccaggccaagacttggcaagcgagcaatgatgcccatggcatcgagtctttgtgcagccagttgaccgccttggggcctgcgctggtggtgctggaggccactggcggctacgagttcgaggcagcctgcgtgctgcaggctgcggggctgcccacagctgtggtcaacccccgcatggctcgcgactttgcccgcgccatgggagcactggccaagaccgatgcgctggacgcccatatgctcgctgcgttcgcgcgggtgctgcatcagcatcccgagcgtgagcgcttcgtaaagcctctggccgatgcccaattgcagcagctgcaggctctggtactgcgccgtcgtcagattgtgcagatgctcacaggtgaacgccagcgactgcgtatctcgcacgcggctgcgcggcctagcattgagcgcgtgatcgaattcctcaagcaggagcttggagatagcgacacggaggtggcagcccatgtgcagcaccatcacgcccaactggctcaggcgcttaccagcgtgcctggcattggcgcagccagcgtggcggtgttgctggccgagttgcccgagcttggcaaactcgaccgccgccgcgtggcagccttggttggggttgctccgctcaatcgggactccgggcaaatgcgtggtcagcgctctatctggggaggtcgtgcccaagtgcgtcgcacgctctacatggccacgctcacggcggttcgctacaaccccgtgcccaagccgtactacgagcatttgctggccgcaggcaagcgcaaaaaggtcgccttggtggcttgcatgcgcaagctgctgacgatgctcaacgccatcgccaagcacggctgcacttggaatccaaatcatcattgcgcttgacttccaagacggttg

SEQ ID NO: 891 - DNA, 1600 bp, unidentified
  source 1..1600: mol_type = unassigned DNA; note = element_0edaf0f
  misc_feature 1..5: note = core
  misc_feature 6..537: note = LE
  misc_feature 538..1485: note = CDS
  misc_feature 1486..1600: note = RE
  misc_feature 53..267: note = bridgeRNA
ctgctataaataagatgcgttgaatctctcaataattatgcgtcttccttgcacatttaccgtatgctatcctcgtccaacggtgacgatgatataatttcctcatgcagacagaggttccctgctttatccctgcggcaccgtccgctttacagcagtatgggacctctcccttatgggatttcatgaatgagccggatgcgggagtgatctttccgcagatttctatgcaggatatgactcataaggacatgaggaactgtctgtacatcaacaggaaaggcaggtgccaacactatgttcattgtcgggatcgacattgccaaacggagtcacgaagccatcatcatcgctgaggatggccaggttgtccgcaaggcattcagcttccggaataactgtaccggctacaatctgctactggaacaggtacggagactgacccttgtaaagagccagatcgtattcgccatggaatccaccgcccactattggccggcactctacgccagacttttgaaagacggataagcagtcatggttctgaatcctatccaatcccattccctgcgggagctttacatccgcaaggccaaaaccgacgccagagactcactcatcattgcggaccttgtccgctttggccgctgcaaagccagcaacgtgcctcaggacaaaatcctggctctgcgagagctgtgccgcagtcgcgcctatcgggtagacatggccgctgatctgaagcggaagctgattgccttattggacagaatatttccggagtacgaatccctgtttgattctgttttcagcaaggcttctattgccgtactaagcaaatactctacaccccaaaaagtgaaaaatgcaaatctcaggaaactgacggatatccttatggaaagcagcaacggacattttggcgagtggaaggcccatcaactgaaagaggccgcctgcagcagctttgggatcgatgacagcgacggtgtgtattccatgttgcttgggatgttccttgagcagatcctgtctttaaccgcacaggcagattctctggaaaaacagatatccgtattcttccaagagtttaataaccctttaacctctataccgggagttgggactgttctcgccgcaacaattttaagcgagatcggtgacattactcgcttttcctctgctgataagctgttagcttatgcaggacttgatccatccgtgaagcagtccggcgaatttaagagtaaccagaatcgtatgtccaagcggggatcaccttatttacgtcgtgccatttggctggcatccacggtagcagtgcatcgtgatccgatgtttcaaacctattacgaaaagaaaatatccgaaggtctgcattacatgaatgtgattggccatgtcagcagaaagatgaccgctgtgatcttcgctgtcctccgggatggacaaccgtaccaacccattttgcaatctgccggttgaccgagctgcatcattttcatccggcccgcaaagggtctggttctttgcgcccttttccgatataccccttatacacgcaaactgtaattttatcccttgacaaacccatagccga

SEQ ID NO: 892 - DNA, 1577 bp, unidentified
  source 1..1577: mol_type = unassigned DNA; note = element_0edb3a2
  misc_feature 1..2: note = core
  misc_feature 3..318: note = LE
  misc_feature 319..1380: note = CDS
  misc_feature 1381..1577: note = RE
  misc_feature 138..298: note = bridgeRNA
ataaaaaaagctctaagtttgcagtcgcaagataagagagtggaaaatttatcttaataataccaagcgtggcagataaatttgttccgagaacttattgaagcaatgtcagtcttaatatctttgttgtatgaagaagaagactgacaggcagggagaggaatccagaaaaaagcaagtcctttgagactatcccgcgttacggtctctccccgccaagctgcaaaactccgatagaatattaaggctacgagcctatttagagtttagagtaaaaaacagctttttatcagtcttgaaaaaaagatatgtaaagatatgaagaaactatttatcggcatagattttgccaaagagaaattcgatgcagccatcatcgaggcttgtggactcaaagagtttggtaatcgggaatacggcacgttcacaaacgacaaaaagggctatcgacagttcttcaaatgggtcaaaacgaatgcggacaagtccgtggagaacgagtggttattctgtggcgaggacaccggatcatgtagtctgggactgagcaaatggctgtatggcaaaggccttgacatatggattgagaatgcctattccatcaagcatagtagcggaatccaacgtgtcaagagtgacaaggccgactcatccatgatcgcagagtacgcctggagacatcaagacaaggcagtcctgtttgagccgcttagcgaatcgctgtcacaacttcgtgaggtgtttctttaccggcataaattggtacagcaacatattgccatggatgttagaaagcaagacaaggaagccgccgaaccctcgaaggctatcagttttatcaagcgcaaaagcaagcatttaatgtctgagattgataatgccatcaaggaatgcgacctgatgatagaccgcatcatagaaagtgatgccgaacttaaggagaactatgctatcatcacttcgataaaaggcgttgcacgtcaaaacggagcctgtttgcttatcttcaccaacaacttcagacgttttgacctggacgcacgcaaaatagcctgttattatggtgttgccccgtttggaaaagattcaggcacaagtatccactctccggctaaaacaagccatttcgccaacaagctcataaaatccttgctgggacaggctgctcattgtgcaaaaaaattcaatccagaaataagagagtattataaccgactgattgggcgtggtaaaaagccacaagtggctttaaacaatgtcaagaacaaactcatcaggattattgtggctcttgtgcgaaagaaggtctattacgacccaaaaacatacatgttttacaatgctaaatttaccgatgttaagaaaatgttaaactcataaaatgacttggatagaaacatagaatacgaggatactcgaaagttcctcgctctatttattataattagtgtgtttatttacatggcaacctgctgtgacagcagtttttgaagtttaccgtttaatgtttggcacatggcaccatttcccattgcttgatagcgtttaatacggtactgtaacatcataattttttc

SEQ ID NO: 893 - DNA, 1403 bp, unidentified
  source 1..1403: mol_type = unassigned DNA; note = element_0edcd9a
  misc_feature 1: note = core
  misc_feature 2..225: note = LE
  misc_feature 226..1389: note = CDS
  misc_feature 1390..1403: note = RE
  misc_feature 12..237: note = bridgeRNA
ctacttagcattggcgctagggcttgatcccggccaggatcgggtccaggtgcccggtgagaagctcggtaatcggctgcccacctgcgtcattggtgtggctctcaaatggcttgctcctcaccggtcaccgtgcagggaatggcttaagaggggtttgcccagctcgaagtagcggtgccttcccgcacggacaccatccgtcgattcgggaaggatgcactggtgaaggtcatcatcgggatggacccgcacaaacgctcagccacgatcgaaatcatcgaccccgcggcagcggtgctggcgacggggcgatatgacaccgacaacgccggctacagcgcaatgctcaccgccgcaaggcgatacccggatcgggtgtgggcgatcgagggatgcaatggcatcggccgccacctcgcccaccgcctggtccatgacggtgaaaccgtcgtcgatgtgccggcgaaactctcggcgcaggtgcgggtattcgccaccggcaacggccgcaaaaccgatcctgtcgatgcgcattcagtagcgttggcggctttacgttcaccgaatctgcatcgcgtgcaagctgattcggaactgatcgcgttgggcatgctcgccgaccgacgcgacgaactcggccgcgcccgcaccgacaccgtcaaccgtttacaccggttgctgctggaattgctgcccggcggggctaagaaattcctgtccgcgatgcaagcacggaagttggtcgcgaccgtcaagccccgtgatcccgcaggcaaggtccgccgccgcctgaccgttgagttgatcggtcaactggaggtcatcgatcgcaagatcaagaccgcggataaggaattgcgcgagctcgtcgccgaacgtggttccaccttgaccgacctcaacgggatcggacccgctggggccgcccggctgcttgccgatgtcggtgacctgcaccgattccgggaccgcaaccggttcgcgtcctggaacggcaccgcccccttggatgcttcttctggtcagcagcaacggcatcggctatcgcgtgccgggaaccggaaaatcaatcgggtcttgcacatcatggccatcgttcagctgcgtaatcccagcgcgggccgcacctattacgaccgccgcaaagctgcgggcaagacctcgatggaagcgacgcgggcgttgaaacgccgcctgtccaatatcgtctacgcgcgcatgctcgccgaccagcaacgacgggaaacggcaagcccgggagggcaatcgggggcgactcttgactccagcgcgaccggctcaaccccgcacaccggcacttcggacaagccacaacccggactcaccgataaccagaatactcccgacctgcgaatcatgtcttgacgcgagaggggagc

SEQ ID NO: 894 - DNA, 1344 bp, unidentified
  source 1..1344: mol_type = unassigned DNA; note = element_0eee8a8
  misc_feature 1: note = core
  misc_feature 2..68: note = LE
  misc_feature 69..1097: note = CDS
  misc_feature 1098..1344: note = RE
  misc_feature 1099..1334: note = bridgeRNA
tatggatggcccgccccttaccgaagctaggtgcagtacgctgcgatctggctgacttggagggacggatgatgcgtattgcgatgctcggtgtggatttggggaagaacagctgcagcctggtcgggctggatgaggctggcaaggtagtgcttcgccgccggatgcggcgcgagacggtgatcgcgttcgccggcaagttgccgacctgcgtggtcgccatggaggcctgttgtggggcgcatcatatggggcgcatcctggcaggccagggacacgaggtccgactgatgtcgccggaatatgtccggccctacgtgaaggcgcagaagaacgacgaccgcgatgcagaggcgattgcggaggcggcaacacggccgacgatgcggtttgtaacgctcaagagtgaggagcaactcgacatgcagacgttgcaccgcgtgcgtgaccggctcgtcgccgaacgcacctcgctgatgaaccagatccgaagcctgttgctcgagcgcggtcatgttgtcccccagggacgcgctcgactggcggcagcgctggtcgacctgctggacggcctggagccgaggctgagcacgcgcatggcgatgctggtcggcgatatgcgtgaccgttggcgatcgctggatgagaggatcgccaccttcgaccgcgagtttgcccaagccgcggaacaggacgggcaggcgcgccgactgctgaccattcccgggatcggcgcactcaacgcaaccgcgctggtggccgcggtcggcgatgccggcacattcgcgcgtggtcgtgatctcgccgcctggctcggcctcgtgccacgccaggcgacgacgggcggcaagcccaagcttctcggcatcaccaagcgcggcagccgctacctgcgtaagctcctgatccagggcgccagatcagccatgccgacgctgcgcaagactgatacccggctcggcgcctggttgcgcggcctgctcgcccgcgcgcatcccaataccgctgtggtcgcgcttgccgccaaactcgctcggatcgtttgggctctgctgcgccacgagcgtacctaccacatgccggcactgtcggcctaagaagatcgatcggcgataaatgctggtcccagatgtctgcggggggcgagcgatagatggcctgacagtcaaccggtgtcccggaaccctatggcgcaaaatggcactcgatgccggctcctttatgaggaccaggacgcgcggatctccatcttggccgagggtcggtgcccaaaggccggatacgttttcgcagactgatcagaccatcgatcgtaaccctcttgccgacggggcgggccatacg

SEQ ID NO: 895 - DNA, 1404 bp, unidentified
  source 1..1404: mol_type = unassigned DNA; note = element_0eef9d7
  misc_feature 1: note = core
  misc_feature 2..307: note = LE
  misc_feature 308..1396: note = CDS
  misc_feature 1397..1404: note = RE
  misc_feature 13..239: note = bridgeRNA
ctacttagaaactgttcgcaggatcgacgtccggccagactcggtccaggtgtccggcgagacgctcccacattgcggctgcccaccggtgtcattggtgtggctctctcatggcctgcggcctcgccggacaccgctcgaggagaggctggaaaggggtctgttctgctcaaagtagcggtgccctcctcgtagatcgctcgtcagatcagtcgagggaggcgccgatgacggtgatcatcgggatggatccacataagagctccgcgaccatcgaggtcgtcgacgaacgcggccgggcgctggcgtgggccggtacggcaccgacaagcccggctacgcgcagatgctcgccgccggccgcaggttcgccgaccggatctgggcggtggaggggtgcaacggcatcggtcggcacatcgcccaccggctggtgcacgacggcgaggtcgtggtcgacgtgccggcgaagttgtcggctcaggtacgcgtgttcgccaccggcaacggccgtaagagcgaccctgtggatgcccactccgtggcgatggtcgcgctgcgcaccccgaacctggtgcaggtacgcgtcgacgcggacctgcaggtgatggggatgctggtcgaccgccgcgacgagctgggccgcgcccgtacccagacgatcaaccggctgcaccggctgttgttggagcttctgcctggcggggccaagaaattcctgaccgcgccccaggcccgggcgctgatcgcggccgtcaagccgcgcgatgtcgtcggcaagaccaggcgccggctcgcggtcgagctgatcggggaactggacggcatcgacaagaagatcaaggctgcggagaaggacctgaaggaactggtgaccgcccgcggctgcacgttgatggacctgcacggcatcggtccctccggcgcagctcggctgttggccgacgtcggcgacatccgccgcttcgccgaccgcgaccggttcgcctgctggaacggcaccgcacccttggacgcctcattcgggcagcaacaacgccatcggctctcccgcgccggcaaccgccggatcaaccgcacggtacacatcatggccgtcgtccagctgcgccaccgcaccgaaggacgggcctacttcgacgccaagaaggccaccgggaagacctcgatggaagccatgcgcgcgctcaaacgccggctgtccaacgtggtctacgcccgcatggtcgccgaccagaaacgacgcgaggcggcaggcccgggagggcactcggggacgactgtgcaatccagcgtgaccgacccgaccccggacgtcggctcttcggacaagccacttcccggacccgccatggcccaccctaaaccccagcctcacgacggcgccttgacataaaggggtgc

SEQ ID NO: 896 - DNA, 1436 bp, unidentified
  source 1..1436: mol_type = unassigned DNA; note = element_0ef4e33
  misc_feature 1..2: note = core
  misc_feature 3..206: note = LE
  misc_feature 207..1421: note = CDS
  misc_feature 1422..1436: note = RE
  misc_feature 16..206: note = bridgeRNA
gtcctaccttccaagcatgggtctgagacggtcactcgtaggatcgtcggacccaggggttccgggtatggctgtgagcttgtcgccgttggatggctcaaatgacttggccgcccggagccccgcgacgactcgaccgctaattgggatacgcgactcgatcgctgtgtaggacaacgtcggcgaggtcgtctgcgggactgcagttggacgacgagctggcggaggtgaccgtgcccgagatctgggccggggtggacatcggcaaggaacaccaccactgcgtggtcatcgacgcgcaaggcgaacgccttctgtcgcggcgggtcttgaacgacgagtccgcgctgttggaactgatcggtgacgtcctcgcgttctccgaggacgcgctgtgggcggtggacatcaaccacggcggtgccgccctgctcatcggcttgcttctgggccacggccagccgatggtctacctcaccgggctcgccgttcaccaggcatcagccgcctaccgtggccaggggaagacggacgccaaggacgccttcgtcatcgccgaccaggcccgcatgcgcaaggacctcggcactctgcgacctggcgacgagatagccgtcgacctcaagatcctggtcaggcgccgcaccgacctcgtcaacgaccgcacccgccacatcaacagactccgggagcaactcctggagatctgcccggctttggagcgggccctcatcctgacgaacaaggggcccgtgctgctgttgaccggctaccagacgccggcagccatccgccgcagcggcgtcaagcgcatcgagacctggctgaagaaccgcaaggtcaaaggtgccgccacgctcgcccaggccgccgtcgaggcggctcaggcccagcacacgtcactgcctggcgagacgctggccgcatcaatggtggcccgcctcgcaaagggggtgatggccctcgaagaggagatcgccgagctcgatgcactcatcgaggcccggtttcacgaacacccgcacgccgacgtaatccgcagtctgcccggcatgggcgccatgctcggagccaccttcatcgccgccaccggcggtgacatgaatgccttcggcacggccgaccgcctggccgcgttcgccggcctgtcaccggtgccacgcgactccggtcacgtcagcggcaacatgccggcctcgccgcttccaccccggcctcctgcgggccttctacctgtcttccatggccagcctgcggtcgtgtcccgcctcacgggcgtactacgaacgaaagcgcgccgaggaaaaggacacaagcaggccgtgctgtccctcgcccgtcgaagggccaacgttctctgggccatgatccgcgacggagcgtgctatcaagcagcaccaccagtcacgagggctgcttgacatcctcattgggaa

SEQ ID NO: 897 - DNA, 1365 bp, unidentified
  source 1..1365: mol_type = unassigned DNA; note = element_0ef6270
  misc_feature 1: note = core
  misc_feature 2..76: note = LE
  misc_feature 77..1108: note = CDS
  misc_feature 1109..1365: note = RE
  misc_feature 1142..1359: note = bridgeRNA
tactgagatggtccgccgcttaaacctcaatctggcgatgaggatcttataggcagattgaaggaggatcatcgacatggagattcgttccgtaggcattgaccttggcaagacgacctttcacctggtggctcttggcgataactgcaaggtgctgctgaagaagaagtttacccagaagcagttgattgccttcaccgcgaacctgcagacctctttgattgggatggaggcctgttccggggcgcacttcctgggccgtactttacgagaacaaggccacgatgtgaagctgatcccggcccagttcgtgaagccattcgtgaagtcgaacaagaacgacttcctggatgcggaagcgattgctgaggctgtggatcgggagaacatgcgatttgttccgatcaagacggacgaccagctggatctgcaggcattgcatcgtgtgcgcgatcgtttgatcgcgcgaagaacctcagtcatcaaccagctgcgggccttcctgctggagcggggtctggtatttgcaaagagcccggccaggctgcgcgagcgcatgcccgagatcctcgagaacgccgaggaagatctcactccgcgtatgcggaacctgctggctcaactttggaacgagtggaaggatcttgaacagcgggtggtcgatctgaaccaggaagtggagctgattgcctcaagtgatgcggcatgcacgcggctcaggcagatccccggcgttggcccgctggtcgcaaccgcgatcgtagccgcgatcggtaacggcgcagccttccataaggggcgtgagttttcttcctggcttgggcttgtgccacgacagcactcgaccggtggtaaggcccgcctcttcggtatcagcaagcgcggtaacaactacctgcgcaagatcttcatccatggagcccgcgcagtcgtattgcgatcgaagcgagaccgcgtcgccatgggcgcgtggatgaccgctcttgaagccagagcgccacgcaacgtgctcatcgtcgccacggcaaacaaactggcaaggatcgcttgggccgtgctgtcaagcggccaggactatcgggcagttcaagagccagtcgcggcctagctaagcgtagctatcaagatcaagttctcccaccgaggtctgcaccggataagtaaagatgaaagaacagtcaaacggcgtacctgaaacctgattgctcaataggctcttccacagccgaggggttttgtaggacaggtacgcggcgtatctcatcatggccaggagactgatctccaccaaaaggccggatacattgacgcagacattccttcatccataaacttttcccttgcattcagacggcggaccataca

SEQ ID NO: 898 - DNA, 1403 bp, unidentified
  source 1..1403: mol_type = unassigned DNA; note = element_0f06cff
  misc_feature 1..2: note = core
  misc_feature 3..89: note = LE
  misc_feature 90..1130: note = CDS
  misc_feature 1131..1403: note = RE
  misc_feature 1167..1401: note = bridgeRNA
cgatgaaatggtctcctcccccctaacggcgtcgcaatgcgccaagatagagattccagtatctatctgaatgagatgaggaggagaccatgaacaagcatacgacagtgggtttggatctggcaaaaaacacgtttgcggtagtggttctggacggcgaaggcagggagtgtagccgtaagacgctcaagcgccggcaggtactggcgtttatggccaagcagtgcgaggcggtggtggcgatggaagcctgcgcgagcgcccatcactgggcgcgcgtgcttcaagcccgggggaatcaggtggtgttgttgccccctcagcatgtgaaggggtatctgcgaggccagaagaacgactacaacgatgcgctggcaattgccgaagcctgtcagcacggccgggttcgcccggtggcggtgaagacgctggagcagcaggatgaacagagctttcacagtatccggcgcagcctgattgccgacaaggtgcggttgagcaatcaactgcgggggctgttgggggagtacgggctggtggtggcccggggcgacggggcgttgcgccgggcgatggcggagcacctgagcgaggcggacaacggcctgacaccgcgagtgcgcagttacctggcccgccagtacgaacgcttcgttgcggtggtagaggagctggtctggtacgacgccgagttgcgtgaacgggtccaacaggatgaggtgtgcgtgcgcttacaggccgtgccggcgtttggtccggtggtcagtagtgtggtcaagcactggctgggcgatggccgacagtttggctgtggccgtgatgcctcggcggcgctggggttggtgccccggcaacacagcacgggcggcaagcagcagctgggcgggatcagcaagcggggtgatccatacgtgcgctgcttgatgatccacggcgcccgggccgtggtggcccgcgccgagggcaagacggacccattgagccgctggatccaacagctcaaggcgcggcgaggctacaacaaggcggtggtggcgctggccaacaaactgatacgcattgcctgggtggttatcgcccgcggtgaacagtaccggccgggatcgggcgtgggtggttcaccgtgttgaaccggcagaacacgaagaggtagcgaagcagtcaagcgtcccagggttgcgaaggcaacagacagtggatggcacaacaggtcataccggcctgccgagaacctggtaaacccgaaggcccctgaggccgataggtcgataaggacggcaggcggcagatagtcatcaaggccagaggcgcgcacattgcctcaccaacaggccggatatacggcagcaacctgtccctgacattcaaagtctgagccttgcaaacggggaggagaccatata

SEQ ID NO: 899 - DNA, 1365 bp, unidentified
  source 1..1365: mol_type = unassigned DNA; note = element_0f070a8
  misc_feature 1..2: note = core
  misc_feature 3..86: note = LE
  misc_feature 87..1118: note = CDS
  misc_feature 1119..1365: note = RE
  misc_feature 1114..1347: note = bridgeRNA
tgatggggtggacggcccccgctcccggcatcgatatgccacaacgtggtcgtctgtgaacgccacaacgagaggagccgtccaccatgcagattaccaccatcggtttggacctcgccaaacactggttccaggtccacggcgtcgacgccaatggacacatcgtcgttcgcaagcggctgtggcgcagcgccgtgatcccgtacttccggtcgctcgagccctgtttggtcggcatggaagcctgcgcgaccgcgcatcattgggcgcgcgagctgatcgcgttggggcatacggtgaagctgatgccgccggcctacgtgaaggcctacgtcaagcgcaacaagaacgatgccgccgatgcggaagcgatctgtgaggcggtagcgcggccgtcgatgcggttcgtgccggtaaaggacgccgaacagcagtcggtgctgatgctgcatcgggcgcgcagtcttctggttcggcaacgcacgatgctggtcaacgcgttgcgcgctcacctggccgaattcggtattatcgcgccgcagggtctcagacacgtcgagatcctgacgaagatagttgcccatcaacaagagcggctgccggagctcgcgcgctcgatcctgcagacgattgtcgaccagctgaacggcacgatggcccggatccgggagatcgaagggcgcgtggccagatggcatcggcacagccgggtcagtcgtttgctggcgaccgtgccgggtgtcggcatcatgggcgccagcgcgatcgccgccacggttgccgatccttccctgttccgatcaggccgggagttcgccgcctggctgggaatgacaccgcggcagaattcgagcggcggcaaggaacgcttggggcggaccagcaaacgcggcgacaaatacatccgcagcctgctcaccgccggtgcggttgccgtgctgcgccatgcgcgtaaccggccgacccgcgacggcgagtgggtccgcgctctgctggcgcgtaaaccgaccaaacttgccgcggtcgcgctggccaacaagaccgcccgcatcgtctgggcggtgatgatgcgcggcgatggttaccagcctaaggaggtttttgggcagccggcataggcgccgccagcccattcagcatgcgagggtgaagaggacgtgatggcgagcggtcgagccgcggatcgggaagacccgagtaattcaaggcgcaaagcagcgcgtattcttgatagggacccgatcagcgaactccatcagggccagcggtcataggcaccgcaccaaagggccggacatatgactgcacccgaccatttcgccagagctgaactcaaccccttcgcaggcgggggccgtccgcata

SEQ ID NO: 900 - DNA, 1352 bp, unidentified
  source 1..1352: mol_type = unassigned DNA; note = element_0f0b090
  misc_feature 1: note = core
  misc_feature 2..260: note = LE
  misc_feature 261..1337: note = CDS
  misc_feature 1338..1352: note = RE
  misc_feature 33..262: note = bridgeRNA
ctgtgagtatgagcttgcggataccggccttgtgtcagggcgggtcctgccaggtttggtgctggtggcgtcgggtgactccctgcgtgcctgaccgctttatggcgtgtcttggatcggactcgtccctggcgctgccagcaccggcctggccaccctcgttggcctgatcaggagcttgtccggcccggcatgggtcgtgactcatcacaggattgccgcgggagttcagttccagcatcgccgatgaaggaggacgcgtgcgcagtaccgcggcaactggcctggtggtcggtgttgacacccaccgtgacacccaccgtgacacccacactgcggccttgtgcgacctggccgggcaggccctggccgtgcggcagttcatagccggcccgggcggttacgccgctgccctggcatgggcccggcaggaggctggcgaggccgggctggcctgggccatcgagggcacccggcattacggcctgggcctggcccggtacctgaccgcagccggggagcatgccggggagatcgacgcgagcaagcacgcaggtaagcggcgcaacggcaagagcgacgcccttgacgccgtccgcgccgcccgggagatgcttgcccgccccgttgcggcgcagatgcgcgcggccggggaccgggaggccctgcggctgctgatgtgcgaccgcgataatgccgtcgcctcggccaagaccgcccggaccctgctgacatcagtcatcgtgaccgccccggccaccgtccgcgagcagctgcgccacctgtcccgtgaccgccgcgcgaccgtgtgcgcttcgctgaccagcccgcctggcgctgaccggcagacccgggtgctctaccagaccctcgcccggctgggccagcgcatcaccacgctcgctcgcaccgccgcggacctgcagaagcagatcagcgcgctggtcgaggacatgacccccggcctggtcgccgccgaagccgggctaggagcgctcaccgccgcgcagctcctgctgtcctactcccaccacggcaggatccgcagtgaggccgccttcggcatgctgccgggcaccgcacccgtcccggtctcctccggccgcaccgaccggcaccgcctcaaccgcctgggtgaccgccagctgaacagggcactgcaggtcatcgccgtcgcccggatgcgcagccacccgcccacccaggcctacgtccagcggcgcctgaccgagggcaagaccttgcgcgagatacgccgctgcatcaagcgctacctcgcccgccacttctaccgcgcgctccgaaaccagcccggtctagaactagacaggacttgacgaacataggagcgt

SEQ ID NO: 901 - DNA, 1356 bp, unidentified
  source 1..1356: mol_type = unassigned DNA; note = element_0f15383
  misc_feature 1..5: note = core
  misc_feature 6..240: note = LE
  misc_feature 241..1308: note = CDS
  misc_feature 1309..1356: note = RE
  misc_feature 23..223: note = bridgeRNA
cttttatttttactgagaattttaaaaaggtcattatattgttgttatgcaaaatatattggctgttcgtgtgaggccagaagtggctaggtaaactttgagttataccgtaaaaaaggtttcgcccacacgattttattctcaggagtctgaacagtacttaaggccgcgaagcgagcttgaataaaacaaaaggatagacgaaggagaattgagtcaatatgatttaaattcttaattatggctattagaaagcaatgcattgggatagatatctcaaaatcaacctttacagcttgtttatgtcaacaggcggaagatggcaaattaacgttctcaaaggtcctggactttggtaatgatagtaaaggcttcaatcaattattacgttgggtgaaaggtctgattgtatcagattcggagctagtatttctcatggaagccacaggcgtttattatgagaacctggcccaccatctatacaaaatcaaaaaaagggttcatgttgtgcttcccaacacctcaaaacactatttctctagtcttaatgtgaaaacaaaaacagatgcagttgatgcgcgaattctaagtcagtttggtattgagagagttcataagttgtggtccccaccaccaagcacactcttgcagctcaggaatctaactcgttactatgttcagcttcaggaacaaaagacaacacttggcaatattagtcacagcaaggactgcgcacatgatatccaagtatttattaccaagagcaacaaaaaactcattactgagatagataaggaaatcgaaagatgcctgaaagaaattaagaaagctatcgaaaaggaagatgtactgaaggagcatgtcagaaaggttttgacgataaaaggtgtaggattgattacggtagcaacgatattagctgaaacaatgggttttgagcagtttcatagttcaaaacaattggttagctattcaggctatgatgtagtgcaaagagaatctggcacctcgattaaaggcaagactaggatctccaagaaaggaaacagatatatcagaaatgcactttatttcccagcgatggtggcctgtaggtacaatgaagcattaaaagaaacttatatcagaatcaataaaaacaataaggcatcgaaaatgattggacaggtggcaatacagcggaaactcttagtgttgatttatacgctttggaaaaacgatactgaatttattgaaaactaccaaagaggtagtctcgatccgaaaaccgagactacgcaagatagttcagtagctgaacttctttagaatacaaaaatacttttttgtctaaatatttggaatttataacagtac

SEQ ID NO: 902 - DNA, 1462 bp, unidentified
  source 1..1462: mol_type = unassigned DNA; note = element_0f1cc2e
  misc_feature 1..2: note = core
  misc_feature 3..236: note = LE
  misc_feature 237..1274: note = CDS
  misc_feature 1275..1462: note = RE
  misc_feature 17..183: note = bridgeRNA
cttgtatgtttcgttgagaggcgtgaggatgatttcacgtttcggcggtaaggccgtgcggcccttaggccaagtgtgtttgagcctgtcccgtagataggccaccgctcctctgtttgcacgccgtggagaatcgaaggccttttgagcctgcatgttcaaggtaggcgcgagcagtatgtccgtagccgcggaccggagcggcagccgagaccatcctagcctgaaggaggtctatgaacaagcttgtttccagttccccgtcaacggtatattgcggcatcgacgtgagcgccagttctcttgctgtggctctgatcgagttggatgactgtaccgggcagcgagagtttgccaacaacgccagcggccacaaggcgcttgtggtctggctgggcaagcgcaacgccctggtgcgcgtttctctggaagcgaccggtgtctattctctggatcttgccctggcgctggatgcggccgcatgcattgaggtggcagtgctgaaccccaagctggtgaaccgattcgcgcagacgctgcgccgctcgaagaccgacgcggccgatgcgctggttcttgccgagtacagccggaggatgccctttactgcgtggcagaggcctggagccggccatctccgcctgcgcacgattggccgctacatcgagtctttggtagtcgagcaggctgggttgaagaaccgtttgcgcacggcgcaaagcacggcaaccacgccgcgcgcggtgacggtggatttacggcaggctctgtccgcggttcagcggcgggtggcgaagatgcgtcgcgaggcgataaagctggtgcggaacgaggccgcgttgtgggagcggtttcagttgctggtcagcgttccgggcatcgcggaaatcagcgcgctgcagatcctgagcgagctggtgctgctggcgcctgcgatgactgtgcgccagtgggtggcctatagcgggctggacccggtgcatcaggtgtcgggaaccagcgtgcacaagccgtcgcggatcagccgtgccggcaatcgtcacctgcggcgcgcgctctatatgccgaccttggctgcggtgcgttgcgatccgcacatgcgtgcgtttcaccgggcgctgctggagcggcacaaaaccggcttgcaggcgttgatggcggtggcgcggaaactgctgcacgccatctatggaatcttcaagagcagcaggccctacaacggcagactgctgtttccgaatcttctgttggagttagaatcaaccgccgggtgaaacggaagcgggctctgctgggaagcaaccatgccgagggataacccggcgggctcatcctgacgatgaaccaaaaggggcgggcatgaaagcagacgctcgccccaaaatcatcggagggatagaccccccatgccttgaaaatccaaactcgacccgcagaaaactcttgacttgcaacagagaat

SEQ ID NO: 903 - DNA, 1361 bp, unidentified
  source 1..1361: mol_type = unassigned DNA; note = element_0f1f542
  misc_feature 1: note = core
  misc_feature 2..71: note = LE
  misc_feature 72..1097: note = CDS
  misc_feature 1098..1361: note = RE
  misc_feature 1127..1357: note = bridgeRNA
taatgagatggtcacccccaccctacgagcgggttacgctagtagggtgtttttctttctggagaccatcaatgcagagcgtgacgctggtagggattgatctgggcaagcattcgtttcatcttcacggtcaggatcaacgaggcaaggccgtgttccgcaagaagatgagccgtaagcaactggctgagtttttcgccacgttccatccgtgcacagtcgtcatggaggcatgtgcaggtgctcatcacatggcccgtaagctcgcaggcttcgggcatcagatcaggctgatctcgccgcagtttgtgcgcccattcgtgaaaggcaacaagaacgacttcgtggatgccgaagcgatctgcgaggcggcttcacggccgtctatgcggtttgttacgccgaagactgaatcgcagcaaatgctctccgccctgcatcgcgtcagggaatcactgatccgcgaccgcacgaagaccgtcaaccagatacacggctttctgctggaattcggtatcagcttgccagttggtcaggccgtcattacccgtttgccagcggtactcgctgaacattcactaccacctgccttggtttcgattcttgagcggctgcacgctcacttcaagtacctcagcgggcaaatcgcagaaatcgacaaggaaatttcccggcagctggccgacgacaatctggggcagcgattgctatcgattcccggtgtggggccgatcacggccagcgtactggcggcagaaatgggcgatggcaagcagtatggctgcagccgcgactttgccgcttcagtcggacttgttccgcgacagtacagtacgggtggcagagccaacctgctcggtatcagcaagcgaggagacaagaacatccggcgcctgctggtgcagtgcgcccgcgcttacatgcaacggcttgagcgacaaactggccgacttgccgagtgggtcagggcgatgctgacacgacgacattcgaacgtcgtcgcctgcgccctggcaaacaagtttgcccggacggcttgggcgctggcaacccgccacacgacctttgatgcgggagcgggcgccatgccagcctgagcactcgcttcccgaatcgggttttaccgcagtctacccacctggttttgcgattgctgaaattggatgacgtgaacggcacaccggcctgacggaaaacctgtctacaaaattggccttcaaggccgcgggccttttcaggaccgtcaggcgcgactctcatcgtggcgcggggagcaatccccacaacgacgccggatagatttaggcaagccaaccacatcatcaaagatcagtgttgcaaaaacgggcgtgaccatagat

SEQ ID NO: 904 - DNA, 1454 bp, unidentified
  source 1..1454: mol_type = unassigned DNA; note = element_0f2101d
  misc_feature 1..2: note = core
  misc_feature 3..177: note = LE
  misc_feature 178..1437: note = CDS
  misc_feature 1438..1454: note = RE
  misc_feature 31..217: note = bridgeRNA
ccattaccttcttggtggccccgcaatggggtgcccggcctgcggagttggcatgactttctccccctgtcgaacgcatggcctggggggtggtgtcaccggctccggaggcactgacagaccgctgattaggggcatgaccaccggcttctcgcaggtcgggaggctcttcgtaatgtggatgtggcgatcggtgccgtgggacggccgggcgggaacgaccagaggacgcgtgtgatcgacgtcagtgagatcggcgccttcctcggcctggacgtcggcaagggcgaacaccacgccaccgccgtcaccccggccgggaagaaggcattcgacaaacgactgcccaacagcgaaccgaaactccgtgaggtcttcggcaagctgcaggccaagcacgggaccgtgctggtggtggtcgaccagcccgcgtccatcggagccctgccgctggccgtggcccgtgacacgggctgccaggtcgcctacctgccagggctgacgatgcggcggatcgccgacctctaccccggcgaggccaagaccgacgcccgcgacgcattcgtcatcgccgacgcggcccgctcgatgccgcacacgctgcgagccatcgagcttgccgacgaagcggtcgccgaactgggaatgatcgtgggcttcgacgacgacctggccggcgaagccacccgcatcagcaaccggttgcggggcctgctgacgcagatccacccgtcgctggaacgcgtgctggggccgcgagtgcagcacccggccgtgctcaaactgctcgaccagttcggttccccggcccagatccgcaaggccggacggcgtcggctggtcagcctgatgcggccgaaggcaccgcggatggccgagcggctggtcgaagacatcttcaccgccctggacgagcagaccgtgatcgtgcccggcacggatgcggccgcattgatcgtccccagcctcaccaactcgctccaggcggtccttggccagcgcaaactcctcgccgccaggatcgagaaactgctggaggcccaccctctttccaaggtcctgacgtccatgcccggcatcggcgtcaggaccggagccaggatcctcatcgacgtcggcgacggcagcagcttcccgtccgccgcccacctcgccgcctacgccggcctcgccccggcgacccgcagctcgggctcgtcgatccgcggcgagcaaccatcccggcggggaaacaagcagctcaaacgggctttcttcctctccgcgttcgcggccctggccgaccccgcctccagggcctactacgacaagaagatcactcagggcaagcaccacacccaagccctcctctgcctcgccagacgacgagccgacgtcctcttcgccatgctccgcgacggcaccttctaccaaccccaacccaccccgaccggttgacgaaacccataggggca

SEQ ID NO: 905 - DNA, 1372 bp, unidentified
  source 1..1372: mol_type = unassigned DNA; note = element_0f211b9
  misc_feature 1: note = core
  misc_feature 2..80: note = LE
  misc_feature 81..1097: note = CDS
  misc_feature 1098..1372: note = RE
  misc_feature 1131..1367: note = bridgeRNA
caatgaaatggactcctccctcctacggcgtcaagcgccagactaatggtgcagccacaagtcccggagggggagtcagcatgaaccttagtcgcattggtctggatctggcaaaacaagtattccaggtgcacggcgttgatcgtcacgagcatgtggtatgtcgtcgccaactcaagcgggcacaggtgcgggatttctttcgccaactgccgccgtgcctggtggcgatggaggcctgcggcagtgcgcactactgggcgcgcgagttgcgggagctgggccacacggtacgcctgatcgcaccgcagttcgtcaaaccctacgtcaagggtgacaagcacgatgcacacgacgccgaggcgatctgcgaagccgccagtcgtccgagcatgcgctatgtcccggtgaagagcgcagagcagcaggccgtgcagtcggtgcatcgggtgcgcagtcgtctagtgcgggcccgcacggcgttgtgcaatgaggtgcgtggcttgctgggtgagttcgggctgatcgcgactcgacgtgggcgagcggcgacgatggccttgctcgaaacggtcatggctaccgaaccggcgtccttgccggccccgatgggcgagctgttgcgtgaattgaaagatgaattgcagacgctggaggcgcgcatcgctcgactggagcgacagattcaggctcacgtacgtggcgatgcccgcatccagcgcctgctggcggtggaaggcatcggcccgatcagcgccagcgcggtggcggcatccgccggtgatgcacggcaattccgcacgggccgccagtttgcggcctggctgggcctggtgccacggcagcactccacgggcgggcagcagcgcttgggcaacatcagcaagcgcggcgatacctacttgcggaccttgctcatccatggcgcccgtgcagtcgtgcgctgttgcgccaacaagaccgatgcccgcagccgctggctgcaaggtctgctgcaacggcgtcctgccaatgtcgtcgccgttgccctggccaacaagaatgcccggatcctttgggctttactcagccgggagacatgctaccggcccggttgagcgttcctgccacaccgtagttgaaacatccaccacgattgctcagtgaatgacaatgatgacgaaccggtcgaaccggcctgcatgaaacctggtttatacgtgggctccctgctgcagtgaagcaaagccgttagggcgatcaggcatgtaggcgcgcatttcatcagggctcgggagttgcaacaccattccatgaagccggatatacggatgcagtcgtacacaggtttgaaatcaagacaaacactggcaaaccgggaggagtccatata

SEQ ID NO: 906 - DNA, 1570 bp, unidentified
  source 1..1570: mol_type = unassigned DNA; note = element_0f23c64
  misc_feature 1..2: note = core
  misc_feature 3..262: note = LE
  misc_feature 263..1408: note = CDS
  misc_feature 1409..1570: note = RE
  misc_feature 34..282: note = bridgeRNA
ttggtactctataagtgtagatacaaatcataaatatatgatttaacatctgcacttattttaatttataataaagggagtaatttggtatgacgactttagaattgggttttaacatccgtagctaaaactgtcagccatcccttattataaagattcgattaagcaggttgaaaccgtacggctttcgtgtaactaaccaaaatgaattgtaataagtgtgggtggattaaaattacaataattttttaggaggattaacatgattagtgttggaattgatgtttcaaaaggaaaaagtacagtatgtatattgaaagaatatggtgaggttattagtgaaccacatgaaataaatcatactgaagctgatttaaaagcattagttgaatctatttctgaattaaatgaagaaactagagttgttatggaagcgaccggtgcataccatttgccactacttacttatcttaaaaatcatggtatatttgtagccgtaataaatccattaattatgaaaaaatattctgctataggattaaggaaaggtaaaactgataaattagattctatcaaaatagctaattatggaattgataattggtttaaattaactgactatgaagcaacagatgaggtgtattctgaattaaaattattaggtaggcaatattctcattatatagctatgagaatagagagcaaacttgtactaagtaatctattagatagaacaatgccaggaattaaaaatctattaaaaaatagatccgataagccagagaaagataaattaaatgattttgttaaagaatactggcattacgataatattaccaagaaaaatgaaaagcaatttataaatagttattttaaatgggcaaaaaataaaggataccatcaaagtgaaacaaaagcaaaacagatatatgctttagcacaagaaggcatccctacactatcttctagtaccccatcaaccaaaatgttagtattagaagctgttcgagttcttagcgaaatagatagaactctatctatgatattatcacaaatgcaagaattagcaagtagtttaaaggaatacaatgttgttagaaatatgcctggagttggagatacattggctccacgcttaattgctgaaatcggtgatttaaaacgcttttataataaaaaggctttgatagcttatacgggtattgattcacctccttttgagtcgggacagtttgttgcaaacaaacgtcgtatttctaaaagaggttctgcattattacgaaaaactggatatgaaattatgaaatgtatcaaaagtgccaaaccaaaggatgatcctatatttttatatatgttaaaaaagaagcagaaggaaaacctaaaaaagttgctaaaattgctgcattaaataagtttctaagaatatactacgctagagtaaaagaagtctataatacttaaatttagatagtatctatatctaaattaaacagaatttctgtttagtttatttgtcatgcaaaaaatatataaaaaacctgctaaaaaaaacttgatttttcttagcagg

SEQ ID NO: 907 - DNA, 1488 bp, unidentified
  source 1..1488: mol_type = unassigned DNA; note = element_0f27e0d
  misc_feature 1: note = core
  misc_feature 2..252: note = LE
  misc_feature 253..1473: note = CDS
  misc_feature 1474..1488: note = RE
  misc_feature 9..243: note = bridgeRNA
cgttactttcttcgtgacccgttcagcggcatgctggacggtgacagccagccgggctcggcatgactactgcccccctgtcgaaaccatgatctggggggggtgttgccaccgagcccggtcgggcagtgcgtgatcgctgataggggctggacccgaacccctggttcgaggccgaccgtaacgtggatgccgagacacactccccaccgctggctgccaaaacaccgccagcacgaacgggaggacaacgtggtcaccctcaataacaacccacccgagatcgaggtgttcatcggcctcgacgtcggcaaaggcgaacaccacgccgtcgccctcgacccaggcggcaaacacctcctcgaccgggccctacccaacgacgagggaaaactccgcgccctcctcgccgaactcggcaacccgacacggatcctgctcgtcgtcgaccagcccgcgacgatcggcgcgcttcccgtcgccgtcgcccaggccgccggcacgcacgtcgcctacctccccggcctcgcgatgcgccgcatcgccgacctccaccccggagaagcgaagaccgacgcgcgtgacgcgaggatcatcgccaacgcggcccgcaccatgccccacgctctccgctcgatccagatcgccgacgaacaagtcgcggaactggccatgctctgcggattcgacgaagacctcgccggacagatcacccagttcacaaaccgcatccgcggcctcctcacccagatccaccccgcgctcgagcgcgtcctcggaccgaggctggatcaccccgcgatcctcgacgccctcgagcactacgcttccccggcaggcttccgagcagccggagagaagcgcatcgcgaaccggctcatcaagcgcgccccgcgcaaggggcgagtttgggctgcggagatcatcgctgcgctcgacgcgcagaccgtgaccgttaccggcacgaacgccgccacgctcgtcctcccgaagctcgacgcacaactcaccgcgttccgggatcagcgcgacgaggtcgcggccgaggtcgagcgcctcgttgaaattcaccctctttctccggtcctgacgagcatgccgggagtcggcgtcaggaccgcggcgaggctcctcaccgaggtcaccacgaaacacttcccaaccgcaggacacctcgcttcctacgccggcctcgccccggtcacgcggcgctccggttcgtcaatccggggcgagcacccctccagacgcggaaacaagatcctgaaacggaccatgttcctctccgccttcgccgcgctcagagacccggtttcacgcggttactacgaccgcaagatcgcgcagggcaagcgccacaaccaggccctcatcgctctcgcacgccgtcgctcggatgtcctgttcgcgatgctccgcgacgggactatctaccaagctcccgcgtggtcagatcaagccctcacggcttgacaaaccacatagggg

SEQ ID NO: 908 - DNA, 1524 bp, unidentified
  source 1..1524: mol_type = unassigned DNA; note = element_0f29ec5
  misc_feature 1: note = core
  misc_feature 2..119: note = LE
  misc_feature 120..1136: note = CDS
  misc_feature 1137..1524: note = RE
  misc_feature 1180..1490: note = bridgeRNA
gaataaaagggacttccccgtcccgagtgatccgcgcaattgcggggtacggcatcaaagtgccacgatgggaagtgcgaactctcatcaactcactcgtttgttggaaggggaagtccatggcaatcgtatccgttggcatcgatctggcaaagaacgtctttgccgttcacggcgtcgatgagtcgggcaagcccgcgctggtgcgcccgaacgttgcgcgcggcaagctgctcgaactcattgcctcgctgccaccgtgcctgatcggcatggaggcctgctccggcgcccaccactgggcgcgtgagtttgcgaagttcggccacaccgtgcgtctgatggcgcccaagttcgtcatcccctatcggctctcgggcaaacgtggcaagaacgacgcggccgacgccgccgccatctgcgaggccgtcacccgacccaacatgcgcttcgtcccggtcaagagcatcgaacagcagggccagttgctggtacaccgcgcccgccagggttttgtcgagcagcgcaccgccacgctcaaccgcatccgcggtctgttgtcagagcagggcatcgtgttgccactcaaagccgccgtcgtgcgccgcgaaacgatggcccgcctggaagacctgcccggctgggccaacaccgtgatcggcgatctgctgagcgaagtcacccgcctggatgaacgcatcagccagtacgaccagcacatccgcgccatggctcgccagagcaccgaggcgcagcgcctgatgcagctctcgggtatcggagagaccaccgccacggcgctgctgagcaccatcggcaacgggcgcgacttcaggtgtggtcgccagctgtgctcctggctcggcctggtgcccgggcagtacagctcgggcggcaagcagcgcctgggccgcatcaccaaggccggggacccgtacctgcgcagcctgctggtgctcggtgcacgggcggtgctggccgcagccaagaacaagagcgatccgatcagtcgctgggccaacgcgctggcgcagcgccgggggtactggaaagcggtggtcgccatcgccgccaagaacgcccgcatgtgctgggctgtgctcagcaaaggggatgacttcaggctaccggtctgaaggtcgccgcatcgcaaaagagaaagcagcagggagattgatttccaccaccgcgtgcagccagcgttgatgagtcagggttggacctgcgcggggcgtgaccgtttaactcaaggagaccaggcccggtgctgtcgatcaggcaagaccggccatcctcggctaacgaatgggtcccccgcgcgcgtctttcatcagggtccgctgccagtcaaagcagcatcaatgaccgtttgtagtttcgctgtccgcatcccttgctcgctgagcaaccgggctgggcgctgaaggtggagattggatcgagtcgaaacacattccgtgatccatcgcttcgcgatgcatcacggccggatcagtgtttgactttcggggggaagcccttgta

SEQ ID NO: 909 - DNA, 1362 bp, unidentified
  source 1..1362: mol_type = unassigned DNA; note = element_0f2a312
  misc_feature 1..2: note = core
  misc_feature 3..76: note = LE
  misc_feature 77..1108: note = CDS
  misc_feature 1109..1362: note = RE
  misc_feature 1081..1350: note = bridgeRNA
tgatggggtggacgccccccggcggcatcgatgtgccaaagtggaggtgttgaacacaccacttgaggaggcgcccatgtcggaagttaccacaatcggtctggatatcgcgaagaacgttttccacgcacacggtgcagatgcgagcggcagtccggtgttcagccgcaagatcagccgcgcgaagttggtggaattcttcgccaaacagccgcgttgcctggtggcgttggaggcatgcggaggagcacactactgggctggcgaactcacagtgttgggtcatgaggtgaaactgatccctccggcctatgtgaagcccttcgtgaagcggaacaagaacgatgcggtcgatgcggaggccatctgcgaggcagctcagcgacgaaatatgcggtttgtggcgatcaagagcgaggagcaacaggcctcggccctggtgttccgcacacgcgatctgatggtgcggcagcggacccagttgatcaatgcgatccgcggccacctaaccgaatacggctgggtcgcacccaagggaccgtcgcacatagctgtactgagtaacctgctcgatggcgagatgggctcgtctcttcccgatgcggccaccccgatgttccgcacgatgctcgacctgctggaaatactcaacgggaggaccagcgaactggacaaagagatcacacgacgagcccgtgaggatgtgatcgccaagcggctcatgaccataccaggcgtcggtccgatcaccgccacagcgatcgctgccctggctccgccggttgggacgttcaccaaaggtcgagactttgccgcatggttgggtctggcgcctcgtcagagctcgagcggaggcaagcagaaactgggatcgatcaccaagatgggcgaacgaacgctgaggcgtctcattatcatcggctgtagcgcagtcgtgctgcacgcgagcaagcgaggtgcgccggcaggttcctggcttgaacagatgatggcacggaagccgcgtatgctggtcaccgttgcccttgccaacaagacggcgcgcatcatctgggcgatcctgatggagcaagaggaatacaaagctccggttgcagctgcggcgtaagccaaggcggaccagaggtcgtcggagacggagtcggtcgaaggaaggtatggcgcaacagtcggcgagatgggatcggtaagccagtgcaaaccgctgtgccttgagcacaccgtgggtgatatggatccgatccgcgaactcccgtacgggcccgcagcctctggtgctgcatcagaggccggacagatggcagcatccgacaacgtgctagatcttcaaatgccgcttgcgtcttaaggggcgtccacaga

SEQ ID NO: 910 - DNA, 1338 bp, unidentified
  source 1..1338: mol_type = unassigned DNA; note = element_0f2f54d
  misc_feature 1: note = core
  misc_feature 2..7: note = LE
  misc_feature 8..1096: note = CDS
  misc_feature 1097..1338: note = RE
  misc_feature 1106..1332: note = bridgeRNA
taatggaatggtccgccccgtcctcccgcagcatcatctggcagtcacaccaaaggaggttgcaatctccctacgcaatgcgccgcgccctgcggcagtctacggagttgatatcggcaagaatatcttccacgtcgtcggcgcggacagcggcggcgagcccgtccagcgagctcgcttccgacgcgacacgctgctgcagttctttgcgcgagcagcgccggcggcaggatcacaatggatcgccaggagactgcaagcgctggggcacaaggttcgcctgatcccggcacagttcgtgaagccctacgtgaagtcaaacaagagtgacattatcgatgccgaggccatcgccgaagcggccactcggccgacaatgcggttcgctgcgatcaagagcgaggaacaggctgacctccaggctctgcatcgggtgcgcgaccagatgatcggaacgcgaactcgtctcatcaaccagatgcgggcgttttgcctggaatacggcattgcattgagacagggagcgggcctgttcaagctcgacttgccgctggtcctcgacgatgcgtcgaacgacctctcgccggcgatgcgtaaactgctcacggatctgttcgccgacctgcgccggctggagcagcgcatcggcgacgtgacgagggagatcgccgcgattgcagatcgagaggatgttgcccgccggctcatgacgatcccggggatcggagcactgggcgctaccgcccttcttgcggcggtcggcaacggacgtcaattccagaaagcccgcgacctggctgcatggctgggccttgtcccaagggaacactcgaccggaggcaagcagaagctcctcggcatcagcaagcgcgggaaccgctacgtccgcaagctccttgttcatggcgcgcgatcctgcttccgacatctggaccgaacacgggatcgtcttggaagctggctcgatggcctgcagagcagaatgcacccgaacaaggccgttgttgcactcgccgccaagatggcgcgcattgtctgggttgtcctgaccaagccgggagcgctctacgaacgcagaaatcctgcattcgcctgaccctctcggctcgattgcaaggctcgggaatagcgatgacgaaacagtggatcagcatgccgtaagccctgtgcaaaaaagcgggcttcgtgcccgaaccatttattgggaacggcgtgcgcggatctcatcatggcctggctgcaacagcagtccactcgcgagaggccggatacatttatgcaactggaatcgtcgtcggcgatgtcgcgaaccctggcacggacggggcggaccataca

SEQ ID NO: 911 - DNA, 1338 bp, unidentified
  source 1..1338: mol_type = unassigned DNA; note = element_0f2ffa4
  misc_feature 1: note = core
  misc_feature 2..231: note = LE
  misc_feature 232..1323: note = CDS
  misc_feature 1324..1338: note = RE
  misc_feature 4..227: note = bridgeRNA
cagtgatgatggtgtaggcgagtcccgcagcggtcgtcctgactcggcgcctgactgacttcgggtcttcaacgggatctgtcggtcgttccgctgcgggactcgtgtgcactcaccggacgagggtgtgtgacctcataggagcctgtgccagcaggcacccatcactgtcttgtccgctcgctcggctggtgcgtgccgcccctgaccagtcgaaggagaaggacgacgatgaccaccatcgcatcagacagctcgagagaccagatcgagatcgccgcaggtgtcgacacccaccaagacacccacactgtcgccgcggtcgatgcggccggccggctactgggccactccacgttcccagccactggggcgggctaccacgccctgctggcctggctacacgacctcggggtggttctggtcgtcgggatcgagggcaccggcgcctatggcgccggcctggcccgctacctgagcagtcagggcatcgagatggtcgaggtggaccggcccgaccgcaggacccgacgcagcgctggcaagtcagaccccatcgatgccgaggccgcagcccgcgccgccctggcccaggtacgcactggcacgcccaaggcccgcgaagggaaggtcgaggccttgcgcaacctacgcgtggcacgccgcagcgcagtcgaccagcgcgcggactgccaacgacgaatcaagaccctgatcgtgaccgcaccagaagagctacgcgcccggctgcgtgtcctgagcgaccgagagctgctgaccacctgcgccgctctgcggcccgacaccgagcgcgtcagcgaccccgaacaggcaaccaaggtggccctgcgcaacctggcccgccgacacgctgccctcgtagcggacatcgccgagctcgacgcgctcatcgagccactggtcgccgcgatcaacccggatctgctccagctgaacggagtcggcgccgacaccgccggacagttgctggtcactgccggcgagaacgctgaccggctccgctccgagggcgcgttcgcgatgctgtgcggcgtcgcaccgatccccgcctcgtccggcaagatccaccgccaccgcctcaaccgcggcggcgaccggcaagcaaacgctgcgctgtaccggatcgttctctgccgcctgcgctgggacccgcgcacccaggcctacatgcgccgacgcactgccgaaggactgtccaagaaggacgtcatccgctgcctcaaacgcctcatcgcccgcgaaatgttctacgtcatcaccaagacagcaaccgacaaccagacgctcaccatggccgcttgacatccataggagcat

SEQ ID NO: 912 - DNA, 1423 bp, unidentified
  source 1..1423: mol_type = unassigned DNA; note = element_0f34037
  misc_feature 1..3: note = core
  misc_feature 4..138: note = LE
  misc_feature 139..1158: note = CDS
  misc_feature 1159..1423: note = RE
  misc_feature 1182..1421: note = bridgeRNA
agatggtatggacgcctccctcccgccgaaggggcggtgagggggagtaggcagagaggagccctcgctatacccgacggcatcgaagtgccaaagtggaggttctgcaacaaccactgagggtaaggagggctcgaaatgaaggttacgacatttggactggatttggcaaagcgggtgttgcaactgcactgggtggaaatggagacgggtgaaatctgtcggcggcaactgaagcgcggccaggtgctggagttcttcgccaatcgggagcggtcggtgattgcgatggaagcctgcggcagcgcccactactgggcgaggaagctcgcggggctggggcacgaggtgaggctgatcgcggcgcaattcgtgcgcccgtttgtgaagaccaacaagaccgatgcggccgatgcacaggcgatctgggaagcggcgcaacgccccgggatgaaattcgtggcggtgaagagcgaaggccagcaaggcgtgctgatgctgcaccgcatgcgcgcgcagctggtgaagatgcgcacgatgcagaccaaccaattgcgcggattgctgtacgaattcggcgcggatctgccgcagggccggcaacaaggggtggagcgcattccgagtgaactggacaagctggaagcggtactgccggcgatggtgatcgagaccattcgcagccaactgaagcgcatcgaggccttggaccaagacatcgcccagatcgagcggcaccttgcggcctggaagaaggacgacaaagcggccaagcggctgatggatattccgggggtggggctgctcacggccacggcggcagtagcgacgatcggggatgccagggccttcaagtcggggcgggagtttgccgccttcgcaggcctggtgccccgccagagcggcaccggcgggcgggtgaggctgctgggcatcagcaagcgcggcgatgtgtatctgcgcaccttgctgattcacggcgcccgctcggtcatcacccacggcaagcaacgcgagccctggctcgagcagttgctttcgcgccggccgttcaatgcggcggtggtggcgctcgcgaacaagatggcgcgcacgatctgggcgctgctggctcacgatcggacgtacgaaaagggttacgtggcggctgccgcgtagaagattaacgaaccacaaggagtggatcgctgaaaggttgcgcaggttgatgtgcgaatgatggcgtgacaggtcggaccgcggggaagtaagcctgaatgattcccagtccttcgaggactccaaggagatgaggccttccccggcgaattccatcagggccagcagacctcggtctgcacaaacaggccggatataagactgcagccagatcctcaagcgccagcatcaaacatcacttgccaaaccgggaggcgtccatata

SEQ ID NO: 913 - DNA, 1340 bp, unidentified
  source 1..1340: mol_type = unassigned DNA; note = element_0f3f9e9
  misc_feature 1: note = core
  misc_feature 2..79: note = LE
  misc_feature 80..1102: note = CDS
  misc_feature 1103..1340: note = RE
  misc_feature 1100..1336: note = bridgeRNA
taatgggatggtcagcccgcctagcctcggcaagcctaaacttgccgaggctcccctcttcagcttcggaggatttgttatggctaccgttgcattgctgggtatcgacttgggcaagcactgcttccatctgcatggccaggatgtaagggggcggcaggttctgcgcaaaaagctcactcgaacccacctgctgccgtttctcgctcagttacctgcctgcgtgattgctatggagtcgtgtggtggagcgcattggctggctcgccagatcagcgtccatggccatcgggtgaaactgatagcacctcagcatgtcaggccattcgtgaccggtaacaagaatgactatctcgatgctgaagcgatttgcgaggcagcttgtcgcccgaagacacgttacgtctcggtgaagacgacagagcagcagttactctccacagagcatcgtattcgagagtcgctggtccgtaggcgcactgccaccattaaccagatccatggttttcttctggagtttggtattgctctacccaacaccttgagtgcgctggctcaggtgccgatgctactcgaaaactcagataacgacctgccgctgcgcttccagcaactgatgctcaagttgtgggacgatatccagcagctgacgtcagagatcaagagcttggatcactccctgcagtcgagattgagacaggatgagatggccgctcggctcttgagtgtccccggtattggccccgttaccgccactgcagtagtggccaatgttggcgatgcgtcccacttcaggagcagtcgcgatttcgcggcctcgctcggcctggtgccacggcaatactcaacagggggaggaaccgttctgtatggcatcagcaagcggggcgatagctacttgcgacgactgtttgtccaatgcgcccgttccatcatgcgcaaggtcgagtgtcgcagcgacccgctaggcgcctggattcgtgatctgatgatacgtaagcaccccaacaaggtggcatgtgctttagccaacaagttggctcgcatgagctgggccgtgctgcgacgcggcaccagctataacccgcagtacctggcgtagaaccccaaggcttttgcgacgtctgtacatgatgacgataaacggcacactgcctcgctgcgaccctggtaaccaaagcagtcttcgagactggctctctttctaggacagtgaggcgcggcttctcatcgagggccgagcgcccatgcagtgcgctcaaccgagcccggatacattggcgcaagccagctttatctgtcgtcgtgccagaggttgcagaagatgggctgaccataca

SEQ ID NO: 914 - DNA, 1377 bp, unidentified
  source 1..1377: mol_type = unassigned DNA; note = element_0f479dc
  misc_feature 1: note = core
  misc_feature 2..89: note = LE
  misc_feature 90..866: note = CDS
  misc_feature 867..1377: note = RE
  misc_feature 1141..1369: note = bridgeRNA
caatgggatggacgcctccccgccctcggcatctaagagtgccagactggagttgcgacacaaccagtcacagcgaggaggagtccgccatgaagcttacgcgcattggggtcgacatcgccaaacaggttttccagctgcatggcacggaccgatttgagcgaaccgtttggcgccgccgcctgtcccgggaccgttggctgcaagcgctgcgcgagatcgccgagccagggtgtgagatcggcatggaggcatgcggtggtgcccatcactgggcacggcagctacaagcgctgggttatcgcgtgaagctgatcgccccgcagttcgtgaagccctacgtgaagagcaacaagaacgacgccaacgatgccgaggcgatctgcgaagccatgagccggccgagcatgcgcttcgtcgcggtgaagagcgtggcccagcaggatctccaggcgattcaccgcgtgcgcgcaagcctggtggagcagcgcacggccaaaggcaaccagattcgcggcctggtcgccgaatacgggttggtcgcgcccaaggagatgtcatcgctgcggcacactatgccgacgtggctggaagatgccgacaacgggttgagcttctgcttccggcaagtgctcgatggtctgtggcgggacctgcgtgcactggatgagcgcattggcgaggtggatcgcgagatcaaccgcatcgcgcacgctgatcccgaggcacggcgcctgcagcagttgcgcggtgtcggcccgatggtcgccaccgccctcctcgccgccgtcggtgatgccaggcagtttgccaacgggcggcagatggctgcgtccttaggcctcacaccgcgtcaacacagctagggcggcaaggatcgcttgcttggaatcagcaaacgaggcgacgcgtacgtgcgcaccctgctcgtgcatggcgcccgatcggcgttgcgaacggcgtccaacaaggacgaccgactgagccaatgggtgctacgactctcgcagcgagcgcatcccaatgtggcctgtgtagccctagccaacaaaaccgcccgtctagcctgggctcttctccgtcatcaatgcgattaccaaccggccctcgcggccgcctgaaagagacgtccaaacaccatccatccacgattgctaagcccaccgcacgatggcgaaccggtcgaaccggcgccggcagaaccctataaggtctttgtgcccttaagcacgcggaagcgattgggagccggcgcgcgactagcccatcatggcccagcaccgcaaagcggtaccgcagttagaggccggatatacgtgtgcagtcgacacggacgccagagcacgggaggctttgcaaaggggaggagtccatata

SEQ ID NO: 915 - DNA, 1646 bp, unidentified
  source 1..1646: mol_type = unassigned DNA; note = element_0f4c6a2
  misc_feature 1..2: note = core
  misc_feature 3..300: note = LE
  misc_feature 301..1482: note = CDS
  misc_feature 1483..1646: note = RE
  misc_feature 59..271: note = bridgeRNA
ctggtatattgttgaagactcataaaacaagtcattcacaatatactcactctttctatcaatcctgtttaaccgtgattgataacggttcgatgtatcttgtagaatattgaaatatgtgaatgtggatttgtatttctccttgtagctttgactactttaataagggtcttaccacgccttattccagaacaatgattagttagatgagtctttgaattcgtattttgcaccaggttttgtggtttaagtgttgtggtatcaaacacatcgcatttatttttgaaaggatgtattcttatgtatttagtcggtattgacattggtaaactcaaacactctttctgtctccttgaaaaggaaacaggtgaaattcttgttgaacctgtattcttcaaaaacaacagagatggattcaatgcgctgctttcttcctttaagcatttacctcagaaagacattctcatcggtacggaagatacaggtcactacaatcttgctttactgaagtttctcttagacagaaactatcaggttgcattgatcaatcctgttgctactaaccttacacgcaaaatgcagggtggaatctctaagaacgacaagctggatactctgactatctgtgatgtactttcttccagtcagtgtgtcaaatcttaccgtatttcaaaatacaacagctttgatctgtatgagcagaagctgctgactagagaacaccacaatctcaaggaagaagaaaatcaactctcaaatcgcctgcagaaatgcatagatgtcgtatttcctgaattcaacagtttattcaagtccaaatatggaattgtgcatatgaacatactgaaagaatttggaagcgctgatgcgattgcacacgcagatatccgtacactacgtaaatgctttgacaccggcagaggcaagcacatctctcttactgctgaagagctgaaggaagcagccagaaattcaattggcttttcatccagttcagaagctactcagatcaagcacctggtagcacagattgaactgatcaaggaacaaatcgctgaaatagataaaaaaatagaagagttctctctccaaaacaactctcctattctctccattccagggatttcacatttctctggtacttcgattctagcagaattaggagatatacacaactattcaaagccttctcagatcattaaatttgcaggtgtggcaccgttgacctatgaatcatcacagtttaccgcacaacacactgccattacaaagaaaggctgtaaatacctcagaaagaccctgtatcagatcattacacctgtcatacagtacaatcccgttttcaggaaattctatctgctgaagatagcccagggaaaaggacacaggtgtgcacagggtcactgtgtaagaaaactcatgcgagtcatctatcacctattaagcacaggtacacagtttgatccagctttattgcgatagagatagaaacaattgaattacagccaacagcttctgctgaagttgttttcatcatgcctgaatattcacattttcaaagaacagataccttctgaaactaacttactcaaagaatttcattttcaaactttttcatcaatttctgttgacttttatatagttag

SEQ ID NO: 916 - DNA, 1168 bp, unidentified
  source 1..1168: mol_type = unassigned DNA; note = element_0f4c85c
  misc_feature 1..2: note = core
  misc_feature 3..214: note = LE
  misc_feature 215..1159: note = CDS
  misc_feature 1160..1168: note = RE
  misc_feature 10..189: note = bridgeRNA
cttgtatgtcgtaaggtgagtctgtcgggggtggagggactgagctcgcttctgcaagacagacggtaggagaactcccccactcctggctcacgacaagcgccgataaggaatccatcgactcgagtagccgctcgagatcgaccatatctgcaagcctgcgcacaggtgagccccccgacagactcattcatcttgtcggccggaatcgcacatgacaacccaaccccccatcatcggcatcgacgtggccaaggacagcctgagcctgtatcgcgccgacctggaccagtactgcaccctggacaatgacgcccgcagcatccgcgcctggctgaagacgctccccggcgactgtgccttggcagtggaagccaccagcacctatcacgtgcagctcgtcgacctggcccatgcgcgtggtcatcgcctctatgtcattgatggctatcgcctgagcaattaccgcaagggcatcggtggccgcatcaagaccgacgccagcgatgcccgtctactggcccgttatctggcccacgaacaggcccaactgcgggtctggcaacccgccggcaaggcttaccggctgctgcaaagcctgctgcgacgccgggcgacgctgatccgcagtgccacggcgctgcgccagagctttggccatgacacccagttcaaggtgtcgatgaaagcggcgctcagctccctcaagcgcctggagcagcgcctcgatcaggacattgcccaggccctgaaggacgctggcctggccgagcaggccaagcgttgccgggccattgaaggcatcggcccgctaaccgcagcagccctgaacatggcctttcagcgtggccccttccgcaacagcgacgccttcatcgccttcctgggcctggatgtgcgcgcgaaggaatcggggcgctacagcggacgccgcaagttgagcaaacagggcgatccggaggtccggcggctgctacacaatgccgccatggccgccagtcgcaccaaagcttggcagaagctctatctgggctacctggagcgtggtctgaaaaagaccgaagccctgaccatcctggcacggaaactggctcgaattgccttcgccctcatgaagacccagcagccgtatcggtcaccaacctgtacggcggggtagacatagaat

SEQ ID NO: 917 - DNA, 1169 bp, unidentified
  source 1..1169: mol_type = unassigned DNA; note = element_0f4e6f2
  misc_feature 1..2: note = core
  misc_feature 3..203: note = LE
  misc_feature 204..1166: note = CDS
  misc_feature 1167..1169: note = RE
  misc_feature 3..179: note = bridgeRNA
cttgtatgtttagacttgaaggggtgggcgggactaaaagctcgattccgactctagccagtacggaccgtgggagacttctcgttccgccctttctacctaaagcgccgataaggaattcatcggtaaaaccgacgatagaggcaagccagcgcaaaggtagaccccgacaagcacctaaaccctagctccgaggattcgtcatgacaatccttaactcaccaacggttattggtatcgatgtagcgaaggccgaaatcgtcgtttaccgcgaagacctgaaaatcactcaagccatcgacaacaatcgcgaagctcttggccggtggctcaaaacgctaccagcccaaagctcgattgcgctggaagccaccagcttttatcacctggacacagctgagctggcccatggaatggggtttcatgtttacgttgtggatccttatcgggtggcccattaccgtgaaagtattggtctgcgggctaaaactgatccttgtgatgcgcgtttgctggctcgctatctaacgaacgagcaagcaaggctgcgtatctggagcccacctccagaagcctacaaagtgttaaagaacctgcttagaaaacgtgcggcactcatcaaggcccgcgtcagtatcgtgctgagtttttcgaacgaaccacgtctgaaggacatcttggcccggcagctggaggtcttcaaagagtccgaccaggccattcagaaactaatgcgtgaggccagccaagcggcagggatcactgaaaacatcaaccgctgcaaagccattgaagggattggtgaactgacggccattggcttggcgaccgcattcatgcgcggtcacttcgtcagtggcgatgcattcattgctttcttggggatggatttgcgcccaaaagattcagggaagaagcacagtcctcgtcacttgagcaaaaaaggggacggggagctacgacgcttggcgcacaacgccgcgatggcggcctgtcggtctcctgcctggaagccttactatgaggccttcttggcacgaggcctggccagaactcaggccttggttatcctcgcacgcaagttgtgtcgggtagcattcgccctgatgaaaaatcagagcgaataccaaccaaattcacggttgcagggttcccctgcaacatagaat

SEQ ID NO: 918 - DNA, 1396 bp, unidentified
  source 1..1396: mol_type = unassigned DNA; note = element_0f5a307
  misc_feature 1: note = core
  misc_feature 2..78: note = LE
  misc_feature 79..1134: note = CDS
  misc_feature 1135..1396: note = RE
  misc_feature 1159..1387: note = bridgeRNA
taatgggatggtccggccgtgctcctgccccgccagtagcgaatctggcaaggggcgccaaagacaaggagcaccgccatgtcccacaatctcagcaatgcgatcgccgtaatcggcatcgatatcggcaagaactcattccacgttgtagggcttgatgagcgcggcgcgatcgtgctgcggcagaagtggtcgcgtagtcaggtcgaagggcggtttgccaatatgccgccgtgcctgatcggtatggaggcctgcgttggtgcacatcatctcagtcgcaagctcaaggccctcggccacgacgcccggctgatgccggcgaagtatgttcgaccttactcaaaggggcagaagaacgatttccgcgacgcggaggcgatcgccgaggcagtgcagcgcccgaccatgaagtttgtgacgacgaagaccgcggaccaactcgacctgcaggcgttgcatcgggtacgcgaacgattggtcagccaacgcaccggcattatcaatcaaattcgtgccttcctcctcgagcgcggcgtcgctgtgcgccagggatcagcgttcttgcgttctgagttgccgcgcatcctcgccggtccgccggaggtgctgtcacctcgcatggcgagcatcatcgaaggcttagccgaggattggcgtcggctcgatgcccgcgtcgaatgtttatctgatgagatctcagcccttgcgcgcgaggacataggctgccagcggctgatgagcatccctggcattggaccgatcatctccagcgctatggtggctgcaatcgggaccggcgaagcgttctccaaaggccgtgacttcgccgcatggcttgggctggtaccgaggcaaatctcaacgggtgatcgcaccatcctgggtaagatatcgaaacgcggcaatcgctatctacgcactctattcgtgcaagcagcgtgggtagcgcttttgaaggtgaagccaaaccgatgggagggccacgggctcaagcactggatcgaggcggctaaaaagcggctgcatcacaacgtgctggccgtcgcactggccaacaaactcgcacgcatcgcatggagcgttcttgctcgtggtcgagctttcgaagtcggcaaggctcaagtcgcgtagcatttgccagtagttaaggtactgacctgccgaggtctgcgagaaggcaagatgagatggaggttcggtcttcccggcgcatacgaatactggtggcactaatggcccattgaggtctggacgctaatgagatcgtaggcgcgctgatatccatgatggcccggagcacaacgagctccaatcagaggtcggatacattgatgcaagaccgctcgccgatatcttatcgaaatcttcttgctacgcaccgccggaccataca

SEQ ID NO: 919 - DNA, 1361 bp, unidentified
  source 1..1361: mol_type = unassigned DNA; note = element_0f5ac62
  misc_feature 1: note = core
  misc_feature 2..67: note = LE
  misc_feature 68..1120: note = CDS
  misc_feature 1121..1361: note = RE
  misc_feature 1133..1355: note = bridgeRNA
taatgggatggtccgccccgtctccccgcctcattctgtcgaggcatcgtgcgaagaggagaccagcatgacccagcgcaacaagccccgtgacgcggctgtcttcgggatcgacatcggcaagaacaccttccacgtcgtcgggctggacggcaccggggcgccaatccagcgcgctacattccggcgggagacgctgctgcagttcttcgagcgcgcagcgcggaccgtggttgggatggaagcctgtcccggctcccagtggctcgcccgcaagctgaaggctttcgggcacacggtgcgcatcgtcccggccaagttcgtgaagccgtacgtgaagtccaacaagaacgacatcatcgacgccgaggcgatcgccgaggccgtcacacgcccgacgatgcgcttcgtcgagatccggtcaccggagcaggtcgacctgcaagcgcttcaccgcgtccgcgatcgcctcgtcgcccagcgcacgcgcgtgatttgccagatgcgtgccttttgcctcgagtacgggatcgcgatgcatcagggagctgggaagttcaaagccgaccttccccgcgtggttgccgacgaggagaatgacctcagcccggcgatgcggcgtttactcaccgagctattcgacgacgtcaagaacctcgagggccggatcaaggaggtcaccggagagatcgaggacgtcgctgcggccgacgatacggcgcgccgcctgatgacggtgccaggcatcgggccgctcgccgcgacagctctgctggcggcggccggccggggtctgcagttccgcaaggcccgtgacatggcggcctggatcggcctcgtgccgcgggagtactcaaccggcggcaagacgaccctgctaggcatcagcaagcgagggagctcgtatctgagacgcctcctcatccacggtgcccgatcgtgcattctccatctggaccggtctcgcgatcggctcgggagctggatcgacggcttgcagagccggatgcacaacaacaaggccaccgtggcgctcgccgccaagatggcccgcgtcgcctgggtggtgatcaccaagccgggcgcaacctacgagcggcgtgggctggtagcagcctgacctacgccttcgaccagctgcgaggcacgggatagtgatgacgagacagttgatcggcgcaccgtaaactctgggcaaaaaagcgggcttccagcccgagccagttattcgagaacggggcgcgcggatctcatcatggcctggctgcaaaaacagcccactcgcgagaggccggatacatttatgcagactggatcgtcagaccgaacctgaaccttgcaacgacggggcggaccataca

SEQ ID NO: 920 - DNA, 1464 bp, unidentified
  source 1..1464: mol_type = unassigned DNA; note = element_0f5bd80
  misc_feature 1: note = core
  misc_feature 2..245: note = LE
  misc_feature 246..1457: note = CDS
  misc_feature 1458..1464: note = RE
  misc_feature 4..234: note = bridgeRNA
caccccccggttacctttttgatcgtccccagccggggcccctcggtcgcccggcccggtatgacttcctgcccctgtcgtacggatgatccgggggtgttgtcgccgggtcgggtggcgtcggtggaccgctgatagggacacggccacccgtgtgggggtaggtctcttcgtaacgtggctgccggcagtccgacgcctggaccagcggccgaggccacggacgatgcgtggaggcgggtctggtgcatggcggatacggcgtttacctcggcttggacgtcggtaagggtgatcaccacgcagtcgggctggctccggacggcaagcggctgcatgacgcggcgttgccgaacaccgaggctcggctgcggcagctgttcgacaaactcgcccgccatggccgtgtcctggtggtggtcgaccagccggcctcgatcggcgccctgccggtcgcggtggctcgggcggccgggcatcaggtggcctacctgcctggcctggcgatgcggcggatcgccgatctgcaccccggcagcgcgaagaccgacgcccgcgacgcctacgtcatcgctgacgccgcccgcaccctgccgcacacgctgcggcaggtcgacaccggcgacgaaaccctggccgaactggagatcctggtcggcttcgacgacgacctcgccggcgaagccacccgcgtgtccaaccgcatccgaggactgctcacccagatccaccccgccctggaacgagtcctcggccccaaggtccaccacaaggcggtcctggaactgctgtcccgctgcggcggcccggtcggcctgcgcaaggccggccgccgcaaactgctctcgatcgccgccgtccacgcacctcgcatgggtgaccggctcgttgagcagatcatggccgctctcgacgagcagaccgtcaccgtccccggcacccaggccgcggagacgatcctgccccgcctggccgacagcctccgcgacatcctgcggcaacgcgaccaggccgccgcccaggtcgaaaggatgcttgatgcgcaccctcttgccccggtcctgacctcgatgcccggcatcggcgtcaggaccgcagcccggatcctgctcgaagtcggcgacggcagcagcttcgccacccccggccacctcgccgcctacgccggcctcgccccccgtcacccgacgatccggcagcagcatccgtggcgaacacccaccccgcggcggcaacaagaacctcaaacgcgcgttcttcctcgccgcgttcgcagccctggccgaccccgtgagcagggcctactacgaccgcaaacgcgccgaaggcaaacgccacaacgccgccctcatctgcctcgcccgccgtcgctgcgacgtcctatacgccatgctccgcgacaagatcccctaccaaccccgccccacgacgccgatcgccgcttgacgaacccatagggacacc

SEQ ID NO: 921 - DNA, 1266 bp, unidentified
  source 1..1266: mol_type = unassigned DNA; note = element_0f5bef4
  misc_feature 1..3: note = core
  misc_feature 4..209: note = LE
  misc_feature 210..1205: note = CDS
  misc_feature 1206..1266: note = RE
  misc_feature 8..193: note = bridgeRNA
tacctttagattagcatccagatttattcttttatttttatgagaaagaatggggtgaactagatggcctactaggccttgagtcctattggctgtatcagaccccattctttcatagttgcatgaaccagttagaattataggctttgaggcctaataaaggttttagttccgcaactaatagtaataacaatcttaacgtcaaagttatgaaatttgaagaagttattggaatcgatgtaagtaaattgactctggatgcgtgcattcacagtcagcagatcttcacccaggtacccaatacgaagaaggggtacctcaagctcttatcctgggcctcaaaaagtacaggatgttcacttgaacgggctctgttctgttttgagcatacgggaatgtattcttatgctcttgcctgctatatgtctgaaaagcagatgaactatattatggttccggggcttgagatcaagcgatcgctggggatacagcgaggcaagaatgacagggttgattccatgagaatcgcacagtacgcctatcgcaggagagaagaagtgacaacataccagcttcctgagaagtctattaatcggatccggcagttactgtcgttgagggagaagctggtaagacaatgtgccggttatgaggcttcattaaaggacttgtctgattttatagagagctcagaaaacaaattattggttggtgtccagcgtaacatggttaaagcacttggcagagagatagaaaaagtcgagacagagatagacagggtgctcgaaggcagtcctgatattatgaataattataagctgataacaagcattaccggagtcggcaggcaaactgctctgcacctgattattgttactaacaacttcctgtcgtttgatgatcacaggaagctggccagttatgccggagtagcccccttcgctaatacctcagggacgagcattaagggaagaacaaaagtaagtcccctggcaaataggaagttaaaatccctgctaagtgcatgtgctatctccgcaataaggcatgacccggagatgaagatatactttaaccgtcgcacggagatgggaaagcacaaaatgaacagcatcaacgctgtgagaaacaagcttttggccagggtatttgccgtcgtcaggagaggaacgccatatgttccattgtgccagtacgcagcttgaaagttttttgagtcataaaaaactcgaaaaatctttcaagctgcttgtttttgtcttagaa

SEQ ID NO: 922 - DNA, 1352 bp, unidentified
  source 1..1352: mol_type = unassigned DNA; note = element_0f65323
  misc_feature 1..2: note = core
  misc_feature 3..65: note = LE
  misc_feature 66..857: note = CDS
  misc_feature 858..1352: note = RE
  misc_feature 1119..1350: note = bridgeRNA
atgagatggtcgcccccacccctgagcggttacgcttatagggtctttctagcgaagaggccatcatgcaagacacgacgctggttggaatcgatctgggaaaacattcctttcatctgcatggccagagctgcagcggcaagcagacgcttcgcaaaaaactaacgcgcaagcagttgatcgaattcttcgtgaaggagcaagcttgcacggtggtaatggaggcctgcacgggtgcacattgcatggttcgtacgctgacggcgttcggacacacggtcaaactcatttcaccgcacttcgttagaccgttcgtaaagagtaacaaaaacgacttcgtggacgccgaggctatctgcgaagcagctgtacggccggccatgcgctttgtcacgccaaagacggaagcacagcagacgctttcagccctacaccgggttcgcgattctctggtgcaggaccgggtgaggacggtcaatcaaattcacggcttcctgccggagtttggtatcagcctgccgacgggcaaagcggtcattacgtgcctgccagtcgttctgtccgagcattcgctgccaccgagactggttgctatccttaaacgtttgcacgctcacttcaaatacctcagcgagccgaccgccgaagtcgacaaggaaatgggccgccagcttgccgaagacgatctgggccagcgcctgatgacagttccgggagtgggacctgtcactgcgagcctgctgtctgccgagatgggtgatggcaaacagtacgacggcagtcgggattttgcagcgtcgaccggactcgtacccgtcagtacagcaccggcggacgggccaacctgctcggcataagcaagaggggaaacaagactatccgacgcctactggtccaatgtgcaaggtcctacttgcagcgtctggacaagcacaccggacgactggccgagtgggtccggacgatgctcgcgcggcggcattcaagcgtcgtggcgtgtgcgttggccaacaagcttgctcgtactgcttgggcgctggcaacccgtcataccgtatttgacccgggctcgaccaccatgccggcctgatcctgctgggtcacttcctgttctaccgcagtctaccaaccggttctgcgatcgcgggaatttgatgacgtgaacggcatatcggcctgacaaagaacctggtatatgaaccggttttccgaaagccgccggcgtttataggattgtcaggcgcgactctcatcgtggcgcgggggaactgccccacaacgacgctggatagattcgagcaagccaactacaacgtcaaaaaccagtattgcaaaaacgggggcgatcatag

SEQ ID NO: 923 - DNA, 1532 bp, unidentified
  source 1..1532: mol_type = unassigned DNA; note = element_0f778f4
  misc_feature 1..4: note = core
  misc_feature 5..256: note = LE
  misc_feature 257..1522: note = CDS
  misc_feature 1523..1532: note = RE
ctcactggtccaccctccttgcgtccgggacggatcgttgatccaggattcggacgcaccccaggtccccaccggaccatcgccaggagcgctcgaccctcgaggtccgcgatgagttcagcgaggtccggtggcccaggacgcgccgactggctacagggctgagcaccgccgagtgccgatcagtgagcgaccggctgcgccgtcccgggaccaccgggtgtcttcccactgcgccaacagcgaggagacgaccatgagtgtcaccgacgagccccgcgaggtcgacccaccccgaccgacccccgcgcgcccgaccgccgggatcgactgggccgaccgcgaccatgccatctcggtcctcgaccccgacggcacacagatcgcccgctacaccctcacccacacaagcgccggactgcgcgagctgacccggcgcctgctcgaccacggtgtcgtcgaggtcggcatcgaacgccccgacggccccgtcgtcgagcacctgcgcacggccgggctcgtcgtctacgtcatcccacccggccagctcaagaacctgcgctcgcgctaccagtcggccgggaacaaagacgaccgcttcgacgcctacgtcctggccgacaccgtgcgcaccgaccgccgccggctgcgtccactgatcaccgacaccccggccaccaccgcactgcgccacaccgtccgggcccgccgcgacctcgtcgcccaccgggtcgcggtcgccaaccagctccgcgcgcacctgcagctctgcctgcccggcgtggtcgggctgttcgcccacatcgactcgcagatcagcctgcagttcctgcaccgcttccccacccaggaccacgccgaccggctcaccccccgccgactgggcacctggctggcctcggtcggctacagcggccgcaccgaccccgccgtcctgcacagccgcctgaccagcgcgccccgcggccacaccggccccgacgcgaccgtctccgccgcggtcaccaccgcctacatcgccgtgctggccaccctcaacacccagatcgccgagctcgccacccagatcagcacccaactcgagcaccatcccgacgccgcgatcttcaccagcctgccccgctccggacgcgtgcgcgctgcccggctgctcgccgagatcggcgacgcccgcggccggttccccaccgcagactccctggcctgcctcgccggcgtcgcaccctcgacccgccaatccggcaaagtcaaagcagtcgcgttccgctggggcgctgaccgcgagctccgcgacgcgatctgcgacttcgccgctgacagcagacacgccaacccctgggccgctgacctctaccaacgagcccgcgcccgcaaccacgaccacccccacgccgtccgcgttctcgcccgcgcctgggtcggcgtcatctgggcctgctggaccacccacaacccctaccagcccgaccgacaccgagcccttcaacgcgtcctcaaccaagatcaaccgacggcggcttgacacagggcaa

SEQ ID NO: 924 - DNA, 1378 bp, unidentified
  source 1..1378: mol_type = unassigned DNA; note = element_0f79fc0
  misc_feature 1..2: note = core
  misc_feature 3..86: note = LE
  misc_feature 87..1118: note = CDS
  misc_feature 1119..1378: note = RE
  misc_feature 1123..1366: note = bridgeRNA
tgatggtgtggaacggcccttcgaaccggcatcaaaagtgcctaacgtggtcgcgtagagaggcgccacaaaggaaggaccgttccatggaaaagattatcacggtaggcttggatttggctaagtcgatctttcaagtccacggcatcgccgaaaacgggaaagtcttggttcgtcgcacattgcggcgatcgcagcttttgcccttctttcaaagtcttccggcttgcttggtaggcatcgaggcctgcgggacggcccactactgggcgaacgcgatcggcgaattcggccataccgtccgtttgatgccgcctgcctatgtgaaagcttacgtcaagcgaaataagaccgacgccgccgatgcagaggcaatatgcgaagccgtgtcgcgcccatcaatgcgcttcgtgcccgtcaaatcacccgaggaacaagctggcgggatggttttaaagacgagagagttacttgttcgtcagcgaagccagtctgcgaatgctatgcgcgcccacatggcggagctcgggatcattgccgcaaccggaatgcctagcattgccaagctcgttgccgtactgcgcgacgatcaagaaagacgccttcctgcttcggctcgagccgcgcttctggggatggccgagcacatcgaaagcctgacaacacggattgatgtgctcgacaccaaaattgttgcggccgtgaaggccgatgatgccgcccgtcgcctgacgaccattcctggcgtaggccccattatcgccgcgactgttcgcgccaccgtccagaatccggcagccttccgaactgggcgagatttggccgcctggatcggcatcaccccaagggcacactccagcggagggaaagagcggctcggcaagatttcgaagcagggcaacaaacagctgcgaactttactgatcgtgggtgcgacgtcgatcctcaagcaggcccgcaggggcgtgaagctaccggcgtgggtcgtatccataatggcgcgccgtccctataaggtggccgcagtggcactcgcgaacaagatggcgcgcaccatatgggcgctactcgtcaagggcggtacctatcgatcaccgacgacgccggtgactgcttaatcacaattcccagcgccttggtgttgggatagcgcggcaaggtgccaaagcgtgatgaacccgaggggcgataccctgatgtcgatcagaccgtctgacgcagtgcgtgacgaagcgcgcaaaattgattaggcgaccggcattgcggatctcatcgtggccagcggtcaatgaccctacggataagccggacatatgactgcaccgtccgacggtgatgcacgctgagaaataccttgctaaccgggccgttccacata

SEQ ID NO: 925 - DNA, 1186 bp, unidentified
  source 1..1186: mol_type = unassigned DNA; note = element_0f7f827
  misc_feature 1..2: note = core
  misc_feature 3..152: note = LE
  misc_feature 153..1055: note = CDS
  misc_feature 1056..1186: note = RE
cttgtatgatgtttatagaagcaaaaacaacatattcctttcatttttcttgagctgtagtttaatacattcagatactgtggacttttgattttatcctgtagcttgactactcaacaggagtgtttctaaatcctatcaagacttcggctatgcgtaagaacaacgtacgcaagaccaagactgataaagtcgacacgtttgttattgctaaaacccttatgatgcaggattctttaaggtttctgaccttaaaggatctggattatatcgaactcaaggaactcggcagattccggcagaagactgtaaaacagcgtacccgtctaaaaatacagctgacttcttacatggatcaggtattcccggagctccagtatttctttaagtccggtgtgcatcaaaactctgtttacgctctccttaaggaggctcccacaccgaatgcgattgcttccatgcatatgactcatcttgctcatatccttgaatgtgcttcccacggccatttcaaaaaggatacagccagagatttaagagttctcgcacaaaagtcggtcggtatcaatgacagtgccttatctattcaaataactcagaccattgaacagattgagttattggatagccagttattccatacagagcttgaaatggcaaaccttgtcacctgccttcactctgtgatcatgaccatcccgggcattgggactaccaatggcggaatgatacttggtgagattggcgatatccatctcttctctacaccgggcaaattgcttgcatttgccggattggatccgtctgtttatcagtctggtaacttccaggctaagaagacccggatgtccaaacgaggctcgcgtgttcttcgttacgctctcgtaaatgcagcacataatgttgtaatgaacaatgcgactttcaaagcttactacgatgccaagagagccgaaggccggactcactataatgcccttgggcactgtgccggcaaacttgtcagggtcatatggaagatgctcactgacgaagtggaatttaacctcgaataagaggtctgcataccaatatcgatagattttgaacaagcacctttagggacctttattaaagttacccttttttaccatcgattagaaaaatgaatgttcgcctaatttatacttgacttttcatagctagt

SEQ ID NO: 926 - DNA, 1581 bp, unidentified
  source 1..1581: mol_type = unassigned DNA; note = element_0f87743
  misc_feature 1..2: note = core
  misc_feature 3..100: note = LE
  misc_feature 101..1216: note = CDS
  misc_feature 1217..1581: note = RE
  misc_feature 1320..1522: note = bridgeRNA
agacataatgtattaaacctgtcctaccttaaggcgcgtgggttaagctttaaggtaaggaaaaccaaaggctcagagccacaattaaggaggacaggttatgaataagtataccacgaagtatgtagggatggatgtgcacaaagaaacgatagcagtagcaatcgcaaaggaaggtcgaggaggaccgctatattatggcgagataccaaataccgatgaggcaataaaaaagctgttaaagaaagtggcctctaatggggagaaagtattattttgttatgaggctggaccgtgcggttatgacgtatatcgtcagttggttgacctgggtcagaggtgtgatgtgattgctccatcgcttattccgaagaaatcaggagaccgtgttaagacagatcgactggatgcgaccacgctgactcgtttgcatcgtgcgggggaactgacgccggtatgggttccagataaagaacaggaagcgatgagagatttatcccgtgctcgtgaggatatgaaggccatggaaagtcatgccaaacaacggctgggagcatttttgttgcggcatgggaagagattttctgggaggtgcaaatggacgcaggcctattttcgatggctggcagagataaagtttgatatgccggcccagcagattgttttgcaggagtatgtggatacggtcaaatacatgaagggacgagtggaagctttggaagaggaaatgcgtcaggcaatgcaagggtggtctttagctcctgtggtaaccggactgatggcccttcggggcgtagagctcattacggcaatgactgttattgctgaactgggcgatatgagtcgttttgactctgctcgtcagctcatggctcatctgggcctagttccaagtgagcattcaagtggaaatcgtcagaaacgaggaggaataaccaaaaccgccagacgtgtgctcatagaggcctcgtggtgttatcgttcaccggcccgtaaaacagctcagattcagcgccgtgctgagaagaccagcgaaacggtacaggcgatagcatggaaagcgcaaaaacggctatgcagaaggtattggtatctgatcaataaagggaaacgtcctgtggaagcatgtaccgccgtagcacgtgaattgagcggctttatgtgggcgattgcctgtgaggtaatgggtaagaactatgtttgcgctactgcataaggatagaaaggattgaccagaacagaaaactatcggagttgtctttcggagctccgaaaaggtgggagcgtttctccgctccttcaggcaacgttattgattgagaaaatgtggacttcaggcagggcagcagtcggttgggagaaccctcgaacctcctatgagacacctaaagacaggatgaccctcgcggttagacagaggcagctccgcgacgaagataagtcatgcggtatccaacccgcgcatatcagagcgatctaccgtcgtttattactgctgttctgtcagaagtgcacattctcaaaggaggtcatataagaggcaagtaagaaaacacattattgacaggtttaatacatatc

SEQ ID NO: 927 - DNA, 1182 bp, unidentified
  source 1..1182: mol_type = unassigned DNA; note = element_0f88dff
  misc_feature 1..2: note = core
  misc_feature 3..207: note = LE
  misc_feature 208..1167: note = CDS
  misc_feature 1168..1182: note = RE
  misc_feature 36..191: note = bridgeRNA
cttgtatctagatctcaaggaagattgacgacattctaatcggggcgccagctcgatgccgtctgggtggtaaacaccgtgcgttagccggagcggcgtgcccgagtcttcgtcgcagagagcccgaacagttgcgggggccgaccctggtcgagcccgaattatcacaaggacgggcgacgcgacactcacacgcgtggaggcaacatgttcgtcggcatcgacgttgcgaaagcagaactggtggtcagcatcgttccgtcggccgagcgcttcacggtggcgaacgatgagcgcggcgtgcgcacgctcgttgagcggctgcgcgccatcggcccgaccttgatcgtgttggaagcaacgggtggctacgagttgctgggggtggcggggttggtggccgctgcgttaccggttgtggtggtgaatccgcgtcaggtgcgcgactttgcaagagcgacgggccaactcgccaagacggaccgcatcgacgccgacattctcgcgcgtttcgccgatgtggtgcggcccgacgttcgtgtgatcgccgatgccgaggcgcaagagctcgaggcgctcctcgcccggcgtcggcagttgctcgagatgctgcaggcggagcggaatcgtgtcggccaggtgttcggcaaaggcaagcgcctggttcgcaaaagcctcaaagcgcacatcaccttcctcgaacgcgagctccgcatgaccgacaccgatctgggcgcgatggtcaaggcgagtccggcgtggcgagagcgcgacgaactgctgcgcagcgtgcccggcgtcggccccgtgctctcgcgcaccttgctggcggatctccccgagctgggccggctctcgcgtcgcgagatcgccaagctcgttggcgtcgctccgctcagccgggactccggcacgttccgcggccgtcgtttcgtgcaaggtgggcgcgcgagcgtgcgcgccgtgcgctacatggcggcgctggttgccaccaaacggaacgcgacgatccgcatcttctacctgcgtctcgtcgcagcgggcaagcccaagaagcttgccctcgttgcctgcatgcgaaagctgctgacgattctgaacgtcatggttcgcaccgaacagcgctggtccgccgaggccacgcccggggcgctcattccggcttgactttcaagacagttg

SEQ ID NO: 928 - DNA, 1444 bp, unidentified
  source 1..1444: mol_type = unassigned DNA; note = element_0f9da7a
  misc_feature 1..2: note = core
  misc_feature 3..122: note = LE
  misc_feature 123..1163: note = CDS
  misc_feature 1164..1444: note = RE
  misc_feature 1205..1440: note = bridgeRNA
agatggtatggacgtctccaccctacaacggactggtgcctgacgaggcggagcctcgcagcaacggcatcgttgtgccaaagtagagattcgttgtaaccacttgcactggaggctccgccatgaagactaccgcacaactgccgatcattgggatggacattgccaagagcgtatttcaactgcatatcgttgatccggaaactggcgaaattgagcgactcaaactcaagcgtgatcgtgttgctgctttctttgccaatcgacagcgttcgctggtggccgtggaagcctgtgggggcgctcaccattggggtcgcttcttgcaatcccaaggccaccaagtcaagttgctgccacccaaacaagtccgcccttttgtgtcgcgtgacaagacagatgcgcgcgacgcccaagccatctgggtcgccgctcagcaacctcatatttttgaagtacccgttaagagcgaacaacagcaggcctgcctgaccttgcatcgcatgcgcgcacaactcatgaagatgcgcatcatgcaaacaaacgccttgagggggttgctttacgagtttggcattgttctgcctgaaggtcaccgcattcttctgaatcgaatccaggacgaactcgccaaggcatcggacaagcttccagtcgtaatcactgaaagcgtgttggagcagctcgctcgtgttgaccggctgcaagaagacatcgaccacattgacaaacgcctggtgatgatgggtaagcagaatcaacaaatgctggccttgcagactattcccggcattggtcccatgacggcaacggctttggccgcgaccgccaccgacatgtctgactttcgctcaggtaggcaatttgctgcatggcttggcttaacgcccaagcaaactggcaccggaggaaaaataagacaaatgggcatctccaagcggggagatccctatgtgcgaacgctgttgatgcatggggccagagccatcattgccaggagtcagagaacggcttggatcaccgcgttgctggcccgacggccttacagcgttgtggtcgccgcgttggccaacaagctggcgcgcaccgcgtgggcggtcctgaccaaaggcaaagcctttgatcaggtcaaatggaatccggccgaattggctgcgacctgaccggacaaaaatgaaactgtaaacagccaacaatagtgatgagaccgttttgaaggagagcatgcaaaaagcaaagtgatgggtcaacaggtcataccggggcagggacaatccgatagtcggccagagcattcagctcgatttgcagatgggaaccttgcccgcgaatgccatcagggccagcaggatgaagcgcctgcgcaagtaggccgtatataagactgcaacccccgttgaaactttacattgctaaaacttgctttctgggagacgtccatata

SEQ ID NO: 929 - DNA, 1482 bp, unidentified
  source 1..1482: mol_type = unassigned DNA; note = element_0fa85e7
  misc_feature 1: note = core
  misc_feature 2..264: note = LE
  misc_feature 265..1467: note = CDS
  misc_feature 1468..1482: note = RE
  misc_feature 9..241: note = bridgeRNA
cgtaatctttttcgcggtcctgcaagagggccgctggcctccgggcccggcatgactgttgccccctgtcgaagttgatgacttggggggtggtgtcaccgggcccgaggggtgccgtcggagacgctgatcagaggcccgaccgccgcccggccgggcgcaatgcctggctgtgtccgggcggcaggtctgcataacgtggatgcgcgcgaacggacccccgcccactgaggccggcaccgcatcgaatcatgtgggggcacggtgatcgacatcagccaggtgggcgtcttcctcggtctggacgtcggcaagagcacacatcacggtcatgggctgacccccgctggcaagaaagtcttcgaccaacccctgcccaacagcgaaccgaaactgagggccgtcctcgacaagctccggaccaagttcggcacggtcctggtgatcgtggaccagcccgcaaccatcggcgccctgcccctgaccgtggcccgggacgcgggctgccaggtcgcctacctgcctggtctcgcaatgcggcggatcgccgatctctaccccggcgaggcgaaaaccgatgcccgggacgccggggtgatcgcggacgccgcccgcaccatgccccacaccctgcgctccctcgagctcggcgacgagatatccgccgaactgaccgttctcgtcggcttcgaccaggacctcgccgccgaagccacccgcaccagcaaccgcatccgcggcctgctcacccagttccaccccagcctggaacgcgtcctgggcccccgtctggaccaccgggccgtcacctggctcctcgagcgctacggctccccggccgccctacgcaaagcgggccgccgcaagctcgtcgaggtcatccgccccaaagccccgcgcatggcaggacggctgatcgacgacgtcttcgacgccctgaacgaacagaccgttgtcgttcccggaaccggcaccctcgacgtcgtggttccgtcattggcccgctccctggcagccgtccacgagcaacgacgcgccctggaggcccagatcggcacattgctggaggcccaccctctttcccaggtcctgacgtcgatgcccggcgtcggcgtcaggaccgccacagtcctcctcgtcacggtcggcgacggatccagcttcccgagcgccgcccacctcgcctcctactccggcctcgcccccacgacgaagtcgtccggaacgtcgatccacggcgaacacgcacccagaggcggcaaccggcagctcaaacgggccatgttcctgtccgcgttcgccgccctgcacgatgctgcctcccgcacctactacgacaaatgccgggcccgcggcaaaacccacacccaagccctcctccgcctcgcccgccaccgcatcagcgtcctgttcgccatgctccgcgacggaaccttctacgaacccagaaccccacacctcgcttgacgaaagacatagagg

SEQ ID NO: 930 - DNA, 1395 bp, unidentified
  source 1..1395: mol_type = unassigned DNA; note = element_0fb594a
  misc_feature 1..2: note = core
  misc_feature 3..120: note = LE
  misc_feature 121..1155: note = CDS
  misc_feature 1156..1395: note = RE
  misc_feature 1169..1390: note = bridgeRNA
agatacggtaatgggccgcagctccggcaggactggagcggtggctgtcccccgatcatgatggagtgacggggtttcaggtgtggtgccgaggccccgctagcctgatggaggacagccgtggagcattatgccggattggacgtgtcgctggaactgaccagcgtgtgtttagtggatggtcacggccaggtggtgcgcgaggccaaggttgcgagtgagccggaagcgctgatccgcttcttgcgcgagcaggatctggagatcgcgcgggttgggctggaagcagggccactgtcgcaatggcttcatgctgggctggttgctgttggcttcgcggcggtgctgctcgagacccggcacgtgaaggcagccttatcggcgatgacggtgaagaccgatcgacgcgatgcccggggcattgcccagttgctgcggcttggctggtatcgaccggtgcacaccaagtcggccagtgcgcaggaggtgcgctcgctgctgacggcccgcaagctcatccagggcaagctgctcgacatcgagagcggtattcggggggtgctgcgcgggtttggcctcaaggtcagtccgatcagccgaggccggttcggggcgcggatccgtgagctcgtgtcaggccaggcagtcctcgagacggtgatcggctcgatgctgactgctcgtgctgcactgcagatggagtttgcccgtcttcaccggtcgctgctggcgctcgtgcgcgccgatcccgtgtgccagcgtctgatgagcgtgccgggtgtcggtgcagtcgtcgccattaccttccgcagcggggtcgatgaccccacgcgctttcggcgatcgcgcgacgtgggaccgcactttggcctgacgcccaagaagtaccagtccggcgagctcgacgtcaccggctcgatcagcaaggtcggcgaccggatggtgcgcaccgcgctgtacgaggccgccagcgtgatgctcacccgcaccgtgcgcatgtcgccgctcaagagctgggcaattgctgtcgccaagcggcggggtgcgaagaaggctcgtgtggcgctggcccgcaagctcggtgtcgtcctccaccggatgtgggttgatggtaccaacttccgcttgaccgacgagacacccacaatcgcatgaggaggagcttgagagatcgggtcagctagccaggccgacccgtagtcccaccgctgggacggtgaagttggtgaagccgcaatgtctgcagtcgctgccaggcagacgacgctggaaagatgggctcaccgcttcctctgaccgtatgatgtggcagcgcccgagctgaccacggacagaagcaagtgaccagcggcaggaccataaccggggcgacttgacaccatggcccattacaga

SEQ ID NO: 931 - DNA, 1428 bp, unidentified
  source 1..1428: mol_type = unassigned DNA; note = element_0fd0470
  misc_feature 1: note = core
  misc_feature 2..224: note = LE
  misc_feature 225..1415: note = CDS
  misc_feature 1416..1428: note = RE
  misc_feature 14..227: note = bridgeRNA
ctacttgttccattgacccaggaccggcgcctggcaaggctcggtccaggcgcccgggctgtcgctctcacatcggctgcccacgctggtcgtgtggctctcatctggcctgcgcggaccgggcgtcgcagggcccggagaggctcaagaggggtttgctcagctcgaagtagcggtgccctcccggtccgacaacacaaccaacgagggcgggcggaggagtcgtgaaggagcagacagaacgggtcgtgatcgggatggacccgcacaagcggtcggtgacgatcgaggtgatggccgccgacgagacagtcctcggtggcggccggtacgccaccgacgaggccgggttcgccgcgatgaggcgctatgtcagccagttcacggaccggatctgggcgatcgagggctgcagcgggatcgggcaccacgtagctgtcaggctcctggccacgggtgaggaggtcgtcgacgtgccgccgaagctgtcggcgcggacccgggtcctcgccaccggccagggacgcaagaccgacgccaccgacgcccactcagtcgcgctggtcggcacccggatggccgggctgcggccagtggtcaacgacgaacagctcgcagtcctgcggatcctggtcgaccgccgccgctcactcggcgaggaccacacccggatgatcgcccagctgcaccaactgctcctcgagctcatccccggcggtgtgaagaaggacctctccgcagcccaagccaaagcactgctcgcgaaggtccgcccccgcgacaccgtgggcaagacccgccgccgcgtcgccgccgagctgatcagcgacctggaacggatctaccaacgcaagaaggccgcgaacaaggagctcacccagctgctcgccgccaccggcaccaccctgaccgacctgcccggcatcggaccctcaggtgcggcccggctactggtcgaggtcggcgacatcacccgcttccccgaccgcgaccacttcgcgtcctggaacggcaccgcaccgatcgacgcgtcctccggtgaccagatccgacaccggctgtcgcgcgccgggaaccgtcagatcaaccgggtcctgcacatcatggccaccgtccagctgcgcaaccccggcgagggccgcgcctactacgaccgtcgcaaagccgaaggcaagacctcgatggaagcgatgcgtgcactgaagcggcgactgtcgaacatcgtctacaagaccatgctcgacgacacgatcactcagccggcggccggcgcgaggacgggtccgggagggcaacggggcagcgactctgactccagcgcgaccggctcacaaccccaacaccggcacttcggacaagccactccgggacccgtcaccaagcagcctaagcccgcactcccgaaggtgtcttgacacagaggggagc

SEQ ID NO: 932 - DNA, 1466 bp, unidentified
  source 1..1466: mol_type = unassigned DNA; note = element_0fd487a
  misc_feature 1..4: note = core
  misc_feature 5..245: note = LE
  misc_feature 246..1448: note = CDS
  misc_feature 1449..1466: note = RE
  misc_feature 1..238: note = bridgeRNA
ccccgttacctttctcgcggttcccggttggggacttcgtggtcgcccggtctggcatgactgactgcccctgtcgttgggatgatccggggggtgttgtcaccaggccgggtggcgtcgacggaccgctgatagggacacggccgaccgcttccttggtaggtctcttcgtaacgtggctgccggctgtcgatgcctgacctgcgacctattcctgttcccgggggcgcgggagagaggcgggcgtgagctcggacagaccggactaccaggtgttctgcgggttggatgtcggcaaggacggccaccacgccaccgcgctgaacccggccgggaggcggctgcacgatgcgccgctgcccaacgacgaagcccggctgatcgagctgttcgatcgcctggcccgccacggacgcgtgctcgtggtcgtcgatcagccggcgtcgatcggcgcgctgtcggtcgcggtcgcccgcgcccagggccatgacgtggcctacctgcccggcctggcgatgcgccggatcgctgacctacatcccggtcaggccaagaccgacgcccgcgacgcgcacgtcatcgcggacgcggcccgcaccatgcctcacacgctgcgacgggtcgacgtcggcgaagaagccctcgccgaactggaggtcctgatcggcttcgacgacgacctggccggtgaggccacccggatcagcaaccgcatccgcgggctgctcacccagattcatcccgccgctgaacgtgtcctcggtccccgcgtcgcccatcctgccgtcctcgagctgttgtcccgattcggcggcccgaccggcctgcgtcaagccggccaccgacgcctaaccagcaccgctgtcaagcacggaccacgcatcggccagcaactcgtgatcgatttgctgaccgctctcgaccagcagaccgtcaccgtcccgggcgccgccgcagccgaaacagtgcttccgaaactggccgactctctgcgcaccgtcctggcccaacgcgctgaactggccgtccaggtcgaggaacggctcgatgcccaccctctcgcccgggtcctgacctcgatgcccggcatcggcgtcaggaccgccgcccggatcctgctcgaagtcggcgacggcagcgcattccccacgtccggccacctcgccgcctacgccggactcgcgccggtcacccgacgatccgggtccagcatccgcggcgaacacccgcccaaaggcggcaacaagaacctcaaacgagcgttcttcctcgccgcgttcgccagcctcgccgactccaactctcgggcctactacgaccgcaaacgcgccgaaggaaaacgccacaacgccgccctcatctgcctagcccgacgccgctgcgatgtcctgcacgccatgctccgcaaccgcgccacctaccaaccccgaccagcgaccgccgcttgacgaaatccatagggacac

SEQ ID NO: 933 - DNA, 1398 bp, unidentified
  source 1..1398: mol_type = unassigned DNA; note = element_0fdc33b
  misc_feature 1: note = core
  misc_feature 2..87: note = LE
  misc_feature 88..1128: note = CDS
  misc_feature 1129..1398: note = RE
  misc_feature 1170..1390: note = bridgeRNA
caatgggatggacgcccccccttgaacggcatttcagtgccagagtggaagtgtcagccaccactcgatccggaaggagcgtccatcatgcaaattacggcaatcggcctcgacttggccaagaacgtatttcaggtccacggggtcaacgagcacggcataggcgtgcttcgcaaacagttgaggcgcgaccaggtggcggcgttcttcgccaacttaccgacgtgcttggtgggcatcgaggcgtgcgccagcgcgcatcactgggcgcgcaagctgcagaccatggggcataccgtcagattgatggccccgcagttcgttaagccatacgtgaagagcaacaagaacgatgtcgctgacgcggaggctatctgcgaggcggtcacacgtccgtcgatgcgcttcgtgccgatcaagaacatcgagcagcaggcagttctctcgctgcaccgcgttcgccagggcttcgtcaaggcgcgcacggctcaggcgaatcagatccgcggcttactcggagaatatggtctcatcgtgccgcaaggcattgcctacctaacgcagcgtgtcccgtccctgatcgaggatgcctgcaatgaactgccaggctcattccgaattctcattcaacgcctgctcgaacacctcaagctactgcagcagcaagtcgacgagatcgagtcacagatcaaggcgtggcatcgctcaagcgaggccagcagtcgcctggagcagattccaggtatcggaccgctgacggcaacggcactggtcgccagtgtgggcgatgcgaagaatttcgacaacggacgtcagctcgctgcgtggctgggtctcgtgcccagacagcattcgagtggcggcaagccgacgctcctgggcatcagcaaacgaggcgactcctacctgagaacactgctaatccacggcgctcgatttgtgatctaccaggctcaggcccgacagcgggccagcgctcagggttggctactcaagctgatcggtcggcgcaacgccaacgtcgctgccgtcgcgctggcaaacaagaatgcgaggatcgtgtgggccctgctagcgcggggtgaaggttttagaccgccctgcgcgagcgtagcggcggtcgcgtagccagagggttccagaagaacacagccaaggaggaatatctcgccgattgctcaagcgatcacacagtgatggcatggcaggtcagaccgtggttggcataacccgctcttgacagagcaccttggagtgcgctgaagctttggggagccagccagcagaacccatcagggacagcgagtgctctcgcgaaaagtccggatgtacgggtgcaatcttcacctccgcgccgttcacaaactgaaagcttggcaaaccgggggcgtccatgta

SEQ ID NO: 934 - DNA, 1440 bp, unidentified
  source 1..1440: mol_type = unassigned DNA; note = element_0fe3303
  misc_feature 1..2: note = core
  misc_feature 3..230: note = LE
  misc_feature 231..1433: note = CDS
  misc_feature 1434..1440: note = RE
ctcctaccatgaattagtatatagaatgatgtataatggatttgtagtatttatggaaaggcaggaggacttatttcttcctgggcgatagagcccttattacagtatgtcccaagcctctatgaaccataatagattggttggatcattgaatccttgtaacgctggaggattggtctggaggcaacggcacctgcttttcaattattcttttgtgaggaggtgatgttatgtcgggattaaagggtaacgttaatagttatgttggtgtagatgtttccaaggataagtttgatgcctgcgggataacaggggaagagacaaaactctttcagttttcaacgaccatggatcggaagggttttgagaaactgaagggccatcttggtactatttctgtgtcatccgttttaattggtatggagtccacggcctcctatcatgttaatctcttctcttacctggtttctgaggggtacagggtcattctcatcaatcctttactgatatccaattacgtgaaaatgcagctcaggaagactaaaacggacaagaaggatgctgttgtcattgcccattttcttcttgcaaatagagataccctgattcaacgggtgactccgtctttgatttctgatcttcgggatctttcccgtcaacgggagagcctggttaacgagatgacatctctgaagatcgagatcaaacaactcctgaatattacctttccggaacttgagcatatggtagggatatttacaaagtctattatcaagcttttgcagcaatacccatcggcatttgcgcttagagatgcggatcttaatcaattgtctcagaacttgattactgattcttatggtcacaaaagagaggtgtttgcagcagcgttaataaaggcagcacattcgtcgatcggtaccaacagtcccgccaaagaaatgattattaaacagaagatagcgcttctccttcacattgaagaagcccttcaggagataactaccatgcttgttgagatggccagaaaactgatggaagaagatataaacattatgacttccataaaaggtatcagagacaaaactgctgccaattttctcgttgagatgggtggcgacatcaatcagtttgaacgttccggcaaaatcattgccatggctggattggatccggctgtttaccagtccggcaatcatgaaggcaaaggcaggataacaaaacggggtaatcgtcatctgcggaggatcatctggatgatgacaactaaagttatccaatacagtgatattttcaaggtttattatctcaagcgaagaaaggagggattgccttacaagaaggctgtattagcaactgctcataagttgatccgtgtaatatatgccatgctgacacagcgaacaactttttgtccgcaggtgaatttatgatagttga

SEQ ID NO: 935 - DNA, 1392 bp, unidentified
  source 1..1392: mol_type = unassigned DNA; note = element_0ff8474
  misc_feature 1..2: note = core
  misc_feature 3..76: note = LE
  misc_feature 77..1117: note = CDS
  misc_feature 1118..1392: note = RE
  misc_feature 1118..1379: note = bridgeRNA
tgttggggtggacggcctccgaacggcatcgattgtgccaaggttgcgctgtcaggctcaacagaggaggccgcccgtggagaagattagccgtattggcatggacacgtccaagcgcattttccagctgcatggcgtggatggcgccgagcagccggtggtgcgcaaaaagctgccgcgcgaccgcatgatcgccttcttcaaggctctgccgcccacggtggtggtgctggaggcgtgcggcgcctcgcaccattgggcgcgcgtgctcggcgcgatggggcatacggtgaagctgatcgcgccgcagctcgccaagccctacctcaagcgcggcaagaacgacgcggccgacgccgaggcactgtgcgaggccgccagccggccgaccatgcgctatgtcgcggtcaaaaccgtcgatcagcaagccgacctgatgctggccgccatgcgagagcggctgttgcgccagcgcgttcaactcgccaacgcgatccgcggtcacgccgccgagttcgggctgatcgccgccaagggggcgtcccacgtggccgaactgctggccatggtgcaggccgatgccgcccttccccggctggcgcgacaggtgttcgccgggctggcggcggactatgcccatgtcgagacccagctggctgccgccgatgccgagctgcgggcctggtataaacagaatgccgtcgcccagcggctgacccagatccccggcgtcggaccggtggtcgccgcgacgctggtgatgaagacgccggacccgaaggcgttcgcgtcgggacgcgattacgcggcctggctggggctgacgccaaaggaccattcgaccgccggccgcacccggctcggccggatcacccgcgcgggcgacgagacgctgcgaagcctgctggtggtcggcgccaccgccgtcatctggcagacacggcgcggcgcgaccaggcgggtgatgccgtggttggccagcctgctcgcccgcaagccgccgaagctggcggcggtggcgttggccaacaagatcgcccgcgtcgcctggaagctgatggccagcggcgaggcttacgacatcaaccacgccgcgcccaagccggcgacggcgtgatcagatcggccgggcgcgcacgaacaccgcgcgcgtcaagctgagccgggcttgcaacagaaggagcagatggttggatcgggcgatccacgaagcaggacactccgcgcaatccagtggcgctttgatgccgccagactgtttggaacctgctccgcggaaaccatcttggccagcggcatcaccgccgcatcaacaggccggacacatggacgcaagcgacccggtgccaaaatctgctacccaaaccttgcaggcaggaggccgtccacaca

SEQ ID NO: 936 - DNA, 1252 bp, unidentified
  source 1..1252: mol_type = unassigned DNA; note = element_0ff8f05
  misc_feature 1..2: note = core
  misc_feature 3..80: note = LE
  misc_feature 81..1094: note = CDS
  misc_feature 1095..1252: note = RE
agatgtaatgaaaagaaaaaaggcgtgcctccaagggtagagtacgtgctcgaagcacaagccctgaaggaggcacgcagatgatccacgttggcgtagatcttcaccagagattttgttacatgacagctttggaagcaagaggcaagatcttagaggctggtccggtgacgaatgagggggcggccttacgcaagtatttccggcgatttcgcggtcaggaggtgcaggtggcggtggaggcatgtgggttctggccggcgtttcgccaggtggtggagccggaggtgaagcggttggtgctggtgcatgcgcagcgggtgaaggcgatcgcttcggcgaagtggaagaacgaccgggtggactcgcagacgctggcgcatctgttgcgttgcgatttgttgccggagtcgtggaaggcagatcgggagacgcaggcgcggcggcaacaggtgcggttgcggacgacgctggtgcggcagcggacgcggttgaagaatcaggtgcacgcggtattacatcagcaagggctgcgttcgccggtgagggatctgttcggccggcgtggacggctctggctgggagaagtaaagctgcccgagcaggcgcgggagtcggtgaaaacatgtttgcgcatgatcgatcactacggcgaagaaattcaaaagcagaatctccaactcagtgaaaaagcaaagcaagaccagcgggcgcagtggttgatgaccattccggggattggcgaatgttcggcgatgatgctgttggccgagattggagagatcgagcgcttccccgacaaacaagctttgtgcagctatgccgggctggtgccgcgggtgcgggagtcgggcaaagttgcgcgcggaggaatcacgcggcagggatcgagtgcgctgcgctggatcatggtggaagcggcccaggtggcgacgcgctgttcgccggcggccaagcgctattacgaacggctgctgcgtaagaagcataagcacgtggcccgggtggcggtggcgcgcaagctgctgatcgcggtgtacgcgctgctccaccatggcgcggtgcttgacgaaaaaaagtctgcggcgagctaaggggaatccgtcagctcgaagtcatccttgctcttcgagagcgacgctcagatggagcggcggagtccggacataccttatgtgcctcgagcacgaatagaagcctgtccgcatcgccgcaaaatttacctatggacagctacgcccgttttcataga

SEQ ID NO: 937 - DNA, 1481 bp, unidentified
  source 1..1481: mol_type = unassigned DNA; note = element_0ffe726
  misc_feature 1..4: note = core
  misc_feature 5..249: note = LE
  misc_feature 250..1464: note = CDS
  misc_feature 1465..1481: note = RE
  misc_feature 1..227: note = bridgeRNA
ccccgttaccttcttcgtgtccccgatgatggggatgctggccgctaggcccggtatgactgactgcccctgtcgcacgcatgatccgggggggtgaagccggcagggcgctggtggcgtcggatgaccgctcatagggacacggcctcaagcatgaaggtctcttcgtaacgtggctgccggcacccctcgcccgccacgcggccagcacgggttgaacaccgtgcaccgcctcgaaggagggccctgatgaacggactacccgagcgcacctacgcggtctacctcggcctcgacgtcggcaaagaacaccaccacgcctgcgccctcgatccagcaggaaaacgactgcacgacaagacgctgccgcaagacgagcaacgcatccgtgacctactcactgacctcagtgtgcacggtgacgtcctcgtcgtcgtcgaccagcccgcctcgatcggtgcgctccccgtggccgtcgcccgttcgatgaatattcaggtcgcctacctgcccggccttgcgatgcgccgaatcgccgacctacaccccggcaacgcgaaaactgacgcccgcgacgcgtacgtcatcgctgatgccgcacgcaccctgccccacgcgctacgccgtgtcgacgtcggtgacgacgcgctggccgacctcgaagtgatcgtcgggttcgacgacgacctcgctgccgaaaccactcgcgtcaccaaccgcgtccacggcctgctgacccagatccaccccgccctggaacgcgcgatcggcgggagcctgcaccacccggcggtccttgagttgctgtcccgcttcggtgggcccagtggcttgcgcaccgccggacgccgacgcctgctcgcggtcgcgaagccccgcgcgccccgcaagcacgaagcgttcgtcgacgcgatcatgactgccttggacgagcaaacagtcacggtgccgggcacgcgggctgctgacctcgtcctaccgaaactcgccgatcaactcgcccgcctgctcgcgcagcgcgcggaggcagcgacgcaggtggaggaaatgctcgatgcgcaccctcttgcccaggtcctgacgtccatgcccggcgtgggtgtcaggaccggtgcgcgcatcctgctcgaagtcggcgacgcctcctctttcgccacaccagggcacttggcggcctacgccgggcttgcgcccgtcacgcgccgctcgggcacctcgatccgcggtgagcatcccagtaggtcggtcaacaagaacctcaaacgagcgttcttcctcgccgcgttcgcagagctcaaagaccccgcctcacgcgcgtactacgaccgcaaacgagctgaaggtaaacgccacaacgccgccctgatctgcctcgcgcgtcgccgctgcgacgtcttgtacgccatgctgcgcgacggcacgacctaccaaccaggccgccccgtcacaccgatcgccgcttgacgaagaccatagggaca

SEQ ID NO: 938 - DNA, 1461 bp, unidentified
  source 1..1461: mol_type = unassigned DNA; note = element_101866f
  misc_feature 1..5: note = core
  misc_feature 6..243: note = LE
  misc_feature 244..1446: note = CDS
  misc_feature 1447..1461: note = RE
  misc_feature 12..232: note = bridgeRNA
tccttaagttcgtaggtgcagttacttcgtgagagttacgttgtgctgtaacccgggcgggccgggcgaggctgatgattggttgcccaactctcgagtggggcttgaaaggactggccacccgacccgcttggagacctcgggccgctgattgagatctgcgaatgatcgcttgtttaaggaaatgccggcggggtcgtccatcggggcgttgttcggacacaagcgaaaacgagggatccgatgaccggttcgcggctgtgggcaggaatcgacgtcggcaaggaacaccactggatatgcgtgcttgacacttccggagcggtggtgctgtcgcgacgatgcgacaacgacgaagcaacgattcgcgcggtgatcaccgagatcgacgccctcggcgaggtggtgtcgtggacggtggatctgaccaccgtctacgtcaccttgttgctgaccgtcctggccgacgccgggaaaccggtgcggtatctgtccgggcgttcggtgtggcaggcatcgtcggtctaccgcggcggcgaagccaagaccgacgcccgagacgcccgggtgatcgccgatcagtcccggatgcgctcggacctgcccgttctgcaccccgacgacgagttgatccgcgagctgcagatgctcaccggtcaccgcaccgatctggtcgccgaccgcacccgcaccatcaaccgactgcgtcagcaactcgtcgcgatctgtcccgggctcgaacgcgtcgcgcagatctcctcggaccggggttgggtggtgctgctggcccgttatcagcgaccgagggcgatccgccgtgccggtgtggcccggctggccacgatgctcgccgggtccggggtgcgccatgcggagacgatcgcccgggccgcggtcaccgctgcgaaggcgcagacggtgcggttgccgggtgaggacgtcgctgccgaactggtcgccgaattggcgcagggggtgatcgacctcgacgcacgtatcaacgccgccgacgcggagatcgaggcccgatttcgccgacaccggctggctgaggcgatcgtgagcttgccgggtatcgggttccggctcggcgctgaattccttgccgcggttggtgatccctccctgatcggatcggcggatcagctcgctgcctgggctgggttggcgccgagaccgaaggattcgggtaaacgcatagggcgtctgcatactccgcagcgttacagcaggcgcctgcgccgggtgatgtacatatcggcgttgaccgcggcacgctgtgaccccgtctcgcgtgcctactatcaacgcaaacgtgcggaaggtaagcgtccggtccaggccaccctctgtctggctcggcgtcgcgtcgatgttctctatgccctcatccgcgacaaccgcacctggcaaccgagcttgccgggtaccgctgttgcggcttgacaggatcattgagag

SEQ ID NO: 939 - DNA, 1469 bp, unidentified
  source 1..1469: mol_type = unassigned DNA; note = element_101c82b
  misc_feature 1..2: note = core
  misc_feature 3..250: note = LE
  misc_feature 251..1447: note = CDS
  misc_feature 1448..1469: note = RE
tctaccatcggattctgtgcagtgacggggacacccccggcgcggtagactgacctcgacgggggtgtggcttgcggggtccgcagtcgctgactgctcgattctgaaatgccgcccccgtcgtctgtgccatccagggaagtccgaagggatggtgctaaggcactcacgcgacgcttgagtggcctgtggctctgaacagtagacgagaccgcctggatgagcgaactcgcgctgcaaggaggcacgcatggagtctcagcttcgcgttggcatcgatgtcggttgccacgcacaccgggttgggatcgccgatcccacaggctcgatcctggaggagttcgacatctcgcacagcgaggccggcttccaggagttctttcgtcgagtcgaggaacgaagagcggcactcgggttccccgtcgccgtggcgatggaggggtacaacggctacgcccgccccctcgaccgtctcgtcctggggaagggctaccggttgttcaacgtcaacaacctgaagctcgctcggttcaaggaagtctttcctggcgcggcgaagaccgacccgatcgacgcgcggaagatcctcgagttgttccatcttcgagagcagctgccgatggcgaagggggtgctgcaggaggtcctgcccgcacccgaggtgaacgagaagctgaagagattgagccggcggcgacgccaactcgtcaccgagaagctgcgtgtcctgaaccgaatgcagggcgatctccaggccgtctctcccgaactcctcgcggcaacccacgatgccgacaacctctggttcctgaggttcctcagcttccgcgacgaccttgggcaactggcccggctgcgccgagcgacgatccgccagattccgagtgtcggagtgaagtacgccaagatcatcgaggactggcaagccaaggcgacgttctccgacgaggtcgagtacgtggggccgatgatcgttgaggacgcgaagcggatcctcgatctgcacaagcagatccacgctctcgacgaggcgttggcgaagctggcagcagagtcagagatcgcgtgccgtctctcgacgattccgggattcggtaagacgtcgatcgccgagctcgcgggagagatcgggactgtatcgcggttctccggcgaagcgagtcttgccctgtacatgggaatgagtccattgacgcgccagtctggacagatctctagagccaaggctccgcgccaggtcaacactcgctgccgtgcggcgatgatgacggcagtggcgcggcacatcgggtgcgtcccacagtcgagagcgtactacgaccgcaagcgcgcccagggcaagactcacaaccaggcgatccgcgctctcggtcggcacatggtccgcgtcatctgggcgatgctgcgtgacggacgcgactacgaggtccgaggtgacaccccgtgacttgacaatctaagaggaatgt

SEQ ID NO: 940 - DNA, 1615 bp, unidentified
  source 1..1615: mol_type = unassigned DNA; note = element_102077a
  misc_feature 1..3: note = core
  misc_feature 4..252: note = LE
  misc_feature 253..1488: note = CDS
  misc_feature 1489..1615: note = RE
  misc_feature 8..226: note = bridgeRNA
gttcgtattataaggtcagccagagagaaatctggttgactattttttattcaatttatagattgatagtagccggggtcgaacggaagcacccgtgggactagatcccgataactaaactgttcgccctctacttgttaacgcatgattaggctggttgggacattacgatctcgtataacaagcgaagagatgaataacaagctagatagaggttaccggtcaataccctaacataggaggagatacactatgaatccagtagttggtctggatgtcgcaaaaggtgaaagtcaggttcaaatgttcttggataaaaaaatgccctataaaagcagcgtgaaagttgatcatacggtggatggattggaagagttacactcttatttattagatttagagcgtcaaacaggaatgaagccacctgttgttttggaatcaacgggtcactatcatgccccagttgtacagtttttagaagcaagagaatacattgtcattatcgtaaatccactagtatcttaccgagcaaaaagttctagcttgcgaaaaaccaaaacagatgccattgatgcgtatcacttaggcgaactgtattacaaagaggatttagcgcctcagaaaaagcgtggtgtacagttattaaaccttcggcatctaacaaggcaacatgaaaatatgacgggaattatgattcaaacaaagcttcaatttcaagccgtattagatcaaatattccctgagtacaaaggagtttttggcgatttatacgctgagatttccataaaaactttacaagcttaccctacttctgaatcagtcaaagaagcaggtgtagaagagatcgcacaattcattgatacacattgcaaagcacgttcgtttaattgggcactcgaaagattggaaaaattaattggagctgcagaacgcaatccatttcaatcaactctttatcaaagtcttctagtcagcttgaatatgtatattgatttacttcaagtgtaccaccaacaactttctacgttggagcgtgagattgatgagttagcggcacaacttgaagaatatgaattactccaatcaattcccggtattggtgaaaaaagcgctgcaacgattatttcagaaatcggagaaattgatcggtttaatcatccgaaaaagttagtagcctttgcaggactagatcccagtgtgtttgaatcaggtcgctttaaaggcacgaaaaatcacattactaaacgcggctcggctaggctccgccacatgctttatacagctgttcgttgttctattcgagatagtcggaaaaagaaaacaacacctgaaactatcgcacgaaataagcgattacgagccttctacgatttaaaacgtgaggaaggaaagccatataaagtagccataattgcttgtgcaaataagcttttacattggatttatgcgattttaaaaacgaaaacaccattccaagaaaccatctagtgacagcatcttcaaatacaacaaaaaccttccaaattgaattcggagggttatttgggttgcgctttttagtatagcatgaagtgtttattaatttaaaagatttttattgacaatctattagctg

SEQ ID NO: 941 - DNA, 1510 bp, unidentified
  source 1..1510: mol_type = unassigned DNA; note = element_10289b5
  misc_feature 1..2: note = core
  misc_feature 3..98: note = LE
  misc_feature 99..1196: note = CDS
  misc_feature 1197..1510: note = RE
  misc_feature 1224..1430: note = bridgeRNA
cggaatgcaaagggacttcccactttcgagcgacggcgtcgaggcgccaagattggtggtgtgagtcatcaatctgaagcttatgaaaggggaagtccgtggagcagattacacgagcaacggccgacgtggaagctgggcggcgtgcgattgcacgcgtgggcgccgatctggccaaacgggtcattcaggtacacgccatcgacgctgcggggcgggtggtgtgccggcgcgcactgacgcgcgagaagttcctggcctggtgtgcgcggctgccggctggctgcgtggtggccatggaggtgagttctggagcgcaacactgggcccgacgcctgctggcgctcgggctgcagccgaaactgatgtcggcacagttggtcgagccctaccgcagccagggcagcaccggcaagaacgacgccaacgacgccgccgcgatctgcgaagccgcctcgcggccgagcatgcgcttcgtgccggtgaagtccgtcgagcagcaatcgatgctgtgcgtgcaccggctgcgcgagggcttgaaggccgagcgcacggcgtgcatcaaccgcatccgcgggctgatggcggagttcggcatcgtgcacgcgcagggcgccgaggcgctgcagcgcgtgctcaccgagctgatcgaggatgccggcaacgagatgaacgccctggcgcgacgggtgatccagcacgcccaggggcaatggtgcgagctcgatgcgcacatcgcctggtgcgacgagcgcatcgccgagcatgcacgcgacaaccccgcggtgcgacgtgccgccgccttgacgggcatcggccaggtcggcgccagcgccgcagtggccacggtggacgacttcggccagttcaagaacggcgcgcagttcggtgcctggtgcggcatcgtgccacgccagcactccagcggcggcaagacgcagctcgggcgcatcacgcgccgcggcgacagctacctgcgcagcctgctggtgcagggcgcgaagtctgcggtgttcaccgcacacaagcgcagcgaccccatctcgcgatgggcgctggccttgcgagaacgctcgggctggcaggtggcggcggtggcgctggccaacaagaacgcacgaatcctctgggccgtgatgaccaaggccgagcgctacaacccccaccacgtgagcgtcaagccaccggcggcatgacgcgctgaaacgattcttcctcgcgcagacgacaacgacgaagatgctctgacaggtcagaccggcggcgggcaagctcgactaacccttcgtgactcgactgcatcgagtgccacgcgagcggattggagccctgccgagcggttggcatctgggcccgcacgatccacggctcacgccgcgtgcaacaaggccgtctctagagtggcagtctgttcctcgttcaggccttcgagttgctgcgcttcgcccaaacaaccgtgttcttcaacgatgaaaaccaataccacttgactagattggaagtccctcta

SEQ ID NO: 942 - DNA, 1566 bp, unidentified
  source 1..1566: mol_type = unassigned DNA; note = element_1034807
  misc_feature 1..3: note = core
  misc_feature 4..246: note = LE
  misc_feature 247..1440: note = CDS
  misc_feature 1441..1566: note = RE
attcttaatatatgagtagaggctttcacagtctctgctctttctttatgatgaaggtgattggcctgacgtaatcttcgattgggacatcacgcccggcgacaaatgtgtcagcccgccttcatcgttttacattcgattcagcaagttgggaaagattgtttctcccgtttaacgaaagaatatgagtgaaccttgaagagctggatccaatcataaaccacttacgaaaggagcgtctttctcatgattgctgttggtattgatgtttcaaaagccaagagtacagttgctattcttaatggggatggcagcatccgtgctaaaccttttgatgtccaccatgtcgctgatgagctgcaggcattggtggattacatcaagaggacttccgaacctccaaccattcttatggagcctaccagccactatcattatccacttctgaaagcctttcgggaggcggaactcccagtctgtctgatcaatccataccagatgaagaagtatggcgataccgaactccgaaaggcaaaaacagacaaacgagattctctgcgaatcgctcagtatgcacttgagaagtcgtactcgctgattccttacactcctcaggatcagaagtatgaggatcttcgttttctgtccagacaatacagtcagaggatatcaaccctaactgctgccaaagttcagttgctcagccttctggacgaaacaatgcccggcattacgaccattctcccgcttaaaagcagagatcccgacaactgcgtgcttctgcgtttcattaagcgtttcaagtcattcgatgtgatccgtaagatgggcaagacacgcttcctggacagctatcaggtcctcgtcaagaagacaaaggatcgttttgccggttctaagggacttgctatctatgaactggtccttaacagtattaccacccgtggagaaaatcccttatccgcaatgactcaggatcagtgtgttgatctcgtatccacggctcagaacgctgctgatgagatcaatcttcaaatgaggatcattgcagagaccataccggagtacaaagtgcttcgctctatggctggcgtgggtgatcggcttggccccatcatcctcggtgaaatcggtgacattcgccgttttcacagcggtaaagcactcaatgcttatgcaggcaacgatgccccgccgtatcagtccgggcaattcgagagccggaatcgtcacatctccaagcgtggcaacccggctctcagaaaagcttgttttgaggttatgcaggctctcaaactgacaaaacctcaggacgatcctgtttacctttttctgctcaaaaaggaacaggaagggaaaccttacaacgtagccaagatggctgccgtcaataagttcctgcggatctactatgctcgtgcaatggagttgtacaagtaaatccgtccgctttcattatagccgttaactgccggcctgcaacagcaggtcttattaaggttactcttatttctggcctcaaggtgctcaaaatctttaaaaatctgcttgacaaacattagcaag

SEQ ID NO: 943 - DNA, 1338 bp, unidentified
  source 1..1338: mol_type = unassigned DNA; note = element_1037342
  misc_feature 1..3: note = core
  misc_feature 4..83: note = LE
  misc_feature 84..1097: note = CDS
  misc_feature 1098..1338: note = RE
  misc_feature 1106..1336: note = bridgeRNA
tgatgtgatggtctcctcccaatacggcatctatgtgccatgattgaagttgttaaacacaatcaaaatgggagaaaaccaaaatgaagattacaacaatagggttagacattgcaaaaagattttttcatgttgtctgttgcaatgaccaagggcgcttagttagaaagaaaatgctaaagcgagcgcaagtattagcattctttcaaaatcatccatcttgtttagttgctatagaagcctgtgcaacttctcattattgggcaagagaaatacaaaagtgtggtcataaggtaaagcttattccacctcaacatgtaaaagcttttttaattggcaataaaaatgattataacgatgctttagcaattgccgttgcagcaaaacagccacatattaaaagtgttggtataaaatcgttagaacaacaagataatcaagcgcagcacaaagcgagagagttatcgattaggcaaagaactgccttatgtaatcaaatcagagggctaatcgctgaatacggtattattttaaacaaaggtgtaaacaatatacgcaaaaacataccactaatgttagatgatgaaaccaagtcattatcagaagcgtttaaaactatacttaggcaactacaaacgcaattaaatgtattagattcttgtattgaagcttatggtaaattaattgttgaaacagtaaaaaccaatgatatttgtcagcgagttcaaacaataccagggtttggccctatggtatcaagcgcttattttaatgaagtaggtaacggttctaattatcgacgaggtcgtgatgtttcagcgtccttaggtatagttccccgccaacacagtagtggtggtaaggatactttactagggataagtaaacgaggaaatagttatctaaggtgtttattaatccagggagctaaagcggttgtttcaagagcaaacacgaaaaatgataaattaagtcaatggataaaccgacttgttcaaactcgggggcataaccgagcatgcgtagcttatgccaacaaaatggcgagaatggcttgggctattaccgtctctggtgaggaatactcaacagtataagtaaaccgctcttcaaagaattgcgtgggtagaacgaaacgatgacataacaggtaaaacctgcatattgaaaacctgataacctcaaagaactatgagttcgacgagctgataaggacaatatgcgcggaatacatcgaggtcagaagcattaaacttcattaaaagaccgtatatatgacagcaatcctgtccctgttatcgatgagttagaccttgcaatacgggaggagaccatata

SEQ ID NO: 944 - DNA, 1469 bp, unidentified
  source 1..1469: mol_type = unassigned DNA; note = element_103bbc3
  misc_feature 1..2: note = core
  misc_feature 3..239: note = LE
  misc_feature 240..1259: note = CDS
  misc_feature 1260..1469: note = RE
  misc_feature 17..183: note = bridgeRNA
cttgtatgtttcgttcagaagcgtgacgatgggttgcgtttcggcggagaggccgtacccacctgaggccagggagacctgagcctgttcctaagagcggcccccgtccctctctttgcacgccgtggagaatcggaggccttgtgagcctgcatgttcaaggtcggcgagaagagatgagcccgtggatgcggactgggacggaagccgagacttcatcctaacgtcggagaagatcgatgagcaagctgtccaaggtatttcaggcaaccgtattctgcggcatcgacgtgagcgccgagagtctggccgtagccgtgcaacaagaagatcgaccgctggagcagcgggagttcgccaactcggccggcggtcataaggcgctgatcgcatggctgcacaagcaccaggcgccagcgcgcgtttcgttggaggcgaccggcatctattcgctggatctggccatggcgctggatgcggccgaggggatcaaagtggcagtgttaaatcccaaggcggtgaaccggtttgcgcagtcgctgcgacggtcgaagacagatcgggcggatgcgcaggcactggccgagtacagtctgcggatgcccttcgttgcttggcgagcaccacaacgagagggacttcagttgcgcaccatcagccgccacatcgctgggctgtcggtcgagcacacgcgggagatgaaccgcctgcatgcggcccttgaatcggcgacaacccctcgttgtgtggtcgaagatctgaagcgttcactggcctctgtgcaacggcgcatggcgagactgcggcgggcagccagggcgctggtcgacagtgatgacgccatgcgccggcggttcgcgttgctgatcggcatgcccggcatcggcgagatcagcgcgctgcaactgctgggcgaactggcgccgctctcgccagagatgtcggtgcgtcagtgggtggcgcacagcggactcgatcccgcgcatcgggaatcgggcagttcggtgcacaagccagcccgtatcagccgtgccggcaaccggcatctgcgccacgcgctttatatgcctgcgttggtggcggtgcaatgggacccgcacatgaaggctttctacgagctgctgcagaaccgccacaaggccaagatgcaagcgctggtggcggtggcgcgcaaactgctgcacgcgatttatggcatcttcaaaagcggaatgccctacgacggcagaaagctctttccgcagctggaaatccgataaacgctacaatcgcctcatccagtgaaacggaagctggctctgctgggaagcaaccatgcctagggataactggatgggctcatcctgacgatgaaccaggggctgggcggggagttcctcgcccagcccaacaggtatcggagggatagacccccatgccttgaaaatccaatcctccctcaccaaaaatcttgactccgaagagagaat

SEQ ID NO: 945 - DNA, 1621 bp, unidentified
  source 1..1621: mol_type = unassigned DNA; note = element_1041cb3
  misc_feature 1..3: note = core
  misc_feature 4..251: note = LE
  misc_feature 252..1490: note = CDS
  misc_feature 1491..1621: note = RE
  misc_feature 8..226: note = bridgeRNA
gttcgtattataaggtcagccagatatttctggttgaactttttttatatcgatatatgattgcggtagccggggtagaacgtaagcacccgtggggctaatgatcccgtcaactaaacagttcaccccctacttgtagaaacatgattgaggctggttgggactctgatctcgtataacaagcgaagctatgatactacatggaggaataggggttaccggttaattgtatgacaaggaggaaaataataatgatgaatccagtaattggtctggatgtggcaaaaggcgaaagtcaggttcaagcattcttggataaaaaacaaccgtataaaaagagctttaaagtagcgcatacactggaaggactgacgattcttttagagtttattagagagatagaagaggcttctggagaaaggccccctattgttttggaatctactggccattatcattcgccagtcgtccaatttttcgaagacagaggatatttaataatcatggttaatccactcgtttcgtatcgagcaaagagttccagtttacgtaaagtaaagacggatatcattgacgctcgtcatctctgcgagatgttttataaagaggacctagagccttataaacagcgaggaatccagctattaaatttacgtcatctcacaagacaacatgaaaatattacaggtatgtatgtacaaactaaactacaattccaatctgttttagatcaagtatttcctgaatactgtggggtttttggagatctgtattcagatgtctccttactgaccttacaagtatttcctacttctgaggaagtaatggcaacaagtgaagaaacaatcgccaaaaaaataaaggaattctgtaaaagtcgttcgcaaaaatgggcaaacagtcagtcagaaaagttaaaggctgccgcagatcgcaaccctttccagaaaatcttatacaatagccttatcttaaacatgaatatgtatattaagatgcttctggaatataaaaaacatctatcagatctggaaagagagatagatgctttagcgaaaagcatggaagaatataagattctccaatccatccccggtatcggcgagaaaatcgcagcaatgattatttcggagattggggagattgatcggtttaatcatcctaaaaagctagttgcctttgcgggaattgatccaagtgtttttgaatctggtacattcaaaggtactttgaatcggattaccaaaagaggttctagtagactacgacatgccttatatatggccgttaaaagtgccattcgtgattgtcgcaagaagaaaacgacagatgaactcattcctcgaaataagaggttacgagatttttatgataaaaaacgtgaagaaggcaagccctttaaagtagctgtaatagcatgtgcaaataagcttttaaattggatttatgcacttttaaaaagcaaatcagatttccaagatctggcctagttcgaaaatataactaaagagcctaaatccttccaaacatagaagtttgaaaggttatttggcatgtccaaatttagtatagcatgaaatactttgttttttattaataaatattgacaaactattggctg

SEQ ID NO: 946 - DNA, 1599 bp, unidentified
  source 1..1599: mol_type = unassigned DNA; note = element_1050eee
  misc_feature 1..5: note = core
  misc_feature 6..296: note = LE
  misc_feature 297..1484: note = CDS
  misc_feature 1485..1599: note = RE
  misc_feature 53..266: note = bridgeRNA
ctgctataaataaaattctcccaaccatcagataattatgcgatttctttgcatatcctccttgtgttatcctcgtccagacggacgatgatataatttcctcatgcagacagaggttccctgctttatccctgcggcgtggtccgctttacagcagtgtgggacctctcccttatgggatttcattgatgagccggatgcgggagtgacatctccgcagatttccatgcagggtatgactcataaggacatgaggatctgtctgtacatcaacaggaaaggcaggtgccaacaccatgttcatcgtcgggatcgacattgccaagcggagtcatgaggcagtcatcataactgaaaatggccagaccgtccgtaaggcattcaacttccgaaacaactgcaccggatacaatttgctgctggagcaggtgcggaagctgactcttgtaaagagccagatcgtattcgccatggagtccaccgcccattattggctggcactctatgccagactttcaaaagacggatacaccgtcatggtcctaaaccctatccaatcccattccctgcgggaactctatatccgcaaagcgaaaaccgacaccaaagactcacttgtcattgcggatcttgtccgctttggacgctgcaaagccagcaacgttccccaggacaaaatcctggctctgcgggagctgtgccgcagtcgggcctatctcatagacatggccgccgatttgaagcggaagctgattgccttgttggacaggatatttccagaatacgaatccctgtttgatcccgttttcggcaaggcttctattgctgtgctgcgcaaatatcctacaccccagaaaataaagaacgcgcatctggagaaactgacggaactccttatggaaagcagcggcgggcatttcggggaatggaaagcacgccaactgaaggaagccgcacacaacagcttcgggattgatgacagctgcggtgtgtattccgcactgctcggaatgtttctggaacagattctgtctctgactgaccaggcggattctctggagaagcagattgcatcacttctcaaagaatttgattcccagctgacatctatccccggggttggcattgtcctggcagcaacgattctgagcgagattggcgatatctcccggttctcttcctcggataaactgctggcttacgcgggacttgatccatccgtgaagcagtccggcgagttcaagagcaaccagaaccgtatgtccaagcgaggctctccatacttgcgccgggccatttggctggcgtccacagtcgccgttcagtttgatccgatgttccgggcctactacgaaaagaaaatatccgatggtctgcattacatgaatgtgattggccacgtcagcagaaagatgacagctgtgatcttcgctgtcctccgggatggacagccgtaccaacccgttttaccaactgccggatgaccaaaccgtattatttcagatggcccactacaagggcttggttctctgcgcccttttccgatatacctctatacacacaaaatgtaattttaccccttgacaaatccatagccga

SEQ ID NO: 947 - DNA, 1367 bp, unidentified
  source 1..1367: mol_type = unassigned DNA; note = element_1052410
  misc_feature 1..2: note = core
  misc_feature 3..81: note = LE
  misc_feature 82..1116: note = CDS
  misc_feature 1117..1367: note = RE
  misc_feature 1162..1362: note = bridgeRNA
tgatgtgatggacgcccctccccattggcgttatatgagccatactcaaattgattaatttcaatttaaaggagagtcatcatgagcatcaaagttgttggtattgatttagcaaaacactttttccaagtgtgtgttctgtccaatgaaaacaaagttacttctaacaagaaggttacacgtgcaaagcttttagatgtaatacgtcaatttcctgaaaatacacttatcgccatggaggcttgtggaagctcaaattattgggctagaacaattgaaaaaatggggttttcaattaagttaatccctcctcaacacgttaaaccttttgttggtcaccagaaaaatgatgctaatgatgctcgtgctatttgtgaagcagcctcacgaccaaacttacatagcgtgccaataaaaacaatcgaactacaagacattaaatcacttcgctgtgttagacaaaggttagttgttcagagaatagctatatccaaccaattacgtggtttagcaagtgagtatggcgttgttatcgctaaaagtttcaagtgcctacgagagcaagttcctgaagtattagaagatgccgataatgagctttcagatgtgatgcgcaaactcatttatagcttgtggctagaagtcgatggcctaactgaagatatcaagtcaatatcaattgagcttgaatcattatgtaaacaacaaccaagatataaagcattacttgctattccaggttttggcccgatagttaccgccgcttttttaagccaagtaggaacgggtaaacagttttcaaatggaagacaactatctgcttggtgtggcttagttcctcgacaagcaagctctggcggtaagtccaaattaggccgtataactaaaaatggtaataacgaattaagggcgttattaattcacggcgctagagctgtttcgaaatatacgccagaccgagctgatgctttgagccgttggttcaatgcacttgttatacgcagtggaaaagcaaaggcaattgtcgctcttgccaacaaactaacacgaattgcttgggttattgtaacaagtaaagatgagtttaaagcttcttgtgcatttaaggctgcataattttataaagtagtagaaaacagagtaagtattttaaacctagtttaagtttgcaatgcttgatgaaaaacggtcaaccgttcctgtaaaaacctgccttggggcttgtcattttaatgtcgactttgtgattaggagacaggattcggattacatcatggcgctggctataaacagccaattgagacgtcggatatatgacagcagactgtatcttcattaaaccttgcattaaccggggcgtccatata

SEQ ID NO: 948 - DNA, 1439 bp, unidentified
  source 1..1439: mol_type = unassigned DNA; note = element_1056886
  misc_feature 1..2: note = core
  misc_feature 3..82: note = LE
  misc_feature 83..1186: note = CDS
  misc_feature 1187..1439: note = RE
  misc_feature 1256..1377: note = bridgeRNA
taattggatggactcgcccacgccgaggcgtcaatgcgccgcggtggcagtctaagaagccaacgacagcgagggcgagtccatgaaaaagcatacgacggctaaacagtccctgtcttccaccgatctatcgacctgcacgaccgtggcagtcgatcttgccaagcaggtattccaggtcgccggggaagatacccttggccaagtgctttacgaagagcgactccagtcgcgtgaagccttccatgccttcctgcaccaactgccacccaacgtagtggtgttggtggaaacaggccccggtgctcaagcgtgggcgcggcagctccaggctcagggcaatcgggcgcgaattctgccggcgcaactggtggccaaacatcgcagcggtgcaaaaaatgatcgtaatgatgcacgggccatcctgcgtgcggggcgggacagcaaaatagcggcggtccccatcaaaagtgccaccgcactggccatgcaggccttgcaccgtgcccggcaggggtatgtccgtcggcgcacagccatgagcaaccagatgcggggcttgctgctggagcacggcatcaccttggcacaaggtgatgtcgctatcagtcagaccctgccgcgggtgctggaagacacgacccaaccactgccagacctattgcgcgaactgatcgacgagttgctgggcgaatggcgccaactgggcgagcggatcaacgtgctgaccagtcgcctggagtgcgccgcgaacgcggacaaaaccgccaggcgattgatgaccgtgcgcggtatcggcccgatcattgccaccgcgcttttagccaaggagaccgaacctgaacgttttgccaatgcacgccaattcgcggcctactttggcctggtgcccgagcagaacagcagtgggcagaaggttcgcctgggtgggatgagcaaacgcggtgatagctatgtgcgcagcctgatggttcagggcgcgcatgcggtattgcggcatttgcacccggattcggagcagcccgacgatcgtcggttacagcgctggctgaatcggctggggcgcaaggaagcggcggtgcggttggcgaaccgtaacctacgaatcgtttgggtactgctacaaaatgatcagacttatcgccgccaaccggccaatggccggctggcggcgccaagttcctgattgacagcgttctgccaccggggcgccaaggcgctccagcccctgctagaaaacattgaccccaggtcagaccgtcgcggattgatgcctgcgcccttaccggccttcgaggcctgcccgtaatcggcataccgcgagctcaaccaatgttggccagaagccgaagacagcttcctcgaacaggccttatacataaatgcaaccgggtcgcagtgtttgaaaagcgggtagaccgtggaggcgagtccataca

SEQ ID NO: 949 - DNA, 1108 bp, unidentified
  source 1..1108: mol_type = unassigned DNA; note = element_105ef4c
  misc_feature 1..2: note = core
  misc_feature 3..178: note = LE
  misc_feature 179..1099: note = CDS
  misc_feature 1100..1108: note = RE
  misc_feature 1..177: note = bridgeRNA
cctgtgtgttgttccgatggtatggttgaagtgggaaggagaccgagaggatccaggtcgtcctttttgaggacaggccgcggcatggctcggtcccttcccaccgatgaaccatcaacctgaacagttgcacggggctgttagcagcagaccccgcaccacaggaagaggcgtggacatgataatgcagaactatgtcggttgcgacatctccaagatgtggctcgatttttttgatgagacaagcagtcgttgccggcgcatcgacaaccaggccgatgcgaccgctgcctacgtggcaggccttcagcctggccgggattttgtggtcatggaggcgacaggcgttcatgaccggctgctgcgccatgcgctggccaaggccggcgttgcgttctcgcggcacaatccggcgcatacccactactttgccaagtcgacgagacggcgcgccaagaccgatcgtctcgatgccaggatgttgagcggctacggccggcgctatcaccccgaggccgagccggcgccgcgcgaggaaggcgaacatcttcaatcgcttgcccgcctgcgcgaccaactggtcgagatcagggcaaggctgaagaagcagcgcagtgaggcttttgacgagaccgtcatcagcgagctcgaagagctgaccaccaccttcaacacacgcatcaaggcgatagagagccggatcgccgaggccattcgtcaatccgaggagactgcccgcgacaacgcgttgatggtctccgtgccaggtgtctccaaggtcacggcattctccctgctggcacccgagctcggcctgcggtcacccaagtcgatcgcggcactcaccggccttgcccctttcgacaacaagagcggcaagctcaatcgcagaagccagattcagggcggccgatcgcgtgtgcgccgtgccctctacatggcagcgctgggcgccatcagagcatgtgagcgcttccgagtttgctacagcgccatcgcagcccgttcaggctcgaagaagctggccatcatcgccgtcgcaaggaagctcctcgtcgtcctcaacgccatcatccgagacaaaaaagctttcgcatgaacacagttg

SEQ ID NO: 950 - DNA, 1589 bp, unidentified
  source 1..1589: mol_type = unassigned DNA; note = element_10610fb
  misc_feature 1..4: note = core
  misc_feature 5..355: note = LE
  misc_feature 356..1564: note = CDS
  misc_feature 1565..1589: note = RE
ctcactggactaccctccctcgggagatgggcaagagcggcgttcgaggggaggtccaggtaccgctcgggcgacgatcgtcgatcctggaactaatgcgtgatcgtattgcttggttcgccccgtggacccgctcatcctggggcggaatggaactagatacgttcggggagagcccgtcgcgctcgccgctcgacggccacgatgagacccgctcccccgaatgaaaacgagagaggcccagaccggccacaggatgacgcgccacgtgccccagcaggccagagcgccaatcagtgagcgaccggcaggacctctccctttgcagtgtctcgccgtcccgggaggcgacgcaatgcccttcttcgtagggatcgactgggcgagtcaggcccacgctgtttgcgtgatcgacgagacggcgcgcatccactggcaaggcgccgtggcgcacaccgccgagggcctcaccgagctcctcggccgcctgcgccggctccgccaccgcggcggcctccgcgtcgccctcgagcgcccctccggtctgctcgtcgacaccctcgacgccgccggcctcgaggtggtgccgatccgcccgaacgccctcaaggccagccgcccgcgctactccgccgccggcggcaagaccgaccccggcgatgccttcatcctcgccgacctgctgcgcacggatggccatcgcttccggtgcttgcacgcgccgtcggacgagacgcgcgcgctgcgcgcgctcgtgcgcgggcgcgacgatctcgtcgcccagcgcgtggtcctcgccaatcaactccgcgcactgctcgaccgcttctggcccggcgccgtggccatcttcgccgacgtcgactcgcccatcgccctcgccttcgtcacccgctacccgaccccccacagcgcggggcgcctgggcgaaaaacgcctcgcccaattcctcggccaacacgcctactgtggccgccgccccgttgccgagctgctggcccgcctccgcagggctcccgccagcctggtcggcgacgccgaagccgaggccagtggggacctcgtccgcgccctcgtcgccgtcctcggccccctcgtggcccacatccagcaactcaccgccgccatcgcggctacgctggctcagcatcccgacggcccgctcctgcaaagcctgccgcgcagcggcgccgtcaatgcggcccagatcctcgcggagctcggcgacgatcgcgcccggttccccaccgacgagcagctcgccgccgagggcgggctcgcccccgtcacgcacacctccggcaagcaccacgccgtcgtgttccgttgggcgtgcaacaagcggctgcgccaggccctgaccaccttcgccgacaactctcgccacgcctcgcgctgggccgccctcgtctaccagcgggcccgcggccggggctgtcgccatccccatgccatccgcatcctggcgcgcgcgtgggtgcgcatcctctggcgctgctggcaggaccgtaccccctacgacatcacccggcatcgcgccgcgcagacccttgccgccgcatgacgtgccaagggttgacacaggatgt

SEQ ID NO: 951 - DNA, 1312 bp, unidentified
  source 1..1312: mol_type = unassigned DNA; note = element_1061a2a
  misc_feature 1..2: note = core
  misc_feature 3..237: note = LE
  misc_feature 238..1263: note = CDS
  misc_feature 1264..1312: note = RE
  misc_feature 7..183: note = bridgeRNA
cttgtatctttcgcaacgaggcgtaactttgggttacgtttcggcggagaggtcgtagattccttaggccgcgtgagcagagcctgtgcggagatcggcccccgtccctctctttttgacgccgtggagaatcggaggccttttgagcctgcatgttcaaggttggcggaaagagcaagtccgttatgcaccggacgcgggacggtgccgaagctcagagtaacgcggaggccagcgatgagcaaggggttggagagaagtcaggcaacggtgtttacaggcatcgatgtgagtgcggcgacgcttgccgtggcggttcaacaggcgggccgggatggcttccggcagaaggagttcgccaactcggcctgcgggcataagcggttgatcgcctggttgctcgagtgcggcggtcgggtgcgggtgtcgctggaggcgacggggacgtactctctggatgtggcgctggcgttggacgcggccgaggggatcgaggtcgcggtgctgaacccgaagacggcgaaccagttcgctcagacgctgcggcgatccaagaccgatgccgccgacgcggttgcactggccgagtacagccgcaggatggagttcgtgccgtggcaacggcccagccgcggcgggctggagctgcgtacgttgagccggcacatcgctacgctgaccgaagaccacacgcgctggggcaaccggctgcatgccgtcgaggcctcgaagacaacgccgcgctgcgtgctcgacgatatgaaacgggcgagagcggctatcgccaagcgcatcctcaagctgcgcaaagaggcggtcgcgatggtggggcgggacgcgcagttgatgcgcaagttcgagcaactcaagagcatcaagggcatcgcagaaaccagagccgtgcagttgctgggcgaactcgcgggcctcgatccagagatgacggtgcgccagtgggtcgcctatagcggactcgatccggtgcatcaggtctcgggcagttcggtgcataaaccctcgcgcatcagccgtcacggcaacagccatctgcgtcgcgcgctctacatcccggcgctggccggcgttcgccacgatccgcatatgagggtcttctacgaactgctgcagagcagacacaaaacaaaactccaggccctcgtcgccgtcgcacgcaaactcctgcacgccatcttcggcatcttcaaaacaggcaccgactataacggggcaaagctcttcccctacctcatacccacttcataggtgtttttgctcaaaccagcacaaatccccttgcaatccaagagagaat

SEQ ID NO: 952 - DNA, 1104 bp, unidentified
  source 1..1104: mol_type = unassigned DNA; note = element_106a811
  misc_feature 1..2: note = core
  misc_feature 3..162: note = LE
  misc_feature 163..1095: note = CDS
  misc_feature 1096..1104: note = RE
  misc_feature 1..164: note = bridgeRNA
cctgtgtgtttgcaatgtgtcaggatggttgcggacgggagaccgttgggtccctggtcgtaagaccgtaggcgggcttggtccccgtccgcctttgcttcttccaacctgaacagttgcacgaggccggtgacacggacctcgcaccacagggacaggcgcatgatcataacccgtggcttcatcggaatcgacgtttcaaaacatcatctggacgtgttcgagggcggctttggccggggtgaacgcatcgccaataggccggaggctctcgcgcctctggtggcgcgctggaagaatggcggtgtctttgtgctgtttgaggcgaccggccattacgatgtccggctgcggcaggcgctcacggcggcgggcattgccttcgctcgtatcaatcccgcccgcgcccgcgactttgcacgggccgccggctttcttgccaagaccgacaggatcgacgcgcgcatgctcgctgcaatggcgcaatctctcgcacctgcgccggccaaagcgatcgacagcgatcgccagggtctggctctggcgcacaagcgtcgcgatcaactcgtccatatccgtcagcaggagcgcacccggcggacggaatgtcacgacgccatattgctggcggatatcgaagcgcatctgcaatggctcgatgtccggatcgcgcaatgggatgaacagatccgctgtctgctcgcgcaatgcgaacggctccatcccatcgccaagttgctgcgctcgatccccggcatcggacctgtcgcggccacgacactgatcgcgctcatgccggaactcgacgtcctgccatcaaagcaggtgacagccatcgccggactggcacccttcaacgtcgacagcggacagctcagaggcctccgcagaatcaagggcggacggaaacgggtccgcgacgccctctacatggccgctgtcgccgccgcccgatcgcatgaccgcttcaggaccgtctatcggcgcctgcgcgcggcaggaaagccggccaaggtggccctcatcgctgtcgcccgcaaattgctcgtcaccgccaatgctgtcctgcgcgacaaaacagcattccaaacctgaacacagttg

SEQ ID NO: 953 - DNA, 1408 bp, unidentified
  source 1..1408: mol_type = unassigned DNA; note = element_107f99a
  misc_feature 1..4: note = core
  misc_feature 5..476: note = LE
  misc_feature 477..1394: note = CDS
  misc_feature 1395..1408: note = RE
  misc_feature 20..173: note = bridgeRNA
ctccgtaagttggtgggtggcccgggaggggtgggtgtggctcaaaaccgcttgcctgcagtggttctggtggagtggccgcccgccccttcggggcaccctggctgctgattgagatgtgcgcgctggtcgctgtttacggagctgcggtggggtgttcttcgggccgacgatggatggttcggcgtggggagcatcggatggagcaggggcgggcccggatctgggtggggatcgacgcgggaaaggggcaccactgggcggcggctgtggacgagtcggggttccaggtctggtcgaagaagatcgacaacgacgaggcagcgattctggaggcggtcgcagaggcgctgacgatggccgaggcggtcgactgggcggtcgacctgtcaggcacggcttctgcgttgctgctggcgctgttggcgtcgcacggacagaagcccgtctaagttccgggccgcaccgtgaaccgcatggcgggtgcttaccggggcgaagccaagactgatggccgcgatgccttcgtgatcgcggagacctcgcgcctgcgccgggacttcgtcgtcgtggacgtgcccgcgcagctggtcgcggacctcgctctgctggtcgcgcaccgaaccgacctggtcgccgaccgggtccggatgatcaaccggctgcgggatgtgctcaccggcatcttccccgcgctggagagggccttcgactggtccaaccacaagggcgcgctgaccttgctgacgcactgccagaccccggcagggatacggaggatcggccggtcccgcctggagtcgtggcttcgcaggcgaggcgtgcgcggagccgaacaggtcgcggtcaaggcgttggaggtcgcccaggcccagtccagcatgctgcccggcgagaacatcgccgccgggatcgtcgcggatctcgccactcagctcctggcgctcgacgagcggatcaagcggctggaacggcagatccgtgacaccttccacgctcacccgcaggcgcacatcatcgagtccatgccgggcatcggtccgatcctgggcgccgagttggtcgttgccgcgggcgacctgtccgcctacgccgatgccggccgactcgcctccgcggccgggctggtccccgtgccacgcgactccggacgccgcaccggaaacctgcaccgccccaagcgctacagccgacgcctgcgcagagtgttctacatgtccgcgcagaccagcatcatccaggacgggcccaaccgagacttctaccgtaagaagcgagccgagggctgcggacacgtccaagccctcatcgccctcgagcgccgccgagtcaacgtgctgtgggcactactccgcgacggacgggagttcacccccgcccagccgacggcttgactcagtcattgaga

SEQ ID NO: 954 - DNA, 1549 bp, unidentified
  source 1..1549: mol_type = unassigned DNA; note = element_1080728
  misc_feature 1..3: note = core
  misc_feature 4..251: note = LE
  misc_feature 252..1430: note = CDS
  misc_feature 1431..1549: note = RE
  misc_feature 3..229: note = bridgeRNA
ctcgtataatgaacatgtagtccattatacatttttttattcttaatttcattgtataatatctacatagacactgtggattagtgcaaattactatcgctttgacgattatattaatagactctaaccacagatgtttgtttaattgttaattagttagataacgcttgacgtttaatattgaacgagtttactttcgacaagcatttcgtggatcacattgtctaaatattttgtaaaggagttttattatgatttatgttggaatcgatgttgcaaaagataaacatgattgttttgctatgaattctgatggcgaaatattaattgaaaaattaaccataacaaacaatttatatggttttgaaactctctacaattctttaatgaatttttctgattcattagacaatataaaagtagggcttgaagccactggtcattatagtaataatattctaaactttctgaccgaaaaaggatttaatatctatcttattaatccattacaaactaatctttacgtaaaaggtcaaagccttagaaagactaaaacagataagttagatgcacatgttattgctacaatgcttgtttcagataacttaaaaccctacataccagtatcatatcatatttctgaattaaagtcactaactagacacagatttcgtttagttaaggaaaactctaaatttaaaacttctcttgtaagacttgtagatattgtttttcctgaacttccaaaaattgtttcttctgttgctcaaaagtcttgtttagctttactttatgaattaccaagtgctaaagatatagctgaatgtaatcttacacatttaactcatcttttatctgataattcaaataaaaagtttgacagagaaaaagcacttcaaattagagatttagctagaaaatccattggtttaaatagcaactctgtttcatttgagttaaaacagacaattagtattattcagtttatacaagagcaacttgatgatgttgagaaaagaataaaagaaattttaaaagagattaattctccaatactaacaatacctggaatttcttttaaaactgctggctctattttagctgaaattggagatatttctagatttgattctcctgctaaattactggcttttgctggacttgatccatcaatgtatcagtctggtaaattcttttctactcattcagtaatggtaaaacgtggttctaaatatcttcgttttgctttgatgactgctgctagaatggtttgtttaaatgatgctaccttttgtgcttttaaagatagaaaaatggctgaaggcaagcattatatggttacaatgggacatgtagcaaagaagttggttcgagtcatttattatttattaaaaacaaataatgtatatcaagctagcaaagtggcttaatatcaataatcgcatagtttttaaaagcatttttcgaaatgcttatttgtcatgcaataatttatctaaaaaatttttaaatttttttacaataaactattgacattcatatagttagt

SEQ ID NO: 955 - DNA, 1356 bp, unidentified
  source 1..1356: mol_type = unassigned DNA; note = element_1083a50
  misc_feature 1..2: note = core
  misc_feature 3..83: note = LE
  misc_feature 84..1103: note = CDS
  misc_feature 1104..1356: note = RE
  misc_feature 1125..1342: note = bridgeRNA
gatggggtggatggctccggctcccccggcgtcgcgatgcgccatagtgcaggtgttgtcatctgcgagagaggagccaccccatgtatgttaccactgtcggtctcgatgtgaccaagaacgtctttcaggtccacggcgtcactgacggcggaacggtcgccttcaaccgatcgctccggcgcgctcagatgctctctttcttcgagaggcttgagccttgcgtcgtgggcatggaagcctgctcgaccagccaccattgggcgcgcgagctgacgcgcctgggacataccgtacgactgatccctccatcttatgtgaagccatatttaaagcgcgggaagtcggacgccgccgatgccgaggcgatctgcgaagcggtcacacgaccggcgatgcgcttcgttgaagtgaagtcttgcgagcagcaggcgatcctgtcgctgcaccgcacgcgtgatctggttgtccggcagaggacccagaccatcaatatgctgcgggggctgctggccgagttcgggatcgtgctgccgaagggggtcggtcatgctgtccgatttgcgcgacagggacgcgatgaggcatgtgctgcgctgccagaacaagcgcacacggcaatcgacgacctttgcgacgcccttgtcgcgcttcacatgcgggtggcgtcttacggccgacggatagcggcgctggcgaaggtcgatccgagcattgcacgcttgcagaccatacccggcgttgggccgatcacggcatcggcgatcgccgccacgatcggttcggcccgtcagtttagaagcggcagggatctcgcggcttggctcggcctaacgccactcaacagatccagcggcggcaaggaacggctgggacgcgtctccaagatgggcgacagatacatccggcgccttctggttgtcgggatgacgtcccggatcaagcagatcaggcaaaggcccgacgcctacgatccgtggttctccacgatcctggagcgcaaacccgcaaagctcgccgcggtggcgatggtcaacaagaccgcccgcatcgtatgggccgtcctctcccgcggcgaaccataccgcctccgcgcaacgtgaagatcagtctcgacaaaaaataccgaacggcaagaccagtgacgtgatggcgaacggatcagaccggagaccgagacaccccgtgcttcgtcctgagcgatctctgttcgatttgcaggatgggactcggtttgcggaaaccatcagggccagcggtctcgtgcaccgcgtcaacaggccggacacaagaccgcttctgaaaccgcgcaaatcacatcagaaaagtcttgccatgcaggagccatccacacag

SEQ ID NO: 956 - DNA, 1351 bp, unidentified
  source 1..1351: mol_type = unassigned DNA; note = element_108bbe8
  misc_feature 1: note = core
  misc_feature 2..73: note = LE
  misc_feature 74..1099: note = CDS
  misc_feature 1100..1351: note = RE
  misc_feature 1103..1341: note = bridgeRNA
tatgggatggcccgcccctctcgaagcgattgggtaagatcgcccttgtttggattgagagaggagtggaccgatggacatcgtcgtactcgggatcgatttgggcaagaactcgtgcagcctggttgggtttgatgcgactggcggagtgattcttcggcggcgtatgcgtcgcgacgcggtgcctacttttgtcgaggcattgccgagctgcatcgtcgcgatggaggcgtgctgcggagctcaccatctgggtcgactgttctcggcgtgcggccacgagatccggctgatgtctccggaatacgttcgcccctacgtaaaggccaacaagaacgacgaccgtgatgccgaggcgatcgctgaagccgcgacgcggccgacgatgcggttcgtgccggtcaagagcgaggcgcaatcggacatccaggcgctgcatcgggggcgctcgcgcctggtggcggaacgcacggcgctgatcaatcacctccgcgcattgttgctggagcgcgggattgtagccccaaagggaaggaagcagttggaggcgcagctgacggtgtttgccgacgaggatgatccccgattgtcaccgcgcatgcgcctgttgatcgaagacttgcgggcggagtggcgcagcctcgatgaacggatcgccgcctttgatgcggagttcgtggcaatggcccgcgaggacgaagcggcccgccggctggcgacgatcccggggatcggcgtcatcaacgccaccgcgctcgttgctgcggtcggcgatgcccgcagcttcgggtgcggccgcgacctggccgcatggctcggcctgacaccccggcaggcgaccaccggaggcaaaccgagactgctcggcatatccaaacgcggcaaccgatatctgcgggccaatctgatccatggcgctcgtgcggtgttgccgcgtctcgtgactcaggacagcccgctcggccggtggatccgcagcctgttagagcgaacccacaagaatgtcgtcgtggtggcactggcagccaagctcgcacgcatcgtctgggcggtgctgcgcaaggagcgtggcttcgacccattgattgcggctgcgtaagaaaagggcggtcatcggctactgagctggggccgcgactatctgcgagtggtgaaagaaagatggcctgacagtcgaacggcagcctggaaacctggaccattgaacggtcgattgagaccggtgtgattatgaggaccgggctgcgcggatctccatcttggccggggcacgatcccgagaccggatacgttgacgcagactgaacagagcaatcttcagataccgcttgcagacggggcgggccatacg

SEQ ID NO: 957 - DNA, 1417 bp, unidentified
  source 1..1417: mol_type = unassigned DNA; note = element_1091333
  misc_feature 1: note = core
  misc_feature 2..63: note = LE
  misc_feature 64..1098: note = CDS
  misc_feature 1099..1417: note = RE
  misc_feature 1183..1408: note = bridgeRNA
taatgagatggtccgccgccgagtaggattttgctcggcagttaacatcaggaggatcatcacatgcacatcacatccatcggcatcgatctgggtaagaccacctttcacctggttgcattgggagagcggaacaagattctggttcgcaagaagttctcccgggcacagctgctggcatataccgcgaacctgcccgcatcgctcatcgggcttgaggcctgtgcgggagcacactttctgggtgcggccttgcagggacaggggcaccaggtgcgcctcatccctgcccagttcgtcaaaccctaccgcaagtcgaacaagaatgacttcatcgatgcggaagcgatcgccgaagccgtggccaagcagaacatgcgctttgcgcagctcaagacccaggagcaactcgattggcaggctatgcaccgcgtccgggaccgactggtgcagcatcgcatcgcgctgatcaacgagatccgcggattcctgctggaacgcggcatcacgttcgcggcagggcccatccacctccggaagaacctgcccctgctcctggaagatgccgagcagaacctgagcccgcgcctgcgctggctactccagcgcctgaggcaggaatggcagcagatcgaggtcgacatccaggccatcacggatgagatcgagcgcattagcaacgaggatgcgctctgccggcgtctgcgccagatccccggctttggcccgctcgtctccaccgccaccgtggccgcgatcggtaatgggtctgcctttcgccgcgggcgtgacttcgcggcctgggtcggcgtcgtgccacggcagtactccaccgggggcaagcagaagctgttcggcatcagcaagcgcggcaacctctatctgcgtcgcatgttgatccacggtgcccgtgccgtcttgcttcgcgtccggtacgacaccggaggattcggacagtgggtgcaccggctcgcccagcgggcaccgcgcaacaaggttgtggtggcgatcgccaacaagctggcacgcatcgcctgggccgtgctgtccagtggcaagaactatcaaccccagccgctgctgaacgccgcagcctgatgtggccgtggaaaagacgctacgcttggaaagcacaaaacgctttccacttttccaccgccacgacgacgaagattgaagaagttctaccaaggtctgcggaggagagaacaagacgaaagaacagtccaacggcgtgtcggaaaacctagtggcgaaaatgcgtcccgagtgaccgagggatttataaggaccaacacgcgcggatcatcatcgagtgcccggagaaacgattctccacaaagaggccggatacatttacgcggactattccttcgcccaacttcaaccctcttgcagttcggcggcggaccataca

SEQ ID NO: 958 - DNA, 1326 bp, unidentified
  source 1..1326: mol_type = unassigned DNA; note = element_1093e9a
  misc_feature 1: note = core
  misc_feature 2..69: note = LE
  misc_feature 70..1110: note = CDS
  misc_feature 1111..1326: note = RE
  misc_feature 1109..1314: note = bridgeRNA
ctatgtatggactcctccaacctaatttcttaggttggaagtcgaccaaaaccctaagggagtccatacatgaagtattcaactacagttggtgtcgacttagcaaaaaatgttatccaagtgtcggtggtttctccgcgcggcaaagagcttctcaatcgatcgttaacacgccggaagttcgcggagttcctgggtaaacagaagccatcgctggttgccttcgaggcgtgtgcgacgtctcatcactgggcacgaacagcaaaacgacacggtcattttgcgcgcattattccagcaaaggcggtcgcgccgttccggcagggtcataagacggacagcaacgatgcgcttgctgtagcagaagcagctcgtcgtccgaacataaaagatgcgccgatgaagtcgattgatcagcaaggcctgcaggcgatccagcgttcaagagatctgttggttcaagaaagcacggcactgtccaaccatctgcgtggcttgctaatggaatttggggttgtcattccgcagggatttgcggcactgcgacgcatgctgccagagatcctcgaggacggtgccaacgaggtacccgatctgtatcgacccacactgcatcgcctctacggtcgcttcgtggaactgcgcgacgatatccagtcgatgaacgttgaggtcaaagaactggtgaagcaacacccggcctgtaaacggctcactgcacttgaaggcgtcggcccgatcagtgcggtgttgttgtacgcctcgctcggcaccggcgaagcgttttccgggagtcgcgagttcgcggcctatcttggcctgacaccaaggcagttcagcagtggtggcaaaaccaacatcgtgggcctgagcaagaagatcggcaactgtcgactgcgatctgtgctgatccagggtgcgagggcttatgtgcacaaactcaaagaaccgaagacatcaaaagatcgttggttggtggacctcatcgagcgtgcaggccacggcaaagcggccgtcgcacttgccaacaaaaacgtaagaacggcctgggcgatgctgacccagggaacagattatcaacgtcggccgcaactaaacgtagctgcgtaacgagtcccgcaaacaaaagaccatgatcagataaagatatccgctccggtagaacctgttctgctttgagaccttagaggtcattgacccttagaggaaccggagtgcgcatacatagtgggccaggagatagcatctccaacaataggccgaatatacaaacgcgtcttaattctgatcaaagaaattgtttgctagactggaggagtccatata

SEQ ID NO: 959 - DNA, 1643 bp, unidentified
  source 1..1643: mol_type = unassigned DNA; note = element_10a6249
  misc_feature 1..4: note = core
  misc_feature 5..271: note = LE
  misc_feature 272..1513: note = CDS
  misc_feature 1514..1643: note = RE
  misc_feature 12..291: note = bridgeRNA
ttgctataatggtgttggttctgaaagttcacagccagtgagctatacagatgcccaaacctaagctacaatgtagatgtgctgagagaacgatgcactgcttgagctgaacgctcgtaatcgcaaactgttctccgccatctcattgcagcgttcgattgacgcaggttgagttatcagcagatataaatgttgctgtacattcgtgtcacaaagcaagctgaatcggtaatgggcataggcggaaccgcatgaaaaaggaggtcagaaaatgaagtctactgttatcaccgctgttggaattgatgtgtctaaaagtaaaagcacagttgcagtacgcagaccgggtggcgagatcgtgatgcggcctttcgacgtgcgccatacaaacagtgacttgaaaaagctggtctctacgctcaaggaactgggaggggatattcgaatcgtcatggagcataccagtatgtactggagaccaattgccctgactctgaagaaagcaggcttctttgtgtctgtagtaaatgctatgttaatccacgatttcagtgataatactatccgaaaacttaaaactgaccgcgccgatgccttaaaaattgcaaactatgcactgacattctgggacacactgccgcagctcaatggcgaagatgaaacgagattgttgcttaaaatgcagtcaagggcaaatgaaagaatcaccgcaacggtaacacttcttcgtaacggcttgattgcactggcagatcagacctttagcggtgtgaaccttgtctttgatcagaacacgaaaaatgccacagacgggcatgaaaaatgggtagatttctttctgtgttattggcatcgagactgcgtttgccaatattctatagatgtttttactgagtcttatcaaggctggtgcaaacgaaagaattataaattccgtacggataccgcacacaagatctattttcttgcgcaggaatgcgtggctacacttcctaaatgtgaaagtacaaaggttctaatcacgcaagcctgtaaaagtctgaacgctgtctgtgaagtcagacgaagcactcagcttgaaatgcagcggttggctgcactgcttccagaatacgagattgtaatgcaaatggaaggtgctgggcctgttactgggcctgctcttatggctgagatcggcgatgtccggcgtttcaagaacaagaaagccctcgttgcctttgccggaattgacgcaccgcctttccaatcgggtgcctttgaatctaaatcacgccacgtttccaaacggggctcaccgcatttgagacggacaatatttcttgtttctaatattatcctgacactctcaaacccagagaatgccgttttctgctttatggacaaaaaacgctcagagggaaagcatttctatgtctacaccattgcgggaagtgcaaaattcttgcgaatctactatgctcgcgtgaacgagtatctacgctcccaagcagcaacgactgtctgtaaatgatgtttgacagattctactatgagaatttcggctgacaggctgcgccgtcggcttattaaagttaccggatgcttactgcacccggcaatcgttcttttttcgattcagctattgacacaagttagcaggt

SEQ ID NO: 960 - DNA, 1192 bp, unidentified
  source 1..1192: mol_type = unassigned DNA; note = element_10bba37
  misc_feature 1..2: note = core
  misc_feature 3..211: note = LE
  misc_feature 212..1189: note = CDS
  misc_feature 1190..1192: note = RE
  misc_feature 29..189: note = bridgeRNA
tcctttagatttgttattggctaaatttaaaatgagaaaggaagcaaaagtgaactatgacagccgctccgagtttagactcagctcctgatgaagacttttgcctcccttttcatcatgaactcaaatagaaattcgggttagagacccattatcaaggagttgagttaaatgatgaatttctcatttcgttttccctaataacaaatttatgaaaaatgtgattattggtatcgacatcagtagcaggactttggacatctgtattcacaattatcctgctatcgaacatcaggttattgaaaatgatattaaagcgattcggtcattctttaggaagtacgccaaagatgatctggtagtcgctatggaaaacacaggccgctataattggaatttgtttgaagtgttgcccagctttaatttcaaagtatatgtaatctctcctctccacttgaaaaagagtttagggctgatacgaggaaagaatgaccaaattgatgcctcacgtatttgctcattcattgaaagaaatcaggcagacattagtccgtggaaacccactccagttgagataaaaaagctaaaagtattactgacagagcggaattcgaggataaaaatgcaaagacaattgcttcggcagcaacaggactataagctgatgaagtctatttctttccaaaaggaacttagtaaactgaataaaaagttattagaaaccgttgatctccaggttaaaaacgtagaagctcaaattgaaaaaaccattcaagccgatgagtcgcttacagaccaagcccgattaatcaggtccgttcccggtgtaggtaaagtagtttcctggatgatgattgccaaaacagaaggctttacgatgatcaataacccccggaaaatggcttgttactgtggggtggtgccctttgatcatcaatcaggcacatctatcagacagagaccaagggtctccatatacgccgacaaaaccatgaagagcacactccatttagctgccatgagcgccatccgattggacaatgacttaagaatgtactaccgaagaaaaattgaagagggaaaaaataaaatgagtgtcttaaatgccgtcagaaacaaaatcattcaccgaatatttgcggtcattaaaaaccagaccttgtataaaacggacttggctttgtcatagaaa

SEQ ID NO: 961 - DNA, 1093 bp, unidentified
  source 1..1093: mol_type = unassigned DNA; note = element_10c031d
  misc_feature 1..2: note = core
  misc_feature 3..163: note = LE
  misc_feature 164..1081: note = CDS
  misc_feature 1082..1093: note = RE
  misc_feature 1..165: note = bridgeRNA
cctgtgtgtcgagcttgtggttagatgggtgtcgggaggcagaccgttgggtcccaggtcgaagcgaccgtaagctggctcgggtcgcctcccgactgcttatgcacctgaacagttgaacgaggccggttgcatcggacctcgcagcacagggacaggcctcatgatcatagcacctggcttcatcggtatcgacgtctccaagaaccatctcgacatcttcgacggcagcacgcatcggatcgccaacgagagggaggcgatcgccgcctggctggcggaactgaccgctccccggctggtcctgttcgaggcgaccggtacctacgaccggcagctgaagcagcagttgcacgccgccggcattgaccttgttcgggtcaacccgctgcatgctcgagctttcgcccgtgccaccgggcaactggccaagaccgacgcgatcgatgcccgactgcttgcggccatggctcaggcgttcaacccggcgccacagccgccggacgatccagagcggatggaactggccgagttgcaccgtcggcgggctcagttggtcagctgccgccagcaggaacgcacccggctgcacaccgccatcccgagtatcgcccccagcatcgtcagccacctggactggctcgacgccgtgatcaagcagctcgagcagcagatcgagatgctgatccgccggtccacagccctgacgctggccgccagcctgctgcgctccatcccgggcatcggcccggtcaatgcggcggcgcttatcgcgctgatgccggagcttggtcagcgctccggcaagaccatcgccgcactcggtgggctcgccccgatcaaccgggactccggccagttccgcggccagcgatcaatcgccggtggccgcgctgaggttcgcaagcttctctacatggccgccgtcaccgcatcccgctcaagctctcggttcgccgagacctacaaagggctcactgccaaaggcaaagccgcaaagcttgccctcatcgccgtcgctagaaagctcctcgtcacagccaacgccatcctcaagaccggacagcccttcaaagcctgaacaacacagttg

SEQ ID NO: 962 - DNA, 1538 bp, unidentified
  source 1..1538: mol_type = unassigned DNA; note = element_10c2b37
  misc_feature 1..3: note = core
  misc_feature 4..242: note = LE
  misc_feature 243..1421: note = CDS
  misc_feature 1422..1538: note = RE
  misc_feature 3..220: note = bridgeRNA
cttgtattataaagtagtagttattaaagcccctctccaagggctgtatgctacactgtaagagatgctgtggattggttgcatacttctaccacaagatggttcaagaaaggttccaaccacagctccttacaattttgttgattagttaaataccgccagacggttgatgtggaacaaggctacaaaagtaaggcgcactgtggatacagcatcacattttttcatcggaggtatttgttatggtggtttctgttggtatcgatgtctcgaaggataagcacgattgtttcatcgttaactctgagagtgaaatcctggcggatgtcttcactatccccaacaacatggatgggtttcactatctgttgcaacgaatccaggattgcaccaacacgcaggacaaaataaaagtagggcttgaggcgactggacattacagctacaacctgctcgggtttcttcttgacaatggtctgtccacctatgtcctgaatcccttacgcacaaacctttaccgaaagagtctcagtctgagaaagaccaaaaccgaccgagtggatgcacgaacgattgcttctatgctgttatccgatgcgggcctcaaaccctatacagatacagcataccacaatgaggaattaaagtcacttaccagatatcgttttgataaggtaaaggagcgttccaagctgaaaagctctatctccagactggtctgcatcctattcccggagctggaaaagctggttccttctctgcatcttgcttctgtctacgctctgctggaggagtttcccggtgccaagcaagtcgctgcagcccattttacaaggctgaaagcacttcttgaaaccgcctccaaaggccactataaacgggatatggctcttgaaatacgagatgccgccagaaactctattggctcccagatgcccgccaagtcccttgaattacagcacaccatccggctcatccgtgaattggataatgaaattactgaaattgaagagcaaatacaagccattatggatgaactacattctcctattacctctatccccggtatgggatttcgcatggctgccatgattcttgctgaagttggtgacttcacccgttttgattccccggacaagttattggcctatgccgggatgtctccctctatttaccagtccgggcagctcaagaattgctatcctcacatggagaagcgtggctctcgatatctgcgctatgccctttacaatgcgaccaagtatgtttgccaatgggatccaactttttccgattacctcgctaagaaacgagcagagggcaaacactacaacgtcgctctttctcacgctgccaagaagttagtacgtctcatatttgcgatggagaaatcccgaacgacataccgtttggcagcttaatctttgtttaatcattgttagacggggtcatctcggacccctgctttgctataccttttttgagccatctgttttttcaccaccactcattttaggggttgacacttaatagttaat

SEQ ID NO: 963 - DNA, 1387 bp, unidentified
  source 1..1387: mol_type = unassigned DNA; note = element_10c47f3
  misc_feature 1..2: note = core
  misc_feature 3..88: note = LE
  misc_feature 89..1108: note = CDS
  misc_feature 1109..1387: note = RE
  misc_feature 1160..1380: note = bridgeRNA
ataatgagatggacgctccagattttacggtatcagtgtaccagactggatcgttgtataacgtcctgacaaatgaggagcgtccatcatgcaagtatcaactctcggtattgacctggcaaaaagtgttttccagcttcacggcgttgatcacaacgggaataccgttttgcgtaagcgtctgtcacgtgcccggtttgttcagtttgttatcaacctgccgccctgccttatcgggatggaggcgtgttcatccagccatcacttcgggcggctgttcagggagcacggtcatcaggtgaaactgattccgcctcagtatgtaaaaccctacgtcaaaacgaacaagacagatgcggcagatgcagaagccatctgcgaggctgtcacccggccaaacatgcgtttcgttgaaataaaaacggtagagcagcaggcggtactgacactgcatatcgaacggagtctgcttatccgggagcgaaccgccgtgattaacagcctgcgggcgatgctggctgaatttgggtttgtcattccgggggggcgtcggcaggttcatcagtgcgcgtccgatatcctgggtgatgatgaaaacgggctttcacctctggtccggtccagcgccgcccgccagctggcgcatatccgggagctggacaaccagctgtcgcaggtggaaaaagagctcacggcatggttcagaagccgcccggattgtcagcgtgtggcgcaggtgccgggcgtgggtctgctgacagccacttatgttgtggcctctgtcggaaacgcacagcagttcggctcggcaaaacagtttgccgcctgggtggggctgactccccgggagcattccagcggaggtcaccagaaactggggcacatcagcaaacggggggacagctattttcgcttccttctggttcacggggcgagagcggtggcagcctggattcagcgaaccggtcagggaaccccatggctgctggcgctgatgcagcgcaaacctcacaacgtggcagtcaccgcacaggccaataaaaccacccggatactgtgggcgatgctgaggcgcggaacagaataccaccccgcaacgccagcctgatacaggctcaggctgacgctacgggttacagtaaacagagtcacacgttaccggaagtgcgggtgtaatcagtaagatggcaaaacaggtaagaccgcaggtgagagaagccgtgacggcacaggggcggaaaagcccgtagtggatgtctggtactcacctggcggttactcatcatggtcaggggaaaatccctggaataaagaccgaatatatggctgcagctaccactttgtcatttttactgaaaaaacatttgcgatccgggagcgtccatat

SEQ ID NO: 964 - DNA, 1622 bp, unidentified
  source 1..1622: mol_type = unassigned DNA; note = element_10cdb04
  misc_feature 1: note = core
  misc_feature 2..307: note = LE
  misc_feature 308..1534: note = CDS
  misc_feature 1535..1622: note = RE
tataattcatccctttcgcttcgctcaaggcacaacactgcatgaaaatgtgttgacgcctttggcgtttttttattttttgttattctaatcatgagaatagttccatacactacaattcacggggaggtgagtaagtgtgtattttacatgcaacctcgcatttttatatgtgtagttcggcacttcaagcacaactaaatatgactttgagcatgaaagcttatctttgcgtaaacgactcgtttatagagtgccctacagtccctgtggcgcgattctcaaatttgatttggaggtgtatctgatgttaaaaatcgtctatccaaattgctgtggaattgacgtgcataaaacttttgtgttggcggttatcgccataacagacgaacatggagttacgcaatattttcgccatcgcttctcaactttcacaaaagggttgggagagctgaaacagtggttagaatattattcttgtacggacgtctgtatggaatcaacaggtaaatattggattcctgtttacaatgttctggaagattcttgttccatttgccttgctcatcctaaatatgtcaaagcgattcgtggtaaaaaaacagataaaaaagacgcgaaatggattgccgacttattcaaacacgatttagttgctggaagttttattccgccactccctattcgtgaattacgtgatttagtccgttaccattttaaactaacaaatttttgttctagtgaagccaatcggcttcaaaattctttaactgtttctaatatcacgctttctagtgttttatccgatgttcttggagtaagtggcagtcgaattattgacgccatcctagaaaagcctaccgatgaaattgatttatccgctttaatacatggccgtttaaaatcaaaactatcggatttagaattagctatcgatggtaaaattacagatgaacaagccattaaaattcgaattatcaaatctcattatgatgcattaactttgtgtaaatctgatcttgaaaaagcaatcattgaagtggctgaagagtttagagcacaacaagaactcattcaaacggttcctggttgtgccaatcaattcactgcaatcaaaatcatttctgaaattggcgtggatatgggtcaatttccaactgctggccatttatgttcctgggctggtttaacgccaactaatgacgaaagtgccaataagaaaaaatccgttcggatttcaaaagctggccactatcttaaacctcttttagttcagattgccaatggcattgtgaaaagtgaaaagtatccagaacatcgcaacaaatatcttcagttaaaaaaacgtagaggacacaaaaaagcaattatcgctattgcacggcgtattctaaccgcaatctatcacgttctcctgaaaagagagccttacgattcgtcctattattcgattgaaattgtgcatcctaatagagtaatgacaattaatggagctatatcatttgctaaaagtcacgggtttgttgtctcttaaaaaaaatttttcgagataaaacctttatttggtatgctcttttttaaaagaaccgattgttaaaaccttgaaggtttattttcaagct

SEQ ID NO: 965 - DNA, 1419 bp, unidentified
  source 1..1419: mol_type = unassigned DNA; note = element_10ce261
  misc_feature 1: note = core
  misc_feature 2..473: note = LE
  misc_feature 474..1406: note = CDS
  misc_feature 1407..1419: note = RE
  misc_feature 14..240: note = bridgeRNA
ctacttgtttcattgacctcaggacggggcctggccaaggctcggtctaggtgcccgggttggtcgctctcatccgcggctgcccacgatgatcgtgtggctctcacatggactgcgccgcccgggcaccgccgggcaggagaggctcaagaagggattgctctgctctaagtagcggtgccctccacgcccaacccacacaggttcgaggcaagggaggacgtcatggaagagcaggttccgcgggtcgtgatcgggatggacccgcacaaacgcagcgtcaccatcgaggtgatgctcgctgacgagtccgtcgtcggcggtggtcggttcgacaccaccgtcgagggctaccaggcgatggtggaagcagtggcgacgtggccggatcgggtctgggcgatcgagggttgcgaaggctcggacgacacatcgcccaccggctcctggccgacggtcaggacatcgtcgacgtgccggccaagctgtccgctcgggcgcgggtgttcgccaccgggcagggccgcaagaccgacgcgaccgacgctcactcggtcgcgctggtcggcacccgcatggccgggctgcgaccagtggtgtccgatgcccagctcgaggtgctccagctgctggtggaccggcgccgctccatcggggacgagcacacccgcaagatcagccagctgcaccggatcctgttggaattgctgcccggtggcgcgaagaagcacctctccgcagcgcaggccaaggtgctcttggccggggtgcgcccgcgtgacgccgtgggcaagacccgcaagcgggtcgcggccgagctcgtggccgacctggaacggatctacacccgcaagaaggccgccgacaaggaactgaaggagctggtggccgcgaccgggacctcgctgctgggcctgcacggcatcggcccctccggcgccgcccggctcctggtcgaggtcggggacctgtctcgcttccccgaccgcaaccacttcgcgtcctggaccggcaccgtccccatcgacgcctcctccagcgaccacgtgcgccaccgcctctcccgcggcgggaaccgtcagatcaaccgggtgctgcacatcatggccaccgtccagctgcgcacccccaccaccgaaggacgcgcctacttcgaccggaggaaagccgccggcaagacctcgatggaagcgatgcgatgcctcaaacggcgcctgtccgatctcgtctaccgcacgattctcggcgactacaccgcaggaaaagtgacgggcccgggagggcaacggggcaacgactctgactccagcgcgaccggctcacaagcccacaccggcacttcggacaagccacttcccggacccgccaacaccaagcctacgaccaccctgccccaggcctcttgacacagaagggagc

SEQ ID NO: 966 - DNA, 1376 bp, unidentified
  source 1..1376: mol_type = unassigned DNA; note = element_10d93eb
  misc_feature 1..2: note = core
  misc_feature 3..86: note = LE
  misc_feature 87..1118: note = CDS
  misc_feature 1119..1376: note = RE
  misc_feature 1127..1364: note = bridgeRNA
tgatggtgtggaacggcccttcgcaccggcatcgaggatgcctaatgtggtgacgccaatcgccacaagatagaagggaccgttccatggaaaagattaccatagtcggactggacttggccaagtcgatctttcaggttcatgccattacggatgatggacatgtcgctgtccgacgtgctttgcggcgatcacaggtcttggagttctttcgccaaatctcaccatgccttgtcggaatggaagcatgcgggagcgcccactactgggccaacgcgattggcgaattgggtcatactgtgcggttgatgccgcctgcctatgtgaagccctacgtcaaacgcaacaagaccgacgcggctgatgctgaggcaatctgcgaggcggtcacgcggccaacaatgcgctttgtgcccgtcaaatcacctgaggagcaggctgcaagcgtggtcttgaaaacgcgagagctattcgtgcgtcagcgaagccagactgcaaacgccatgcgtgcccatatggctgagcttggggttgtcgctgccaccggaatgacaaggattgccaaactcattgccattttgcgcgacgatcgtgacggccgtctgccaaactcggccaggttagcgctccttgaaatggccgagcaaatagaaaagctgacggccaggatcgaggcgctcgacgccaagattatcgcggccgtgaaaaccgatgaagcggctcgtcggctgactaccatccccggtgtagggccaatcatcgcggcaagcgttcgcgccgctgtccatgatcccgaagccttccgcacagggcgagatttggcggcctggatcggcattacaccaagggcgaattccagcggaggaaaggagcggctgggtaagatctcaaagcaaggtaataagcagttgcgcaccttactcatcgtgggggcaacctcggttctgaagcaggctcgccgtggggccaagctgccagcctgggtcgtttcgttactggcgcgcaaggcgtacaaagttgctgcggtcgctttggcgaataagatcgcgcgcacgatatgggcgcttctcgtcaagggcggcacctaccaagcgccgggaagcatgaccagagtataggacaggagaggctccggcggttcgccgtcggatcaagcaaggtgccaaatgagtgatgagtccgaggggcgacacctcgataccgatcagaccgtctgacgcaatgcgcttcgagcgcgtgaaagtgattaggcgatcggcatcgcggatatcatcgtggccagcggctatgaccgcgctgacaggccggacatatgactgcaccgtccgacggggatttacgcagaaaccatcttgctaatcaggccgttccacata

SEQ ID NO: 967 - DNA, 1217 bp, unidentified
  source 1..1217: mol_type = unassigned DNA; note = element_10d95d6
  misc_feature 1: note = core
  misc_feature 2..214: note = LE
  misc_feature 215..1186: note = CDS
  misc_feature 1187..1217: note = RE
  misc_feature 35..204: note = bridgeRNA
tcttaagtttacaatctattaattttatagatataactagaaagaacaaaagagaggattaaggttattatacacgcagagacctagatctcgtcaacattgaaaatcccctctcttttctacacagatttcgtacagttctatgaggcctttaggacctcgattttaagtcgttgaaacttgcgtaggttgtcctttcaaaaaacattttcttatgactaaagatattaaatattttggaattgacattagccaattagtgttcgatgtgacagattctgatggtaattactatcagtttaaaaacaatgcatcaggctataaaaagttcacaaaactcttaaattctggaagctattgcgttatggaagctaccggttattatcattatcagttggcttattatttgcttgaaaatggtataaaagtatctgtagagaatccattagcggtaaaacgattcatccagatgaagttatcaaagataaagaccgataagagcgattcaaaacttatttgtgactatgctcatcaggtagatttaaagctttggaaaggtaatactaagaatgaaatggaatgtcttcagattaccagagctctttcagtatatacaaagcaaagcactatgttaaaaaacaaattacatggagaagcagttttggggcagccaagcaaagtcgttgtatcatccttaaaacgtagtttaaaacagcttgataaagagatgaaaaacttagaagacaagttgttgattttggtaaaacaatcccatcaagatctattaactcgtttagagaccataccaggaattggcagaaagacagccattatgctagtggttttaacaggtggtttcgagcgtttttcaagtgggagtgaattgtgtagttatgctggtctaacaccaataattaggcaaagtggaagcagcgtgaatggacgagctcgaataagtaaaataggtaatcaaaagcttcgtaatttattatttatgtgcagttttaatgcttgcaaatacaataaagcttgtcgagatctttatgagcgcatagtagcaaaaggaaagagcaaaaaactagcattgatagctgtatgtaataaactgttaaaacaggccttcgctattgcaaaatctggattaatatatgatgatacttatagaagtactttagtgaaaaattaatgcttttttacttgttttttaccacagtact

SEQ ID NO: 968 - DNA, 1367 bp, unidentified
  source 1..1367: mol_type = unassigned DNA; note = element_10d9fc3
  misc_feature 1..2: note = core
  misc_feature 3..76: note = LE
  misc_feature 77..1102: note = CDS
  misc_feature 1103..1367: note = RE
  misc_feature 1078..1354: note = bridgeRNA
tgatggggtggacgccccctcgacggcatcgatgtgccaaagtggagacgtttgaacaccactgaaggaggcgtccatggaaaagattagcataataggcttggatttggccaagaacgtatttcaagcgcacggcgcggatgcatgtggcgcggtcgtgtttcgcaagaaattgcggcgcgatcaggtgcttacgttcttcgccagtcagccggcttgtgtggtggcgatggaggcgtgcgccagcgcccattattgggctcgcgagattgccaagcttggtcataccacgcggctgatcgcggctcattacgtgaagcctttcgtcaagcgacaaaagaacgatgccgccgatgccgaggctatctgtgaagccgcgcaacgtccgacaatgcgctttgtgacgatcaagaacgaggagaagcaggcgtccgctgtagtgtttcggacccgtgatctgctggtgcgccagcgtatccaaaccatcaatgcactgcgcggtcatcttgctgaatacggcgtggtggtgcgtcaaggcccagtgcatgttgccatgctcatcgcacatgttcaagatcccgagtgcgatctgccggagactgcgcgcgcgattctctcgatcttagtcgagacgctacaatcgcttgagaccaagattaaaattctcgatgcagagatcgcaaggcgggccaaatcggatgatggtgccaagaggctgatgacgatcccgggcgtaggccccgtggttgcgacggcgatcgaggcactcgcgccacccatggagatatttagaacgggacgcgattttgctgcgtggctgggtttaacaccattacagcattccactggcggcaaacaacgtctcggcaagacctcgaagatgggcgagcggactatgcgtcggcttctgactatcggcgccagcagcgtagtgcgccaagcggccatccggggcgccccggcaggctcatggctcgcgcgcatgctggccaagaagcctcgcatgcttgtgatcgttgcgcttgccaataagatggctcgcatcgtttgggcacttatggtgaaaggtggaatttatcgaactccagctgtagccgcgtgagcggtattacggatgtgaggttgtcgaagatgtgagaagatcaaaggaaaggtatggcgcaacggtcggtgagacgggatcgggaaaaccagatgatggatatgcgcctggagcgcgccagattgaattggacccgatccgcttactcccatacgggcccgcggcacgtgaaaggccgcatcagaggccggacacatgtcagcacccgatctcacgccgcaccatccaataagattcttcttgcatccacgggggcgtccacaca

SEQ ID NO: 969 - DNA, 1360 bp, unidentified
  source 1..1360: mol_type = unassigned DNA; note = element_10de82c
  misc_feature 1..2: note = core
  misc_feature 3..71: note = LE
  misc_feature 72..1100: note = CDS
  misc_feature 1101..1360: note = RE
  misc_feature 1110..1350: note = bridgeRNA
ttatggatggcccgcccctcccgccggcaccagtgtatgatgccagtgtccaagagaggaaggagcgagccatgcgtataatgatccttggtattgacctgggcaagaacagctgcagcgttgttgggctgaacgaaagtgggaaggtcgtcgttcgacggcggatgcggcgtgacggggtcatcgcgttcgctgccaagctgccaccatgcgtcatggcaatggaagcttgctgtggtgcccaccatatgggccggtccctggtggagtttgggcatgaggttagactcatgtcgccggagtatgtgcgaccttacgtcaaggctcagaaaaatgacgaccgcgacgcagaggcgatcgccgaagctgcaagccgcccgaccatgcgttttgtcgaactcaaaagcgaggagcaactcgacattcaaaccctccatcgcgtgcgcgatcgtctggtcggtgagcgtacttcactgaccaaccagatcaggagcttgcttttggagtgtgggcacgtcgtggcacaggggcacgctcgattaggtttgttgctcagcgaattacttgataccgaggcaggcacgctaagcccgcgcatggtgttcctgctgcgtgacatgcgcacacgctgggacgaactcgatcggcgcattgctgcttttgatgctgaatttgcgtccatggcccgaactgacgagcgagctcggcgtttgacggacattcccgggatcggcgcattgaacgccacggcgcttgtcgctgctgtcggcgacgcagcgacgttttccaagggacgcgacctcgcagcgtggttgggacttgtgcctcgccaggccaccaccggcggaagaccgaagctcttgggcatcactaagcgcggcagcagatatttgcgcaagatgctgatccagggcgcgagatccgccatgccctcgttggcaaggagcgacagcgcagtaggggcgtggctgcgaggacttctcgcacgcagtcactccaatgtcgccgtcgtcgcactggccgcaaagatggcgcgaaccgtctgggccttgctacaccacggacgaagctacaaaatcatgacgataacaactgcctgagacacataaaacagcgctcatggcgaaaacgacgccggatgcgctgaactgcgagtggtaaaaggaagatggcctgacagttgatcggcgttctgaaaacctccggcgcaaaatggccttcgaggccggcccctttatgaggatgaggacgcgcggatctccatcttggcagtggctagcgcgccaacatgccggatacgtttgtgcagactgttcaaaccagcatccaattatcgcttgcaaacggggcgggccatacg

SEQ ID NO: 970 - DNA, 1620 bp, unidentified
  source 1..1620: mol_type = unassigned DNA; note = element_10de86f
  misc_feature 1..3: note = core
  misc_feature 4..186: note = LE
  misc_feature 187..1488: note = CDS
  misc_feature 1489..1620: note = RE
  misc_feature 8..222: note = bridgeRNA
gttcgtaatataaggttagccagatatttctggttgacctttttatttttggtcttaatattacggtagtcggggtagaacgtcgcacccgtgggttaaatcccgtcaactaaactgttcaccccctacttgtataaacatgtttcaggctggttgggacaaggatcccgtttaacaagcgaacctatgacattacaagaagccttaggggataccgacaagttgttttacacaggaggagatttgattatgaatccagtcattggtctggatgtttcaaaaggtgaaagtcaggttcaagcatttttagacaaaggcaaaccttatcgtaagagctttagcatcaaacacaatactgatggtttaggtagtttattagagttccttcatgaagtagagagttcagctggtggtcatcaacctacggtcgttttagaatcaacaggacactaccattttcctgtaattcaattttttgaggagcaaaattatgtttatattgttgtcaatccacttatctcatatcgagccaaaagttcgagtttacggaaggtaaaaacggatgcaattgatgcttatcacctttgcgaactgttttataaagaagagttagagccttataaaaaaagaggaattcaacttttaaatcttcgtaatctaacaagacaacaagaaagtcttgccgaaatatcagcacagactaaaatacagctgcatacccttttggatcaggtatttcctgaatatagtggagtttttggaagtttatattccaaagtctcattgcttacattattagcatttcctacttcagaagtagtgttaagtgtgagtgaaagagaaataacagagaaaatagcatcgctatgtatgagtcgttcagatgcatgggcaaacgaaagggctaaaaaattaagggaagcagcccttcgtaatccgtttcaaaacaacctctaccagagtaatatttttaatctagagttattagtcaagatcgttcttcaataccaagagcatctatctaagattgcagtagaaatagatgccctcgctaaagaaattgaagaatatcatatacttcagtctatccctggaattggagagaaaatcgccgccacgattatctccgaaattggtgagatagatcggttcaatgatgccaaaaagctcgttgcattcgctggagtagatccaagtgttttctcttctggtaagtttaccgcatctgtaaatcgaattaccaaacgaggttctagtaggcttcgtcatgccttgtatatggctgttcaaagtggtattcgtgatgctcgtaaaaagaaaacgactgatgaaatcatcgcacgcaataaaaggttaagagaattttacgataagaaacgcgaagaaggaaaacccttcagagtagcagttattgcatgtgttaataagctcttacattggatttttgccttactaaaaagcagaactactttccaagatacagcttaaaaactatatctagctaaatacaacaaaaccttccaaataaaacatagaggaaggttatttggcatgaacatttttagtatatcatgacgttattaatcattttattaaaaaatgttgacaaactattagctg

SEQ ID NO: 971 - DNA, 1613 bp, unidentified
  source 1..1613: mol_type = unassigned DNA; note = element_10e4d01
  misc_feature 1: note = core
  misc_feature 2..577: note = LE
  misc_feature 578..1462: note = CDS
  misc_feature 1463..1613: note = RE
  misc_feature 6..228: note = bridgeRNA
tcgtattatgaggtcagccagtacaaaatctggctggccatttttagttgaaatggttgtaggattatggtagccgggtagaacgcaggggattttgggggactctggatcccgccataaaaactgttcacctcctacttgtctaaacatgtttgggctggttgggacaaagatctcgaataacaagcgaagctatgtaggacaagaggtaaaggggttaccggcaaaatgaaaagggaagggagatatcatgaacccagttgtaggtatagatgtatcgaagggagagagtcaaggacaagtctttctggacaggaacaagcctatcggtaagaactttcgttttactcatactcagtgagggacttaggatttttctgaaaacattaagagacgtggaaaaggaaagtggtgtacgtcccgccatcattctagaggcgacgggacactatcatcttccgttggtgaaatttgcggaagaaaacagctacttactgattgtccttaatccacgtcgcaaagagcgaagaaatctcatctacgtaaggtaaaaacagatactgttgatgcgtatcatttgggggagctctactacaaagaagagtttgatccatacaaacaacgaggtatacaactatttaatttacgccaactaactcgtcagcatgaatcgatgacaactatgtatgtacaagcaaagttacaatttcaggctgttctcgatcagctttttccgcaatatgtaggaatatttggtgatctgtatgcggaaatatctttacgtttattacaagcatatccaacacctcaggctgtacaggaagccggactggagcaacttattgagcttattcaatcgggtaccactcggtgtcgttcaaggatgtgggcagaagaaaaagcaaaaaaaatcatgactgctgcacagaacagcccgtttaaagaagctgtctatgagagccatgtcatcagtatacagatgctcattaccctgcttcttcagtaccgagaacatctatccacccttgaacaacaaatagatgctctagctgaaaaaagaaaagaatatgatctactacgctccattcctggcgttgggaacaaaattgcggcaacaattttgtctgagatcggggagattggacggtttgaccatcccaagaagttagtcgcttttgcaggtgttgacccaagcatctatgcctctgggaagttcacagcgacctctaaccgtattaccaagcgaggttccaaacgacttcgccgagcgctgtttctcgctgttcaatgcggattacaaaggtctaggaaccaaaggttacgagcgttctacgatctaaagagagaagaagggaaaccatacaaggtagctctgattgcttgtgttaacaagctattacggtggatctacgccattttgaaaagagaagaaccttataggtctgactgtcttcaagcctaaataaacaaaaggtaagacaaaaaccaaaaccttccaaatccctcttggaaggttatttggcatgcttaattttcagtataacatatgctattttcagtataacatatgctaaaggaatttttttaaaaccttgacaagatattagctggtt

SEQ ID NO: 972 - DNA, 1370 bp, unidentified
  source 1..1370: mol_type = unassigned DNA; note = element_10f31e0
  misc_feature 1: note = core
  misc_feature 2..74: note = LE
  misc_feature 75..1103: note = CDS
  misc_feature 1104..1370: note = RE
  misc_feature 1135..1357: note = bridgeRNA
tgatgctgtggacggcatccatcacccggcccgaagaccgataaggtcttggggcaatagatggaggaagccagatggtgcagccagttacagccggcctcgatatcgctaagaacgtttttcacgcctacggcgtcgatgccaacggcgagaaggtcttcagccgtaagcttcgccgtgcgcaggtcgagagcttctttgccaagcttgagccttgcctgatcggcatcgaggcctgcgcgacagcgcatcactgggctcgcacgatcgagaagatgggccatcaggtccgtcttatgccgcccgcatacgtgaagccttatgtgaagacccagaagaacgatgaagcagatgccgaagcaatctgcgaagcggtcacccgcccaaacatgcggtttgcggagacgaagaccgtcgagcaacaaagcgtgctggtactgcatcgaacccgagcgatgctgatcaagcatcgcgcgcggatgggcaacacgatcagagcgcacctcgcggagtttggcatcaccgagagtatcggcaggatcggtctccacagactgatcgaagttgtcgtttccggcgaagatgatcgaatcacagaagtggcacgccgagcgatgatgtgcttggtcgagcagtatcgcctgctccaagaccagatcctcgatctcgaccggcaagtcatggtctgccacaggtcgaacgatgcgagtaggcggctggccacgatccccggcatagggccgctggctgcgagcgctctcgttgcctccgtcggcgatgcgtctagcttcaagaacgggagaagctttgcagccttcatcggcctagtgccaaaacaatcatccagtggtggaaaagagcgtctcggcaaaatatcgaagcgtggcgatcactacctgaggtggctccttgtcgtcggcggccttgcggtgatccgatacgcacagcgacacggcacgcgtcgcccttggctggtcaaacttctgcagcggcgcacggccaagatcgccgccgtcgccatggccaacaagatggcgcggatcgcctgggttctgatggcgcgcggcggcgcgtatcgcgaaccggaggcgcaagcggcataggaattagcgggtccatgccgggcgcgcttcacgaggttggaaagggctaaaggtaagtcatgcagtaagcggtcgaccaccgagatcggtaaaacccattgatcccagggcgcctcgagcgcgtgcttttgatcgggagctgatcttgcggatagcatgaaggccatcggtgttcgcgccgagcaaacaggccggacacatgggcgctaccgaccagctcttcgtgacacgcaagaaagtccttgccaacggggtgccgtccacaca

SEQ ID NO: 973 - DNA, 1537 bp, unidentified
  source 1..1537: mol_type = unassigned DNA; note = element_10fe246
  misc_feature 1..2: note = core
  misc_feature 3..242: note = LE
  misc_feature 243..1418: note = CDS
  misc_feature 1419..1537: note = RE
  misc_feature 3..220: note = bridgeRNA
cttgtattatagagtagtagtttttagtgtccctctccaaggacatgtgctacactgtaagggatgctgtggatcggtttggttctcctaccgcaagacggttcaagaaaggctccaaccacagccctttacaggattgttaatcagttagataccgctccgacggtttatgtggaacaaggttacaagagtaaagtgtcctgtggaatcagcatcaaacaaaacatattggaggtatcatcatgatttgtgtgggtattgacgttgccaaggacaagcacgactgcttcatcctcagttcggaaggggaagtcttggcagatgtgttcaccatctccaacaacgcggaaggctttggcacccttttgcagaccatccgtcgctgtacccgtccgtcagacaaaataaaagtagggcttgaggctaccggacattacagttacaacattcttgggtttcttcttgactgcggcctgccaacctatgtcataaacccgctgcacaccaatctctaccggaaaagtctgagccttcgcaaaaccaagactgatcgggtcgatgcgcgaaccattgcgactatgctaatgtctgatgtggacctcaagtcctacacagacacatcatatcacaacgaagaactaaagtcactaacaagatacagatttgacaaagttcgggaacgggcaaagctgaaaacttctatttccagattggtctgcattctctttccggaactggaaaagttggttccgtccctccatatggcatcggtttacgcacttctcagtgaatttccgggtgcaaagcaaatcgcttccacacacctgacacggctgacaaatcttctgcacgagacatccaagggacgctacggacgagagaaagccacccagattcgggacgctgccagaaattccattggatctgccatgcctgccaagtctctggaactgaaacataccattcggctcattggagagttggatgaagagattgaagaaattgagaaagaaatcaattcaatcatggaggtcgtccattctcctattacaaccattccgggtatcggcacacgcatgggagccatgatcctggcggaagtcggcgacttctccaacttcgattccccagacaagattctggcctatgccggtctgtcaccctcaacctaccagtcagggcagcttaccaactgctactcccacatggagaaacgaggctccagatacctgcgctatgccattttcaacgccacgaagtttgtctgtaattgggatccgaatttcgccgcctacctcgccaagaagagggctgagggtaagcactataatgttgccatatcccatgccgccaagaagctcgtgcggttgatctacgccatggagaaatctcggcagccataccgaaccgcagcataattgttgtctgaacattctctcagagcgccgttgacgacgctctgcttgccatgccgtttttgcagtggtaactttttctgcattgtcctcagattgggtcttgacttttaatagttagt

SEQ ID NO: 974 - DNA, 1396 bp, unidentified
  source 1..1396: mol_type = unassigned DNA; note = element_11016dd
  misc_feature 1..2: note = core
  misc_feature 3..231: note = LE
  misc_feature 232..1380: note = CDS
  misc_feature 1381..1396: note = RE
  misc_feature 12..224: note = bridgeRNA
tccctacgttttcctgtgggaggcggtgagcccttcgtacggttcacccacccaggagtgccgggtgtggctgtcacctgatagcagatgacgtggctcccactgattggccgcccggtactccacgacgactcgggtgccaattgggaaatgcgaatgatcgctgagtagggaatcgacagcgaggtcgtccgtgggaggcatcagtaccaaaccgcacggaggcaccacatgatcgccatctgggctggcatcgacgcagggaagacccaccaccactgcgtcgcgatcgatgagagcggccatcggctgctgtcacgtcgcgtcgccaacgacgagcccacactgctcgaactcctcgccgacgtcctggctctgggcgatgaggtggcctggggcatcgaccaagccgacagtggagccgccctgaccatcgcgctcctcctcaatcacgaccagccggtgcactacctctccggccgggccatccatcgcgcctccgagagctatcgcggcgaaggcaagactgatgccaaggacgccgccgtcatcgccgaccaggtccgcgtccgccgcgacctgcactccgtacgcaccagtgacgacacgatcaccgacctcaagctcctcactggccgccgcatggacctggtcgccgatcgcacccgcaccgtcaaccgcctccgcgctcacctcacaggcatcttccccggcctggaacgggcgttggatctgaccaacaccggcccgctcacgttactgacgggctaccaggccccggctgccctccgccggctcggcgtgaaacgcctggccacctggctccgcaaccgcaaggtcctccgtgccaaccagcttgccgagactgccctgctggccgccgaactggtacgcacgctggcgacggaggtgatcagcctcacccagcagatcgccgagctcgacaaggccatcgaaacccggtttcgcgagcaccacaccttcgacgtggtcaccagcatgcccggcctaggtgtcatcctcggagccgagttcctggcggccaccggcggcgacatgaccgtcttcggcaccgccgaccgcctcgctggcttcggcggcgtggcgccagtaccccgcgactcagggaagatcagcggcaatctacgccgcccccgacgctacaaccgcagactccaacgtgtcttctacatctcggcgctgttcagcatccggtactgcgagaactctcgccggttctacgaccgcaaacgcgccgagggcaagcgccacatccaagccgtcctcgcccttgcccgacgatgcgtcaacgtcctgtgggccctcttgcgtgacggacggcgctgcgaaccggcgcctccaccaccacttgtggcttgacagacggcattaggaa

SEQ ID NO: 975 - DNA, 1561 bp, unidentified
  source 1..1561: mol_type = unassigned DNA; note = element_110b84e
  misc_feature 1..4: note = core
  misc_feature 5..282: note = LE
  misc_feature 283..1446: note = CDS
  misc_feature 1447..1561: note = RE
  misc_feature 37..266: note = bridgeRNA
tcacgtataattaaaaccatcacgaaaggggtggttttaattatttctcctttcttagaattgttatatttgcaggattagctacctgcggtataataaaggcaagcactgtggatttgtatctatacaattacagcttagactggttggaggtgactcaaaccacagcggcttgtctgaaatggtaatcagttagttaacgccttgacgtttctatttgcgtgaatacatcggcaagccgtctgtggaaaacagcagtgcagaaaagaaaaggaggaaaccatgtattatattggaatcgacatttcaaagttcaaacacgattgtgccgtaattgacgacgttggtgaagttatcactccctcgtggtcgtttgcaaatgatcacgagggcttctcacagctcaaagtcttgcttgactctcttggcacagaaacaagaataggacttgaatctaccggtcattacggaacgaatttaaagctgttcttagaatccatcggcttctcattcatggagttcaatcctctgctaatcaatcgtttcgttaaatccaagtccctgagaaagactaaaagcgactctattgattgcatgatgattgctcgctatttaatgacggtagagtacaagccctatccatcattattataccacaccgagaagctaaagtcactaacaagattcagagattctcttgtcaggcagagaagccgacatcttgttgagcttactaacatcttggacaaagtatttcctgagttcaaacccttcttcggtgggaggttctctgttacggcattacatattctctctaactactcatcgccggaaaagatttctaatatgaactccaaatcatatgaagctctaagaaagctatcccgcggcagattctcaacagttgattttgccaagctcaagcagcttgcaaaaaacactgtaggaagcaccgaagattatcttttgcaggaaatgcaaattgttttagagctatatagcaagttagattctatgattgatgaaacagagcgctcaattaaagaatgcgtttccgtcatgaatccgcctatgcttactgttcccggcattggcattgaatccgctgctgtaatgcttgccgagtttggtgatttctctaaattcgataatccttctcaaatgctctcatttgccggaatagagccgggatatttccaatctggaacatccgaaacaaccggtaaaatggttaagcatggctcatcatatcttcgttacacgcttatgaactgtgctcagacagttgtaaactatgagccaacctttgccatgttttatgctaagaagcgtgcagagggcaagcctcacagggtagctttatctcatgttgtcaagaagctgctacgtgttatttatactctccaaactaaaaaccttgcatatgatgctgaggctatgagataattattgatcatactttttttagtccttgaaatatggggcttgtttgctatgttcttttttcttccgaaaaattttttgagaaatttctaaaaagctattgactttttatagttag

SEQ ID NO: 976 - DNA, 1387 bp, unidentified
  source 1..1387: mol_type = unassigned DNA; note = element_110ee93
  misc_feature 1..2: note = core
  misc_feature 3..88: note = LE
  misc_feature 89..1117: note = CDS
  misc_feature 1118..1387: note = RE
  misc_feature 1088..1374: note = bridgeRNA
agatggagtggttgccgccctcccctgacggcatcgatttgtgccaaggtcgtggtgttaagagccacacaacggagaggacggcgagatgaaggatatgatgatcggggtcgatctggcaaagaatgttttccaggtccacggcgcgctgcggacaggtgaggtccagtttcgcaaaaagctttcgcgcaagcagttccccgcgttcatggcccagcagggcccgtgcctggtcattttcgaggcttgcggcggcgcgcactattgggcgcgcgagatggaagcgcttgggcacgaggtgaagctgatcgcgccgcaatacgtgcgaccgttcgtgaagcgccagaagaatgacgccgccgatgccgaggcgatcgtcatcgcagcccgccagcccgagatgcgattcgttgagcccaagacagttgagcaacagtcccgcgcggcgattttccgtgaccgggagcgcctggtgcatcagcgcaccgcggacgtgaacgccttgcgggccctgctgtatgagcacggccatgtgttccctgtggggctacgccacctcaatcgcatgacggcgcttgtggaggatgagacctccgacttgcccgcgctgatccgggaggagtgccaggacctgctggcgcagatcgcggagaaaacggcgcgtatcaccgagcgggccacgaagctcaaggcgctggcctcccagtcggaccgggcgcgccggctccagaccatgccgggtgttggcccgctgacggccttggcagtggaagccttcgggcctgacatggcgctgttcaagaccgggcgcgactttgcggcgtggttgggcttggtgcccaggcagcattcctctgggggaaaggagcgcttggggcgcatgaccaaggccggccaagccgacatccgacgccttctgatcatcggcgcgatgtcacgtctgaactggcttgggcagcgcacaattagtgagggcagctggctgtcacgcatgttggcgcgcaagcccaagatgctggtcgcgatcgcgctggccaacaagatggcccggcagatctgggcgatgctgacgaagaacgaggactacagagatccggcgcgggcagttgcggcatgatattcatgtcgaaccgctagcaacggcgccaagggggtgtgagaagacgacgacctgaatgggcaaaatgatcgaacagatccggattaggaaaaccagtagcaggctacgagctgaaagctcgatttccagatttggacccgatccgctgatcaccataccggcccgcggcttctgaaaatgccgcatcacgaggcctgacagaagttcgcactcgatcacgcgcaagtagggtcaaaaaattcttgcaccacgggcggcaaccacaga

SEQ ID NO: 977 - DNA, 1583 bp, unidentified
  source 1..1583: mol_type = unassigned DNA; note = element_11121a3
  misc_feature 1: note = core
  misc_feature 2..248: note = LE
  misc_feature 249..1424: note = CDS
  misc_feature 1425..1583: note = RE
  misc_feature 4..226: note = bridgeRNA
tactattatataaagtcatagtctttctttaccttttctacaggtttgactatgctattttaagatactgtggattggttatcacctcctaccacttgatggtttaaaaaaggctccaaccacagtctctttgtttatttgttaatcagttagttaccgcatgacggtttatcaagaagtaggttacgattgcaaggagtcctgtggatcttaagacagtatcaatactttatatcaggaggtcctatatgatttacgtaggaattgatgtcgcaaaagataagcatgattgctttatcacaaactctgatggcgaagtccttttcaaggcttttaccatcaaaaacaatctcgatgggttcgacgagctttatcagaaaatagaatccgttatggaagatgcttctaaagtaaaagtaggcctagaagccactggacactatagttacaatcttctcggatatctgcttgataaaggtctggccacctttgttatcaacccgttacatactaatctgtacagaaaaagtctaagccttagacagacgaaaacggataaagttgatgcccatacaattgcttctatgctaatgtctgacgtgaacttaaagtcctactcagacacatcgtatcacaacgaagagcttaagtcacttactcgctatcgttttgataaagttaaagaacgcgcgaagcttaaaacatctatatcccgtcttgtatgtatccttttccctgagttagaaaagcttgttccaacacttcatcagaattctgtttatgagttactctacgaatttcctggtgcaaaacaggtagctaatgcacatctcacaagactttcaaatcttcttgaaaccgcatctaaaggccactacacaaaagaaacctctatcgcttttagagaggctgcaagaacctctatcggttcaaatatgccagctaaatcgcttgaattaaagcacaccattaagctcattagagagctagattctgaaatcgaagagattgaaaacgagattaaagtcatcatggatgaaatcaattctccaatccttagcattcctggaatcagctatcgaatgggtgccatgattattgctgaaataggtgactttagccaattcgactctccagataagatccttgcttatgcaggaatgtcgccttctacctatcaatccggccagttagataactgttatgccagaatggaaaaacgtggttctagataccttagatatgctctgtttaatgcaaccgcatatgtttgtctatgggatccaacctacaaggcttatcttgccaagaaacgagctgaaggcaagcattactatgttgcaatgtctcacgcgaccaagaaactagttcggctaatttatcatctcgaacgcactggacagcaataccaaaaagcaatctaattcttccaacatcatatcttcttgtcagagcatcatactcgatgctctatttgtcatgcaattttcaaggtactgattgcgatgaataagtcatcgccactatactcaaaacatttctgtttttgaaactatttattgactttctttaatagttagtct

SEQ ID NO: 978 - DNA, 1576 bp, unidentified
  source 1..1576: mol_type = unassigned DNA; note = element_111c272
  misc_feature 1..2: note = core
  misc_feature 3..245: note = LE
  misc_feature 246..1421: note = CDS
  misc_feature 1422..1576: note = RE
  misc_feature 3..225: note = bridgeRNA
ctcgtattatatagtcatagcttttctttaccaattctccggtataagctatgctgattttagatactgtggattagttttttcctcctaccacttgatggtttaagttaggctctaaccacagtctctttgtatatttgttaatcagttagataccgcatgacggtttattttgtacgaggttacaatcgcagagagcacccgtggtctaaaacagtatcaaatacatttaaaggagtttttctatgatatacgctggaattgatgttgccaagaataaacatgattgttttatcactaactcggatggagaagtgctctttaaagcttttaccattccaaacaaccgcgatggttttgatgaactctatcagaagatttcttccgttaccgatgatttaaccaaagtaaaagtagggcttgaagccactggacactacagttataacatcttggggtatcttcttgataaaggtctgaccacctttgttatcaacccgttacataccaatctttacagaaaaagtctaagtctcagaaagacgaaaacggataaagtggatgcccatacgattgctaccatgcttatgtctgatgtgaacttaaagtcctactcagacacatcttatcacaatgaggaacttaagtcacttacccgctaccgttttgataaagtaaaagaacgggcaaaactcaggacttccatttcccgtctggtttccattctttttcccgaattggaaagcctggttcccactcttcatatggcttctatttccgctttgttaagcgaatttccaggtgccttgcagattgcttctgctcatcttaccagactgaccaatctgctttctgttacttccaggggacattatgatcgggacaccgccattttattccgggaagctgccagaatctctatcggttcaactatgccagcaaaatctctggaactgagacataccctaaagctgattggtgaattagatgccgagattgatgaaatcgaatgggaaatcaaacggattatggatgacctccattctcccattcttaccattcccggtatcagttaccgtatgggtgctatgattctagctgaaatcggcgatttctcccgttttgattctcccgataagattcttgcctatgccggattatctccatccacctaccagtccggacagttggaatccgcttattcccatatggaaaaacgtggttccagatatctgcgttatgcactttttaatgccgccaaatttgtctgtaactgggatcctgtatttgcagcctatcttgccaaaaagcgggcagagggcaagcattataatgttgcggtttcccatgctgcaaaaaaactggtcaggattatttatcagttggaaaaatcgggacaggcttacgctaaatcatcttaacttttctgtttgaaaatctcctttttgagcacctgcaaagatgctctatttgtcatgcagttatcaaggttctaaatatcatttttctatattgaaatgcatttctgcaaatcattcaaaaataccattttaagacttgacttttaatagttagt

SEQ ID NO: 979 - DNA, 1368 bp, unidentified
  source 1..1368: mol_type = unassigned DNA; note = element_111fd91
  misc_feature 1..3: note = core
  misc_feature 4..86: note = LE
  misc_feature 87..1112: note = CDS
  misc_feature 1113..1368: note = RE
  misc_feature 1089..1355: note = bridgeRNA
tgatggggtggatgcccccatcccggcggcatcgcaatgtgtcagattggtggcgtcaacttcacccagcaaaggagagagcatccatgtcagaagttagcatagtcggcgtcgaccttgccaagcgtgtattccaggtccacggagcaacatcgaatggaaccgttgttttccgcaagaagctcagccgagcacaattcctgccatttttagagcagcttccagtctgtgtggttgcgatggaggcctgcgcaacggcacattattggggacgagaggttgccaaacttggtcacagagtccggctgatcgctccgatctatgtgaagccctttgtcaaacgtcaaaagaatgatgcggcagatgcagaagccattgtcgaggcagcatcgcgcccgaccatgcgatttgtcgaagtcaaaactgaagaacaacaagccagtgcgatggtctttcgtgcgcgagacctgctgatccgtcagcggacgcaaatcaccaatgcccttcgtggccacttggccgaatacgggatcattgctgggaaaggcatacgacagctgaagaagcttcgagactcaatatgctcgcaatccacagacctgccgcaagcggtttcagaggtggcactcatttatcttgatcagatcgatgattgcagcgcgaagatcgctgttctggagaaaaccgttcgcgccagatcatctgtgacagaaagggcaacactccttcagaccatgccgggagttggtccgatcggagccactgcgattgaggcattcgcaccgccgatggaagagttccggcgcggacgcgattttgccgcatggcttggtcttgtcccgcgccagcagtccaccggcggcaaacagatcctcggcaggacatccaaaatggggcagcgagatatccggaggttgctgattattggcgctatgtcttcaatccgcgccgctcttcgaaacggcccacaagaaggtacctggttggcgcggatgcttgcgagcaagccacgtatggtcgttgcaatcgcgcttgcgaacaaaatggcgaggggaatctgggccatgttgacgaagggcgaagactaccgagatccggaggtgatggcataacgtcaaataccttcggttagtcggatgtgaggaggtcagagagcagtaagggcaaatgatcgcaatgatccggaatgggaaaaccagactgattcaatgagccatgagctcgccgaattgatgtggacccactccgctcatctccataccggcccgcggccatgaacagtgccgcacactgaggcctgacacatgaccgcacccgatcacacgctcaattgtaaaatggccttgcacattgggggacatccacaca

SEQ ID NO: 980 - DNA, 1425 bp, unidentified
  source 1..1425: mol_type = unassigned DNA; note = element_112135c
  misc_feature 1: note = core
  misc_feature 2..7: note = LE
  misc_feature 8..1099: note = CDS
  misc_feature 1100..1425: note = RE
  misc_feature 1205..1419: note = bridgeRNA
taatgggatggtccgccgctctgttccacagtggctggaacataagaggtgcaagggagaccatcattatggaaatacacacgatcggaatcgatctcggcaagacgatttttcacttagtaggcctgaattcgcgcggggaggttgtagtgcgaaagaaattctcgcgtctgcagctgctacgcttcacggcgaaccggcaggtgtgtttgattgggatggatgcggaggttcccactttcttggtcgggcactgcgagagcagggacacgaggtgcgtttgatcccggcacagtatgtgaagccgtatgtgaaaaccaataagaacgacttcattgatgctgaggcaatcgcagaagctgtgggccggcccagcatgcgctttgtcccgatcaagactgacgatcaactggacatgcagtcattacatcgagtacgcgagcgctgggtaacgcgacgcacggccgtggtcaatcagatgcgtggattactgctggagcgtgggatcactctgccgaagggaaggtgtcatttagaggcggccttacccatgcttttgaaagatggcgatgcgaagctatcgggagtagtacggttgctgctggcgcagctaaagctggaactcgagcaattggccgagcgagtggaagaggcagatgcgctgattcggcacctggcgcaggagagcgatgtgtgtcggcgtctcgacgcgatccccggcattggaccaatcacagcaactgcactgattgcggccatcggcaacggagcagcattccgcaagggccgtgacttcgcagcctgggtgggcatagttccgagagagcattccaccggtggcaaacagaagttgctcggcattagcaaacgaggaaactgctatctgcggaagctgttggtgcaaggcgcacgcgctgttctgcaattcaaagagaagcaatcttccggtctgagtacgtggcttatacaactcgcctcgcgtacccattacaacgttgtcggtgtcgcactcgccaataagttggcacgcatcgcctgggccgtactgacgaccggtaaagtttaccgaccagccgtagtagccagcgctcccgcatgactggcctgcatatgacgcttggctaacgccaggcttggaaatcgcatctgcgattcccacatatacagcccagccactcctacgaaaaaggtttttcatttcctgccaggtctgctggcgaacaatgagatggcacaacggtcttacccggcgctgtcaaacccgtactcggaaaaagtccaaaacgactgactacttaaatgggacagcagcgcagcgcattccatcctggccaggagcatctcactccaacaaaggccgtatacatttgcgcagaccaacccgtcacttcacttttcgcttgcggcaaggcggcggaccataca

SEQ ID NO: 981 - DNA, 1093 bp, unidentified
  source 1..1093: mol_type = unassigned DNA; note = element_113f5a2
  misc_feature 1: note = core
  misc_feature 2..67: note = LE
  misc_feature 68..910: note = CDS
  misc_feature 911..1093: note = RE
ctatgtatggactcctccaacctaatttcttaggttggaagtcgactaaaaccaacggagtccatacatgtcatattcaactacagttggggtcgtatccggtcgaggcaaagagctttccaatcgatctctcacgcgcaagaagttcgcagagtttctgggtaaacaaaaaccatcactggttgcttttgagtcgtgcgcgacagcgcattactgggcacgcgccgcgaagcggcacgggcatgaagcgcgcatcaccccagccaaggctgtggcaccgtttcggcaaggccacaagaccgacagcaacgacgcgttggcggttgccgaagcagctcgtcgaccaaagatcaaggaagcaccgatgaagacggtgccagagatccttgaggacggcgagaacgagttacccgacctgtaccgaccaacactgcaccgcatgtacaaccggttgttggaactgcgtgaagacatcggtgcaatgaccaaggaagttgagcgcctggcgaaggctcacccgatctgtaacaagctcatggcgctcgaaggtgtcggcccgatcagtgcactgctgctgtacgcaacgatggggtctggggcggcgttcagcggcagccgtgagttcgctgcctatcttggtcttgcacccaagcagtacagcagtggtggcaaaaccaacatcgtcggcttgagcaagaagatcggcaacagtcagctgcgctccgtgctgatccttggtgctcgcgcctacgtgtacaaactgaaagagcccaagagttcgaaggacaaatggctacaggcaaatgtcgaacgcaacggcgagagccgagcgacggtcgccttggccaataagaacgtaagaacagcctgggcaatggtgacccagggaaccgaatatcaacgtcgatagcgactggagatggctgcctagaacgtcctgcaaacagagaccacgtatcagatagagatatctgctccggtgaaacctatactgctttgaggccctcgagcccactgacccttagaggaaccggagtgcgcatacataattctgatcggagaaactgtttgctagactggaggagtccatata

SEQ ID NO: 982 - DNA, 1280 bp, unidentified
  source 1..1280: mol_type = unassigned DNA; note = element_113f8e3
  misc_feature 1: note = core
  misc_feature 2..271: note = LE
  misc_feature 272..1276: note = CDS
  misc_feature 1277..1280: note = RE
  misc_feature 59..259: note = bridgeRNA
cctttggactaaatgaatataaaattttatataatagctattattactattaccaagggggtttccaaagggggtgttaataactataaaaatgtgtataattgtgataaggatgaggtgaactaacgatgtttctaagtttttgacttatgttccgtatcagacctcatccccatcacagttgccatgtccaattagaattttagaatcatagttctaccaaaggttttagactaagcaacttttttattcacttttaaaagtaaaaaaaatgaacaacaaaattaccatcggatgcgacatttccaaagaaaaattagattttttttgtcgaaacacagaagaacattttatcttagaaaacaacaaagatgggatgcttcaattgtcgaaatggataaaacaacacaaattcaataaatcagaaattgaaattggatttgaacatactggcatttatacaaccgctataaggcaattttgcaacgaagaaaaattgacacattacattatcccaggcttagaattgaaaaaatcgctaggcatggcaagaggaaagaatgatgtagtagattcaaagcgaatatgcgaatatgtgtttgaaaaaagctataagctaaaaccaacaaatgcaataaacacaagtatttcaaaccttaaacgcttagattctttaagggaaaaattagtgtccgatagagctggtttaattacaagaatgaatgaagaaatagaaatgcttgaattaaatgaaacggattttggtattaaaattcaaagagacacaatagaaatgctaagtgaaaaaattgagttaatagatactgaaatggaaattgaattgaccaaagatataagcataaagaagaattttgacttgttaaacaccattgtaggaataggcaaaataacggcatatcaattaatcataaccaccgaaaattttataaaatttgataatccaagaaagtatgcatcttatgcaggtgtggcgccttttacaaagcaatcgggtaaatcagaaggcagaacaaaagtaagtggccttgcaaataaaaaagtaaaatcattgttggatatgtgtgctagatcagcaatgttaaatgacccagaattgaaattatattacaaaagaaaggtattggaaggcaaaaataatagactggttaggaacgcaattaggtttaagttattaacacgagtattctctgttataaaaaaacagacaccttttgtgaaaaatcatgtcaataatttggttatatcaatgtcttagaata

SEQ ID NO: 983 - DNA, 1555 bp, unidentified
  source 1..1555: mol_type = unassigned DNA; note = element_113ffbd
  misc_feature 1..4: note = core
  misc_feature 5..285: note = LE
  misc_feature 286..1449: note = CDS
  misc_feature 1450..1555: note = RE
  misc_feature 46..262: note = bridgeRNA
tcacgtataattaaaaccatctcgaaaggggtggttttaattatttctcctttcctcgaaaaattatatcgcaggagtagctacctgctttataatcagaacaagcactgcggatttgtatctatagaattacagctcagactgtttgggggtgactcagaccgcagtggtttgtctgaattggtgattagttgggaaacgcttgacgttttatttgcgtgaatacatggacaagccttctgtggaaacagcagtgctaaaatacaaacaagaggaggaaaccatttgtactttgtaggaatcgacatttcgaaattcaagcacgactgcgccatcattgatgaacttggcgatgtcatcacaccctcgtggtcgttccagaatgaccgcgagggattttctttgcttagggaactgcttgatgccctcgagggagaaaagaagatagggcttgaatctaccggccattatgggcaaaacctaaagctgttcctcgaaaacaacggcttctctttcatggagttcaatccgcttctggtcaaccgatttgttcgcagcaaatcgctcagaaaaacaaagacggattccatagacgctctcatgatagcccaatatttgatgacggtagagtacaagccctatccaccgtcattttacacgctcgaaaagctaaagtcactaacaagatttcgagacagtctgattcggcagcggagcaagcaattggtggagttaactaacgtccttgacaaggtcttccctgaattcaagccctttttcaaaggaaaattttcagtaacagcgttgtatattctttctcattacacttcaccggagaaaatctccaacatgaattccaagtcctacgaatcactgcgacgcctttctcggggtaaattctcgatggtggattttgtagaactcaaaactctggccagaaatacagtcggttcaaccagagattatctgcttcaggaaatggagatcatcatcgacatctacaaccaattgcaaagcaaggtggaggaagtcgagcagctgataaacgactgcgtcctcgtgcttgatccacccatgctgaccattcctggaatcggtgtgtcctctgcagccgttatcctttctgaattcggggatctttccaaatttgacagtccgtccaagttgctttcctttgccggactggaacctggatattttcaatccggcatttcggaaagcgtgggcaaaatggtaaagcacgggtcttctcatttgcgctacgccattatgaactgtgctcagacggtaattaataacgagccaacatttgctgcctactacgccaagaaacgcgccgagggtaaagaacaccgcatcgctctgacccatgttgccaagaaacttttgcgggttatttatattctccagacgaaagaactgccctataacccggatctcattcgctgatccataaccagtttgtttttgaagtcctcggaagagggcttggtttcgtgcaccctttttgaccagataaaaattcttcaatttcctcttgacttcttatagttgg

SEQ ID NO: 984 - DNA, 1365 bp, unidentified
  source 1..1365: mol_type = unassigned DNA; note = element_114901e
  misc_feature 1..2: note = core
  misc_feature 3..85: note = LE
  misc_feature 86..1117: note = CDS
  misc_feature 1118..1365: note = RE
  misc_feature 1113..1347: note = bridgeRNA
tgatggggtggacggcccccgctgccggcatcgatgtgccataacgtggtcgtctgtgaacgccacaataggggagccgtccaccatgcagattaccaccatcggtttggatctcgctaaacactggttccaggtccacggtgtcgacgccgatggacacgttgtcgttcgccggcggctgcggcggagcggcgtgatcgcctacttccggtcgctcgagccgtgtctggtcggcatggaagcctgcgcgacagcgcactattgggcgcgtgagctaatcgcgctcggacatacggtgaagctgatgccgccggcctacgtgaaggcctacgtcaagcgcaacaagaacgacgccgccgatgcggcagcgatctgcgaagcggtaacccgcccttcgatgcggttcgtgccggtaaaggacgccgagcagcagtcggtgttgatgctgcatcgagcgcgcagtcttctggcccggcagcgcacgatgttggtcaatcccttgcgcgctcacatggccgaattcggcatcgttgcaccgcagggtttgcggcatgtcgggatcctgaccaggacaattgctcatcaacaagagcggcttccggagctcgcgcgctcgatcctgcagacgactgtcgaccagctgaacggcacaagggtcaggatccgagagatcgaggggcgcctagtcaaatggcaccagcagagccgggtcagccgtttgctggcgaccgtgccgggggttggcatcatgggcgcgagcgcaattgccgcgacggttgacgatcctttcctgttccgatcaggccgagagtttgcggcctggctggggatgacgccgcgccagaactccagcggcggtaaggaacgcttaggccggaccagcaagcgcggcgacaaatacatccgcagcctgcttaccgccggcgcggttgcagtactgcgccatgttcataatcgaccaacccgagatggcgagtgggttcgagcgctgttggcgcgcaaaccgaccaaacttgctgtagtcgcactggccaacaagaccgcccgcatcgtctgggcggtgatgatgcgcggggatggttaccgggtgaaggaagttttcgagcggccggcatagccgccgaccgctcattcagcatgcgagggtgaagaggacgtgatggcaagcggtcgagccgcggatcgggaagacccgaaaaaatcaaagcgccgggcagcgcgcagtcttgatagggacccgatcagcgaactcatcagggccaagcggtcagatgcaccgcaccaaagggccggacatatgactgcacctgaccgcttcgccgaagccgaactcaacatccttcgcaggcgagggccgtccacata

SEQ ID NO: 985 - DNA, 1384 bp, unidentified
  source 1..1384: mol_type = unassigned DNA; note = element_114ad43
  misc_feature 1..2: note = core
  misc_feature 3..87: note = LE
  misc_feature 88..1119: note = CDS
  misc_feature 1120..1384: note = RE
  misc_feature 1131..1371: note = bridgeRNA
tgatggtgtggacggcccccacaaatcggcatcgatgtgccatagtgcattgatcagttgggcaaacactacaggagccatccacagatgaaagttagcacgctcggcctggatttggccaaaaatgtcttccaggttcatggtgtcgacgacgaagggaacgtgacagttcgtcgccaattgcgtcgtcagcaaatgttttcattcttctcggaactccctccgtgtctgatcggccttgaagcctgtggcacttctcattactgggctcgggagcttgcagcgcgcgggcacgatgtccggatcatcccgccatcttatgtgaagccgtatgttcgtcgtggtaaaaacgatgcagctgatgcggaagcgatctgtgaggctgtcggcagaccgaacatgcgcttcgttccggtcaaatcggaagaccagcaggccgccctgatgcagcacaaggcccgggagcttctgatccgccagcaaaacatgctggtcaatgcactgcgttcccacatggccgaaatggggatggttgccgcccagggacgggaacgactggaccggattgttgatgtcatcatggaagaagaagatgaaagcctgccggcattggcgcgggcatctcttcggccactggtggccatgctccaggcaaatgaagctgctatcgacgatatagatcgggcaatcaaggcggcccacaaggaaaatgaggttagccagcgattggcgtccatacccggtgtcggtgttctgacagcgagtgcgatcgccgccacggtaccggatccttcgttcttcaaatccggccgcgagtttgctgcctggctcggtctggtaccgcgacaaaattccagcggcggcaaggaacgtctggggcggatatcaaaacagggcaaccggtatctgcgaaagctgcttgtcataggggctaccagcatgctgagcgtcgttcgccgaaaatcgtcacggcaggcagattgggcgaaacggctgttggagcgtaagccgacaaggcttgtgacgatcgccatggccaacaaagccgcgcgcatcgcctgggcattgatgaccaaaaaggaaacatatcggacaacagcaattgcaactgcggcatagaacacaccgtttttagatcccacggaattacaacaggttagcaaggtgaacagatactgatgtgaaccggtcactaccgggatttcggacactccagcttattccaggcggccaagtgaccgcgtttatttgatcggaaccgagattcgcggacttcatcagggccaggcgaatcgccgccatcaacaggccggatacatggaagcacctgaccaggtcgcacaacaggtctatttccccttgctttcagagggccgtccataca

SEQ ID NO: 986 - DNA, 1391 bp, unidentified
  source 1..1391: mol_type = unassigned DNA; note = element_114f071
  misc_feature 1..2: note = core
  misc_feature 3..126: note = LE
  misc_feature 127..1146: note = CDS
  misc_feature 1147..1391: note = RE
  misc_feature 1156..1358: note = bridgeRNA
acatggggtaatcgcgggagcgagtcgcaaaaggcatttcagggatgctgggtggctgttccccgataagatgaaagcacgggctcacgacggacggcgggccctaacatctgatggagaacagccatggacgagtatatcggtcttgacgtctcgctgaaagagacggcggtatctattcggcgcgacggaaagcgtgtctggcgcggcaagtgtgcttcggatccgcaggcactcgcgacattgatccgcaagcatgcgccgtcggcaaagcgcgtagtgttcgagaccgggccgttgtcggtgtggttcttccacgccctgacagcggaaggcgtgcccgcgatctgcatcgatgcccgccatgccaaggcagcactcgacatggcaccgaacaagactgacgcaaacgacgccgatggtctggcgcagctggccgaggtcggcttctaccgtgaggttcgcgtgaagggctatgacagcatgctgtcgcgaaccctgatttcgtcacgcacacggctggtcaggatcggaacggaactttcgaaccagatccgtggcatgatgaagacgttcggcctgctcgtaccatcgaccaagggcggtcgcttcgatgaccaggtccgccgcctgcttgctgataacgaggcactggcgcgcatcattctgccggtactcgaagcctggcgcagcgtccgcctgcgtgcagccgaactgggccgacagatcctcgccaacgcccggcaaagtacggattgccagctcctgatgtcgataccgggagtaggcgcgatcacggcgagctcgtacgttgcggcgattgaggatccggcgaacttcaaaaagtcgcgatcggtcggcgcttggttcgggctcacgacgcggcgctaccagtccggcgaggtcgactatgacggccatatctccaggcgcggcgacgcccatatgcgcgggctcctctacgaggcggccacggtcctcctgacgcggaccagaggggacagcgatctgcggacctgggggctcaaactcagggaaaagctcggcttcaagcgagccgccattacggtcgcccgcaagcttgccgtcatcatgcatgcgatgctgaaatcccgcgagatgttcgccaggaccgccgctgtctgaaccattccaccggttgcgcctgcatgaaggcacaatgagacgtccctgccaggacgtggagcgaaccattccgtccagactgttgcaccgtcaggctctgcccgtcgcgtgcgtttcgcacatcggaaggttcaccctgcgaagcccccatcatgcggcgacccatatcgaccgcgaagacgaccgtgctcctgatatacgaactcaccgccaaaatgacttgcactatcggccgctattagacg

SEQ ID NO: 987 - DNA, 1488 bp, unidentified
  source 1..1488: mol_type = unassigned DNA; note = element_11598ae
  misc_feature 1..2: note = core
  misc_feature 3..236: note = LE
  misc_feature 237..1463: note = CDS
  misc_feature 1464..1488: note = RE
  misc_feature 1..213: note = bridgeRNA
ccttaccttgctcgtgagccctgagggatgctgagggctcgggaagtccggcggtgtcggcatggctcattgccccctgtcactccgatggcctggggggtgttgccaccggcacggtcgggtgcgtgaacctctaatggggacatgcgatcgatcgctggttcgtaaggtggatgagggcgagcgcacctgggacggccttcccgccggtgatggttcgagcgagaggagacctggtggcgggccctgatgaggtgaccgtgtgggtcgggctggacgtcggcaaggaggagcacttcgctgacgttctcgacgatgaggttgagccgttgttcgcccggtcgatcggcaacgacgaggccgacctcgaggcgctgctggaccgggctgacgagcacggtgtaccggcgctggtgatcgaccagcctggttcgatcgcccagctcgccatcgccgttgcgaaccgcaggggtgtgccggtcgcctacgtgccagggctggtgatgcgccgagccgcggacctgtatccgggtgaggccaagaccgaccgtcgggacgccttcgtgctggccgacacggcccgcctgcgccgccgccaagtccactggctcgacaccggcagcgacgagctgctcgaccagctccgagtcctgaacggattcgacatcgacctcgccgcagacctcacccggctcacgaaccggctccgcgacgccctgaccagcatctctccggcgttggagagagccgtcggatcccggctcggccacgccggtgtgcgggagctcctggctaggttcccgaccccgaccatgctgcgctcggccgggcgggcacggatcgccaaggccatcagggccaggtcgccgcgcctggccgccaagctcaccgacgcggtcgttggcgcgttggaggcacagagcgtgaccctcccggctgaggcgaccgtcgggcgggtcatcgccgagctcgccggcgagctcgatcgcctccaccggcgccgcgacgcgctcgccggtgagatcgaggaggtcttccgaacccaccctttcggccagctgctggtcaccctctccgggatcggtcctcggaccggcgcccggatcctggctgagatcggcgacggatcgcgcttcgccaacggctccaagctggccagctacgccggcctcgcgccggtcacacgccagtccggcacctcgctgcggggtgagtcgaagagccgacgaggaaaccatcggctgaagaacgccatgttcctggccgcgttcgcgtcgctgcgcgaccccgagtcgaaggccttctacgaccgcaagcgagccgagggcaagaagcacaacgccgcgatgatctgcctcgcccggcgccgctgcgacgtcatcctcgccatgctccgcgaccgtcagccctacctcacccccggcgaacgagacacccggcgcgccccagccgaggccgcctgatccccttgacaagaacatggggaca

SEQ ID NO: 988 - DNA, 1161 bp, unidentified
  source 1..1161: mol_type = unassigned DNA; note = element_115ca27
  misc_feature 1..2: note = core
  misc_feature 3..210: note = LE
  misc_feature 211..1149: note = CDS
  misc_feature 1150..1161: note = RE
  misc_feature 14..213: note = bridgeRNA
cttgtcttatgagaattcccggctcctgaggcaaaagggagccacaacccggcaccgcagctgcggtgccgggttgtggcggaggcggcgccgtgcggagcttggtcttgcaggaccgcggtcgagtttggcgagcctccgtcttttcttacgacctgaacggatacgtgggctccgggcccgaacgacaagcaaaggtagaaagaagagatggccaaggataccatcgggatcgacgtgtcgaaagaccgcctggatgcgttttggcattcccaagacgcagcactcagcctgcccaacacggttgagggtttcgcccagctatgcacatggctgggtaagaataagggggtgttggtcgttttcgaggcgaccggcgcatatcatcgtgggcttgaacgatacctcagcttggcggggcagcctttcatcaaggtcaatccgaagcaagcgcggcgctttgctcaggctatcggccgtctggccaagaccgacagcgttgatgccaggatgttggcacgaatgggcgtggtccttgatctggccccacaaggcattgaaggcgaagatgttcatgatctcagagagttgctgacagctaggcgggccatggtcaaagatcagatcaccgcaaagacgcgtctcgccacagcgagcaacccgcttgtgaaggaccaactttgccgccggatcgatgacatcgacacggacatcaaagccctggatcaagtgattgcgcagatcgctcagcagcgtggcacccttgatgagcgcatcagacgcctcatgaccattcccgggatcggcagattgaccgcgaccacgttggtgatcgacatgccagagcttggacatctcgacagcaaaaagatcgccgctctggctgggcttgcgcctatgacgcaacagtcaggcaagtggcaaggcaaagagcggattattggtggtagggcattacttcgacgggcaatttacatgcctgcgttggttgccattcgcttcaatcatgatttccgtgacaaatatcagcagttcgtaaatgcagggaaagcaaagaaggtggctatcaccgccgtcatgcggcgcatcatcgttctggcaaacacgttgttgcgtgaaggacgcgattggcaacctgttcgcccttgaccaagacggata

SEQ ID NO: 989 - DNA, 1434 bp, unidentified
  source 1..1434: mol_type = unassigned DNA; note = element_116103d
  misc_feature 1..2: note = core
  misc_feature 3..228: note = LE
  misc_feature 229..1419: note = CDS
  misc_feature 1420..1434: note = RE
  misc_feature 10..222: note = bridgeRNA
tccctaccttgttgaccgggatgagcgagccattcgtagggttggctcacccaggggtgccgggtgtggctttcaggcgtctgccgttggtggcttacttcgattcgccgcccggcaccccacgacgactcggctgctcattaggaattgcggcactgatcgctcagtagggactcgacagcgaagtcgtccgtggcacctgtacacacacgacccgcggagaagtacgtgacagcaatctgggccggtatcgacgccgggaagacccatcaccactgtgtggtgatcgacgacaccggcaagcgccttctgtcccggcgcgtcgccaacaacgagagtgaactgctcaagctccttgcggacgttctcgcactcggcgacgaagcggtctggggcatcgacctggctgacggcggggccgccctggccatcacggtgctgttcaaccacggccagcagctgctctacatccccgggcgggcggtcaaccgggcctccgagggctaccgtggagacggcaaaaccgacgccaaggatgcggcggtgatcgccgaccagacccgcattcggcgtgatctcgccgcgttgcggcctggcgacaagctggtgtccgagttgagggtcctcgtccgtcaccgccgcgacctcagcgacgaccgcacccggacaatcaaccggctccgcggccacctcaccgagatcttccccggcctggagcgtgaactcgatctgggcaatgtcggacctctcatgcttctgaccggctaccagacctcgaccgccatacgccgggccggcagccggcgactgaccacgtggctgcgcaaccgcaaggtccgcagcgcggatgaactcgccgccaaggccgtccaggccgccgagggccagcacaccagcgtgcccggcgaggacatgaccgcccacgtggtgcattccctggcgaaggaggtgatcgacttcaacgagaagatcgccgagatcgacaagctcatcgagggccggtttcgcgcgcaccactacgccgaggtgatcacgagcatgcccggcatcggcggcctgctgggcgccgagtccctggcggccacaggcggcgacatggaggcgttcgccagcccggaccggctcgccgcctttgccggcgtttccccgacgccacgcgactccgggaaggtcagcggcaacctgcaccgccccacccgctacaacagacgcctccaacgcgtcttctacacgtccgcgctgatcagcatccgctgctgcgaggaatcccgccgcttctacgaccgcaagcgcgccgagggcaagcggcacagccaagccgtcatggccctcgcacgccgacgagtcaatgtcctctgggctctattgcgtgacggacggtgctaccaacccataccgcccgtcacgtcagctgcttgacatcccgattaggaa

SEQ ID NO: 990 - DNA, 1216 bp, unidentified
  source 1..1216: mol_type = unassigned DNA; note = element_117bf5b
  misc_feature 1: note = core
  misc_feature 2..213: note = LE
  misc_feature 214..1185: note = CDS
  misc_feature 1186..1216: note = RE
  misc_feature 34..203: note = bridgeRNA
tcttaagtttgttttttgttaaattagataattaatcagaaagcacaaaagagaggattaaggttataatatacgtagagactatagatctcgtcaacattgaaaatcccctctcttttctacacagatttcgtacagttctatgaggctttaagacctcgattttaagtcgttgaaactcgcgtagcttgtcctttcaaaaaacattttcttatgaataaagatattaaatattttggaatagatattagtcatttagtatttgatgtaacagattctgatgggagctattaccaatttaaaaacaatgtaacaggctttaaaaagtttctaaaacacttagatataaatagtcattgtgttatggaggccacaggttattatcattaccagttggcttattatttacaagagaatagtattaaagtgtcggtagaaaaccctttagcagtaaaacgatttatccagatgaagttatcaaagatcaagacagataaaagtgattcaaagcttatttgtgcatatgcaaagcaagtaggtttaaaactttggcaaggtaattcaaagcatcaattagaatgccttcaaatgattagactcctttctgtatatacaaaacagagtaccatgttgaaaaataaactgcatggagaatctgtattagggaatccaagtaaagccgtggtaagttcattaaatcgcagtttgaaacaagtcaaaaaggaattagatcgcttagaagagaaactattagtattagtaaagcaagttcatcaagatgtgttaacacggataaaaagcataccaggaatagggagcaaaacagctgttatgttagtggtcttaacagacggatttgatcgttttaaaagcggtagcgagttgtgtagttacgcaggattaacaccagtaattagacaaagtggaagcagtgtgaacggacgacctcgcattagtaaaataggaaatcaaaagcttcgtaatttattatttatgtgcagttttaatgcttgtaaatacaacaaggcttgtagagaaatttatgagcgaatagtcgccaaggggaaaagcaaaaaattagcattaatagcagtttgtaataagctattaaaacaagcctttgcaatagcaaaatcaggattaaattatgatgatacttatagaagtactttagtgaaaaattaatgcatttttacttgttttttaccacagtact

SEQ ID NO: 991 - DNA, 2075 bp, unidentified
  source 1..2075: mol_type = unassigned DNA; note = element_1185ef0
  misc_feature 1..2: note = core
  misc_feature 3..265: note = LE
  misc_feature 266..1480: note = CDS
  misc_feature 1481..2075: note = RE
  misc_feature 20..253: note = bridgeRNA
ctcgtataatagatttacggtgtttttagtaaggacaccgtatgaaaaacttgttatcctgtataggatatgggataataagcgtaacagacagagggtgccgtatcgctccttgaggtacagcctcgtacgaaagaatggcgcctctgtccttacggtaagatgcgaatgagctggatagcgacctgtatggatgcgctgcatatctaacgaggttgtattgccgtaagaatcagagggaaaccctgtctgtgcatgactgtacatgggagggctctttttgttttactgcggaatcgacatcgccaagcataaccatgaagcatctatcatcgatgccgaaggaaaagcattgctcgacagcatatctttcgccaacacaaaggctggctgcgagaagctgcttgccttgctggaacggctgaatatcaccaaggcggacgtcatcatcggtatggaagcgacgggccactattggctgtccacatatgaatatctgacggaacgcaagtttgaagtccgggtgatcaaccccattcaatcggaagcgttccgcaaaatgtacatacgccagaccaagaatgacagcaaggacagcttcatcatcgcccaggtcatgcgctttggacagtattccgccaccactctgtcggaagaaaacattgttgctatgcggcagttgtcccgttaccggctggcgctggtggattcctgtggcgactgtaagcgacgagtgatcgcgctgctggatcaggtgtttccagaatatgacaagctgttttccgatacattcggctctacctccaaggaattgttacttaagtaccccacaccggaggatatgctgagcatctccacccgcaaactgaccacgttgctgaccaaggctagccatggccggtttggtgaaagcaaggccaaagagattcgcactgtggccgccgattcattcggcgtgggatttgccaagaacgccttttcattccagattcgccaactcattgaacagctcatgtttctggaaaatcagattgaggaactggaagaacaaatatcctatctgctccaccagaccaacgaggtcatcacgaccatccctggtatcggcgatatcttgggagcgattatcctcagcgaaattggagacatccagcgctttgacgcgccgggaaaactggttgcttttgccggcttagatgtgaaagtatcgcagtccggcgagttcaccggaaccaaacagaagatttccaaacgcggctcgccctatcttcggcgggctatttggcttgctgccagccgggcggcattttgcgatcctattctgtccgactactaccaatccttgaaagccagaggcaaacatcatttgaccgccgttggtgcggttgctcgtaaactctgcaatatcatcttcactattcttagagaaaacaggccctatgaacagacgccgccaaagaagggaagtaaaggcatatgaaaacattgattctcaatggctctcccaaaaggaatggtaacacagtttctcttattgaggcgttcacaaaacacctaaacggtgatgtccgggtcgtgtcttctcactttgacaatattagtccctgtcttgattgccgttattgttgggacaatcccggctgcatcataaatgatgatatgcagaacgtatatccctatcttgaaacctgtgacaatcttgttattgcttcccctatttggttttccgaactgagcggtccgctgcttacccttgccagtcgtatccaaacctattttgctgcaagactgtttagaaatgagccaaatcggattaaacacaaaaacggaatcttaatccttgtcggtgctgaaaatggtacggagaaaaaagccatcacaacggcatatacactcttcaagcatatgaatgctctgccttgtatcgcttccgtattttctctaaacacaaaccatatccctgctgctgatgatctttcggctcttgatgctgctcggaatgccgccttacttctcaaccaacttcttggtgattcttaatctttctctttttcccttgactttttatagctggt

SEQ ID NO: 992 - DNA, 1356 bp, unidentified
  source 1..1356: mol_type = unassigned DNA; note = element_1186ff5
  misc_feature 1..2: note = core
  misc_feature 3..85: note = LE
  misc_feature 86..1105: note = CDS
  misc_feature 1106..1356: note = RE
  misc_feature 1123..1342: note = bridgeRNA
gatggggtggatggctcctgctccaccggcgtcgcaatgcgccatagtgcagttgttatcgactgctaggaaaggagccacccaaatgcaggttacaacagtcggcctagatctggccaagaacatctttcaggtgcacgggatcacagcggatggaacggttgcgttcaacaagtcgcttaggcgtgcacagcttttgcagtttttcgagaaccttgagccctgtctcatcggcatggaggcctgtggatcaggtcaccactgggcgcggcagttccagaagctgggccatgaagtccgattgatgcctgcaatgtacgttaaggcctgcgtcaagcgtggcaagtcggacgccatcgatgcagaggcgatctgtgaggcagtcacccgtcccacgatgcgctttgtcgcaatcaagaccgaggagcagcagggtgtcctgttcctccaccgtgcccgtgatctggtcgtgcggcaacgaacccaactcagcaacatgttgcgcggcctgttgggcgagtttggcattgtaattgcccaagggattggtggtgccgtgaagttcgccaaggcggttctggacggagaccgcccaggtattcccgaaatcgcaatcgatgttttgacgaacctgtgtaaccagatggttgctctgcatctgcgcattctctggtacgacaaacgcatcctgcttgaaggtcgaagagacccaagggttatgttgctgcgaaccatacctagggtcggcccagtgactgcctcggccattgtcgcgacagcaggcgatgggcatcaattccgcaatggacgagaatttgccgcctggctggggctgacacccatcaaccgatcaagcggcggtaaagaacgtctcgggcgcatctccaaaatgggagaccgatacctcaggcgtcttctggtcacaggcatgaccgcccgattgaaccagatgaaggtcaatcctgaccgcgtagatccgtgggcgatgtcactacgagagcgcaaatctccgcgcgttgccaccgtcgcaatggccaacaagacagcccgcatcatatgggcggttttgactcgcaatgaacggtatcgacctcacacagcataaccgcaaacaaaggaacatcagagacgcaagaccattgagatgatggagcaatgtcagcccgccaaccaagacaccccgtcgaatgtcagggacacatcgttgtccgcgaagcagtttgggacttggtcagcggaaaccatcagggccagcagccgcgtgtgctgcgcaaacaggccggacacacgactgcatctgacagacgcccgtatcagctcaaaaaatgtcttgctatgcaggagccatccacacaa

SEQ ID NO: 993 - DNA, 1342 bp, unidentified
  source 1..1342: mol_type = unassigned DNA; note = element_1188495
  misc_feature 1..2: note = core
  misc_feature 3..87: note = LE
  misc_feature 88..1125: note = CDS
  misc_feature 1126..1342: note = RE
  misc_feature 1100..1327: note = bridgeRNA
agataattggactcccctcaccctcaccgagatgagcgtgaggtaagatgattgctctcaaacaaatcaaatacggagtccaatatcatgaacaataccattgtcggcgttgatctttcaaagaattgcattcaagtctgcgttgttaaacaaaacaaggtgatttcaaaccgtgaaatgtcatctgctcagtttacgtcatggttagccaaaacgaagcctgccacggttgtatttgaagcgtgctctacatcaaattactggaaacaaacagccaccaggctcgggcatgatgcacgactcgtttcggcaaaactcgttgctaaaatacggcaaaatcagaagacagacagaaatgatgcgctggccgttgtacaggccagccagctggttaacacccgcttcatcaatggcaagtcattttcacaacaggaactgcaatcgcttatacgtatacgcgagttagcggttaaacaaaagggggcgctgaaaaaccagattcaggcgctattgcttgaattcaatattcggacacacgctcagcgtggtggtttaaatacggttatccaacaggtgttggaagatgcagagaatgggttttgtttgcagtttcgccagggcttgcagagggcatggggctcttatttgtccactgttgaggcgattgcagactatgacaagttactgggttctactatggaagatcatgctgactgcgaaaaactcactgcactggaaggcgtttctgttattaatgccgttaacctttgtatccagctaggctgtggtgaggcgggggtcttccgaacgagtcaggatgcctctgcctgtattggattaacacccatccagcattctacaggggggaaaacccgactgggatctattggtaaaaaggtgaagaatagctcattaaggagttatttagtgagtggcgcaatgtctgtcgtcaatcaagtttctcgacgagagcccaaaacagccaaagaacaatggctgaagcaactcattgaacgccggggtaagcgctgcgcggcggtggctttagccaataaaacagtaagaacggcttttgccatgctcacgcatggcaccgagtatcaacctcagccgttaaagggctgagaggccaatcaccaacaaaatgctttaaatacagatgaaaaatcaactgttagagtcagtgctgcgctcagagcataaagctcgcgtctgagatttggccaacagttcgcgtaaatatcagagagcctgggttagcaactcaaagagagctcgtacataagcacgcatttattctatatttttatcatttcgttgttgacagaggggagtccacata

SEQ ID NO: 994 - DNA, 1654 bp, unidentified
  source 1..1654: mol_type = unassigned DNA; note = element_118978e
  misc_feature 1: note = core
  misc_feature 2..294: note = LE
  misc_feature 295..1479: note = CDS
  misc_feature 1480..1654: note = RE
  misc_feature 59..270: note = bridgeRNA
cctggtatattgtaattgactcttctaagtagtcataaacaatatacattcctttctatcaatcttatttatccgtgattgatgacggtcttgttatcttgtaatattgaaatatgtgaatgtggatttgtgtaattcctcgtagcttgactacttcgaggaggtccttaccacaccttattcctgattaatgattagttagatgagtcttgaattcctattttgaaccaggttttatggtctaagtgttgtggataccatttcacataatttattttgaaaggatttttatttatgaaattaattggcatcgatattggaaaaaacaaacatttcttttgtatcatggataaagattctggtgagattgtttctcagcctgcttccttttccaatgataaagaaggttttgatttcctattacaaaaaattaaatcttatccaaataattctgtactcatcggtatggaaaatacgggacattatcattttgctttgttgaaataccttctagacttacaatatactgttgctttaattaatcctaaaacaactgatttcaatcgtaagatgcaaggtggtattactaaaaatgataagctcgatacaatcaatatctgtgatgttcttgatactcctgagcgtaaaaaacagtatcgtataactaaagtcaacaaattcgatctttatgaacaaaaacagctgactagacagcatcacaatcttaaagaagaattaaatgtttataaaaacagattacaaaaatctatcgatattgtttttcctgaatttaacagcttatttaagtccaaatatggaactgtctacatgaatattcttaaaacatttggaagtgctgaaaatatcgctaatactgatattagaaccatccgtaaatgttttgaaatcggtggcagaggcaaccgtatttctttaactcctgaaaggcttaaagaacgtgctagatcttctattggaatttcttcaatagctgaagttattcaaataaaacatttaaccgctcaaatagaactgattgaagaacagctaactgaaatagataaaaaaatagaagagttctccatccaaaataactctcctatcctatccataccaggaatatctcacttctctggtacttctattctagcggaattaggagatataagcaactattctaagccttctcaaatcattaaatttgtaggagttgctcctttacactatgaatcaagtcagttcaatgcacaacatacagctattaccaagaaaggatccaaatatttaagaaagaccctatatcagataatacttcctgtaataagacacaatcctgtgttcaataagtattatcagttaaagatttctcaaggcaaaggtcatcgttgtgctcaaggacattgtgtaagaaagctgcttagaatcatctatcatcttttaaaaacaaatcaacagtttgatcctcaattattgaggtaaccaacataatgtaacctcttacatagacttgctttattgcaggtccttttcgtcgtactataaaacacaaatcactattcacttttcaatgttctcttacatttctaaccaaaaattcaaaattttaaatttttcaaactttttcataaaaattacttgaattttatatagttag

SEQ ID NO: 995 - DNA, 1354 bp, unidentified
  source 1..1354: mol_type = unassigned DNA; note = element_118d4d3
  misc_feature 1: note = core
  misc_feature 2..72: note = LE
  misc_feature 73..1104: note = CDS
  misc_feature 1105..1354: note = RE
  misc_feature 1106..1344: note = bridgeRNA
tatgggatggcccgccccttttccccggcatcggatatgatgctggtgtcagaagaggaaaggaacggaccgatgtctattgtgatccttggcgttgatctcggcaagaactcgtgcagcattgttggtgtcgacgcagccggcgcggtagtcgtacgccgatcgatgcgccggcagacgttgatcgactacgtgctgaagcttccagcctgcgtggtcgccatggaagcgtgttgcggtgctcatcatctcgggcgcctgtttgccgcgcgaggtcacgagatccgcttgatgtcaccggagtatgtgcgcccgtacgtaaaggcgcagaagaacgacgaccgcgatgccgaggggatcgccgaggctgcatcgcgcccgacaatgcggttcgttgagctcaagaccgaggagcagctggacatccagactttgcatcgggtgcgctcccgcctcgtggcggagcgtacgaacctgatcaatcagctgcgggcgatcctgcttgaacgcggcgtgatcttcccggcgggacgccgcaagctcgagttatgcctcgatggcatgctggccgatgatgacagcgcattgtcgcgccgagtgcgcgagctggtgagcgacctacgcgcggaatggcgcgagctcgacacgaagatcgaggcactcaacggggagttcgtcgaactggcgcgcaccgatcctgccgcgcgaaggctgacgtcgatcccaggcgtcggagtcttgaacgcgacagccctgatcgccgcggtgggcaacgcgagcgccttcgccaaagctcgggatctaggcgcctggctcggcttagttccccgacagcatacgaccggcggcaagccccgactgatgggcatctccaagcgtggcaacacctacttgcgcaccctgctcatccacggcgcccgggcagcactgccatcgctctccgagagcgacacatctttggggcgatggctgaaggccatgatcgagcgaggtgttcaccgcaacgctgtggtggtcgctttggccaacaagctcgcgcggattgcttgggcaaccctgcgcagggaaacaacttttgagcgcggctatgccgccgcggtgtaatcggatcggccgcgcgccataacgcgcgtagcccacggggtttgcaggaaggatcgtgaagatggcctgacagtcgatcggcgtttggaaagtccgatgaacgaattggcactcgatgccgacgccattttggggctctagacgcgcggatgtccatcttggccatgggctcgcccatgagaccgcatacgttgacgcagactgatcagaacaccgtaaaatcctacttgcagacggggcgggccatacg

SEQ ID NO: 996 - DNA, 1351 bp, unidentified
  source 1..1351: mol_type = unassigned DNA; note = element_118fc42
  misc_feature 1..3: note = core
  misc_feature 4..87: note = LE
  misc_feature 88..1107: note = CDS
  misc_feature 1108..1351: note = RE
  misc_feature 1122..1338: note = bridgeRNA
ggatgggatggatggctcctgcgcccatcggcgtcgtaatgcgccatactgcagttgtcagaaactgctcagcagaggagccacccaatgcaagttacaacagtaggtctagatttggccaagaacatttttcaagttcacggcatcactaatgacggcgaggttgtcttcaatcgcgccctacggcgtgcgcaattgctaaagttctttgaatgccttgatccttgccttgttggcatcgaggcatgcggcaccagtcatcattgggcccgcgaattggtgcgattgggccacgacgtaaagctgatcccgcccatttatgtgaagccttatgttaaaaggggcaagtctgatgcggctgacgcggaagccatttgtgaggctgtaacacggccgaccatgagatttgttgagatcaagacgccagatcagcaagcaatactggcactgcaccgaacacggaatcttgtcgttcgacaacgcacgcagactatcaacatgttacgtgcgcaactggccgaatttggcatcgtgtttccgcaaggtgttggccacgcgaccaaatttgcaaagcgcctgtttgaaggtgagtgtccagagctgccagatactgcaggcggtgtgattgccaaactttgtgagcagattttgttcctacatggaaagattgccaactacacccatgagatgacgcaagtggcgcgacgcgaagatcgtgtcgccctgttgcaaacgattcctggcattgggccgatcacagcgtccgccatcgtggccacgattggcactggcaaacagttcagcacaggtcgtgattttgctgcttggctaggccttacacctctaaaccgctccagtggtggtaaagagaagttgggacgtatctcgaagatgggggacaggtacattcggcgattactcgtcatcggcatgatgtcccgcatgcgccaaatcaccaagacccccgagcgatatgacccatggttcgcagacatcatggcccgaaagcctggcaaagtagctgccgtcgcaatggcgaataaaaccgctcgcatggtttgggccgtcctaacccgtaacgaaccttatcgcatcagaacaatctgacccaaaccgaaacacagagatagcaagaccaatgaagtgatggaaaaattgtcagccctagaaccaagacacaccgtgctttgtcctgaacacatgttgttcgatatgcagaatgggacttggtttgtggaaaccatcagggccagcggtcaagtgatccgcgcaaacaggccggacacaagaccgcatctgacaaacataaatcgcatcagaaatgtcttgctaagtaggagccatccacaca

SEQ ID NO: 997 - DNA, 1408 bp, unidentified
  source 1..1408: mol_type = unassigned DNA; note = element_1193a2d
  misc_feature 1: note = core
  misc_feature 2..88: note = LE
  misc_feature 89..1123: note = CDS
  misc_feature 1124..1408: note = RE
  misc_feature 1168..1403: note = bridgeRNA
taatgggatggtcgccccctccctaaacggcatcagacgtgccaaagtgagtggtgcgatagaccacgcaaatagagaggagacgacgatgaagattacaacgatcggagtggatctggcaaagacggttttcgcgatccatggggtggatgcccgcggcaaggccgttctgaggaaatccctaaagcgccatcaggtgctcgcattctttggcaatcttccgccgtgcctcgtcggcatggaggcctgtggcagcgcccatcattgggcccggcaactgacggccctcggacacacggtgaagttgatggctccgcaattcgtgaagccttacgtgaagaccaacaaaaatgattccgccgacgccgaggcgatctgtgaggcggtggcgcgtcccactatgcgtttcgtgcctggaaagacggccgagagccaggccatcctcgctgtccaccgcgcccgccaggcgttcgtgaaggcccgcaccgcgcaggccaatcagattcgcggactgctctcggagttcgggcttgtgatcccgcaaggcctcggtcgtatcgccccacagattccgaggatactggaggacgccgacaacggcctgcccgacaccatgcgcccgttgatcgcgcggctggccgcccatctgaaggagctggaccgccaggtagacgagctcgaagccgaaatccaggcgtggcaccgccagagcgatgccagccggcggctccagaaagtccccggcatcggaccgctcacggccagcgcgctcgtggcctcgatcggagacgcaacggcctttgtcaacggccgccagttcgccgcctttctcgggcttgtgccccggcaacactccagtggcggcaagcccacgctgcttggcatcagtaaacgcggggacgtgtatctgcgcacccttctgatccacggggcgcgcgccgtgatccgcgcctcggagcgcaagacggatacggatagctggctcaagcggctcatgggccggcgcaacaagaacgtcgcggccgtcgcgctcgcgaacaagaacgcccgtatcgtgtgggcgctgctcgcccatgggcgagactaccaggaaggcttcacaccggtgtccgtggccgcgtgaggagccgactgccagaaagagaggttttgatagaaagaggctcaccaccgattgcacaggcaatcacgacgtgatggcaataaggtcagaccgtgatcgaggaaacctgccttaaacaccgtgccttcagcacgctcttgtgatcaggcctcgatcagcggattccatcaggttccatcagggacagaggggtatccctcatacaaagtccggatgtatgacagcaatctttaccttactgaccgtcataacgtgaaggcttggcaaatagggggcgaccatgta

SEQ ID NO: 998 - DNA, 1662 bp, unidentified
  source 1..1662: mol_type = unassigned DNA; note = element_11971aa
  misc_feature 1..4: note = core
  misc_feature 5..272: note = LE
  misc_feature 273..1625: note = CDS
  misc_feature 1626..1662: note = RE
  misc_feature 12..260: note = bridgeRNA
ccccgttacctttctcgtggccccgcaacggggcgcctggcccccgggtccggtatggctgtttgccccctgtcgcatgcatgacctggggggtgttgccgccgggcctcggggcaccgcttgaccgctgatgaggggcctgacgaccgcccggtccggtgcaacgtcggaccgcttcagggcggggatgtctgcgtaacgtggttgccggcgtgtggtgccgcagggacggccgggagtttcaggagacgagaggcgaggggcacgtgcacatggtcgacacgaccgcgatagatctcttcctcggcctggacctgggtaaggagttccaccacgcccacggccggaccggggacggcaggaccgtgcacgacaagcggctgcccaacaccgagccgaagctgctggagctgttcagcaagctggtggcgaggttcgggacagtgctggtggtcgtggaccaggtcgccaacatcggcgcgctgccgttgacggtggcccgcgcggcgggctgccgggtggcctacctgcccgggctgtcgatgcggcgggccgccgacctgcatccgagcgaggccaagactgacgcccgcgacgcgttcgtgatcgctgagaccgcccggaccatgccgcacaccctgcgcgcggtcgaccgagacgacgaggtactggccgagctgaccatgctcaccggctacgacaacgacctggccggtgaggtcaaccgcgccaccaaccggctgcgtggcctgctctcccagatccacccctcgctcgagcgcgtgctcggcccgcgtctggcctacccctatgtccaggccctcctccaacggcacggctccccggcgcgactgagaaaactgggccaggcccgctgcaaggccctgctcaaggcacacggttcgcgcaaggcccaccacctcaccaccgagatcttcgacgcgctcgccgagcagactctcgtcgttcccggcaccgaggcgtccgcgctgatcgtgccgggcctggccgcccagctcgccgccgcccatgcccagcggcaggccaccgacaggagatcgcgccctgctggaggccctccctcttttccacctcctgacgtcactgcccggcatgggcgtcaggaccacgccgccgtgatcgtcgccatcggcgacggcagcggtttccgcaccgccgggcacctcgcctcctacgccggacttgccccagcgacgaagtcctcggggacatccatccgggcgagcacgccccccaccgcggcaaccgcttgctcaaacgtgccctgttccaggccgctttcgccgcgatcggctgcaggagcgacctgtcctcgcgggtctactacgaccgccagcgcgcccgcggcagacccacacccaggccatcctccgcctggcgagacaacgcgtgaacgtcatccacgcgatgatccgcaccggcaccttctacgaaccacgcgaccctcgacctcgccgcctgaacaccccacctgccccgtcacgcccgctcaccggcacggccacccgccaagccggccaccggcccgcccacacgacacccgatccagccgggaacgtcacgctccgcgtgacgctcccggaaaccaccacgaacccctatgaaccagccccgccaaggttgacgaaacagataggggca

SEQ ID NO: 999 - DNA, 1191 bp, unidentified
  source 1..1191: mol_type = unassigned DNA; note = element_11981b8
  misc_feature 1..2: note = core
  misc_feature 3..402: note = LE
  misc_feature 403..1176: note = CDS
  misc_feature 1177..1191: note = RE
  misc_feature 28..199: note = bridgeRNA
cttgtatggtgtgggtgcgccttccacagtgggagggtgctggggtagggacgtcctcatccatcagccggtagcgcccggactgccacaacgagagcatcccaccccgcctcacagcgtcgataaggaatctagcggcctaggaccgccgattgatcgcaaggtaacgcccgaggcgaggctaccccagcggactaaacgtatcgcagggagagccatcatgcaaatatctggctgctttattggggtcgatgtcggtaagttcgagctgcaagtggctggctacgagggcgcaatcttgtccgggatcgtgcccaacaaccgatcgggcatcgtcggttggctcaagcgtctgccggccggcagcgtgatcgcgatggaggcgacggggggttccaggagttgttggcccgcctggcgcacgagcgcggcttcgtggtgtacgtcttgaacccgacgcacgtgcaccactacgcgatctcgctgggcaaccgaggcaagaccgaccggctggatgcccaagtcattgcccaggacatcgcccagcgccacgccaagctgcaccgctacgagccgatctcgcccgagctgcaacaggttcgggcgcttcaggcactgaggtcgacggtggtgcgggtgggcacgtccttgagactgtcggcgcagcgtcatggctgcgccagcaagcatcagaagcaggccttggccagcctgggtgcctgggccgagcagctcgaacgtgagctgatcgccaagatcaaggcccagagcgagtgggccaagacctacggtctgttgacgagcatctgcggcatcgggccgatcaacggggccgccctgacgacgttgttcaaccgtattcacttcgccagcagcgatgcggcggtggcgttctgcgggctggatccgcgacccaacgagtctggccgcaaagttggccggcgacgcttgagcaaacagggcgacaaggccgccaggacgttgctgtacaacgcggccagctcggcagcgcgtacggctcacttcaaggattactacgccatgctcagggcccgtgggctggcctcgacggcagcgctggtggtgatcgcgcgcaagttgttgcgtattgcttacggggtctggcgcaccgggcaagccttcgatcccgggaggttgaacctgaaagcagcttgatccggaccatagaat

SEQ ID NO: 1000 - DNA, 1200 bp, unidentified
  source 1..1200: mol_type = unassigned DNA; note = element_11a23e2
  misc_feature 1..2: note = core
  misc_feature 3..186: note = LE
  misc_feature 187..1167: note = CDS
  misc_feature 1168..1200: note = RE
  misc_feature 13..195: note = bridgeRNA
cttgtatctctcccgggtaatgggattagctacctcattacccggagccggctaagcacttgcccaacctgagcactcgatgctgtgtcgtagagtgtgtctgccggctccctttctccacatcctgaatggtatccaagcccctccgctggagtgaggctgtatgcacaaggcaaggagcgagaaatggcgatcattggtatcgacatcagcaagcataaattcgattgtttgtggctgcgtgacgtccgcagcctgaaggtcaaaaccaaggtcttcgccaaccggtccacaggattcgccgaactgatcgactggtgttgcgcccaaacgggtgagacggtggagcagttgcaggtcttcctcgaagcgactggggtctatcacgagccgctggctctgtatctccatgatcgtggcgtccaagtcttcgtccttaatcctgcgcgggtgcgcgaatacgcccgcagcctgggcatacagggcaagaccgacaagcaggacagcctggtgctggcgcgctatggcgcgacccagcccgtacgtccctggacgccggagcgacgtgaggtccgcgagctcaaggcattgattgctcgccatgaggcgctgcaagacgatctgcaacgtgaactcaaccgtcgtgaaaaagcggaggtcagcgggagtccgggcgtcctggcctccatcgacaacctggtacaggctctgcgacaggaggcagagcggattcgccaggatatcgacgaccacatcgatcggcacgacgatctcaaacgcgatcgtgccttactgcaaagcatcgatggaatcggcgaggtgctatcacgccatctattggccctgctgcacagtcgcgactttggcgacgctcgacaatgcactgcctttgtcggcttggtgccccgcccttggcaatcgggcaagacggtggagggacgcacggtattgagcaaggccggttccccacttatcagagccaagctgtacatgggcgccatagtcgccaaagagcgcaaccccgacgtgaaagcgctgtatgaacgactactggcacgcggcaaagcccgaatgagcgccttgggcgctgccatgcgcaaactgctgcagatcgcctatggcgtgctcaagacgcagcgaccttatcaaccacgacaggccctttagaggacctgttgtgattgatgggagagatggtat

SEQ ID NO: 1001 - DNA, 1333 bp, unidentified
  source 1..1333: mol_type = unassigned DNA; note = element_11b8c3a
  misc_feature 1: note = core
  misc_feature 2..379: note = LE
  misc_feature 380..1318: note = CDS
  misc_feature 1319..1333: note = RE
  misc_feature 17..275: note = bridgeRNA
ctgtgagagtgagctccgtgtcgtctggggagctcgtcaggctggcgcccaccgctcgtgcccgtgactcgagacctgaccgacctcgcactcggcgggtgtcttgcaggggatctgtccgagcaggggcgccggcgccggcctggcgctccgcccgctggcttgatcagaagcctgtccgccccgggcgtgactcctcacagtcctgccgcgcgcggctcccagctccagaccgacaccggaaccggtcccccaacgtgctgaagtaagagagatggttgcagactccttcgacgtcgtcatcggcgtcgacacgcaccgcgacgcccacgcgctcgcgctcgttcgctgccgggatggcgtcctgcttcacgagtaggtgctgcccgcgaaccgcctcggctaccgcgaggccctgcgcctcggccgccgcggcggcaggcggcgcctgtgggcgctcgagggcacgggctcctacggagcgggcctcgcccgctctctcagggagcgcggcgagcgggtcgtcgaggtcgagcgccccgcgcgggaaggtagccgccggcgcatgaagtcggactccttggacgccctgcgcgccgccagggcggcgctggccgggcaggccctcgcctgcccgcgggccgcaggcaagcgagaggcgctgcgcgtcctactgcaagcacgagaaggcgcggtggccgtccgcaggtccggcttgaaccagttgcgcgcgctcgtcgtctcggcgcccgaggagctgcgcgagcgcctgcgcgggcacggacgggatgcgctcgttcgcgcctgcgctcggttgcgcccgcagcgccgcttgaagcccgagctgtacgccaccgcgctcgcgcttcgctcggttgcccgccgcgtcgagcaggcgacgcgggaagcacgcgagctcgagagcgagctgcggcggctcatctcggagctctgcccgcagctgctcgcactcgagggcgtcggtccgatctcggccgcacaggtgctcgtctcctggtcgcaccggggtcgtttccgttcggaggccgcctttgcccgcctcgccggggcgctaccgatcccagccagctcgggccagagcgtgcgccaccggctcgatcgcggcggcgatcgccggctgaaccgcgcgctgcatacgatcgtgctcacccgccgccgcggcgaggccgccacgatcgcctacttcgcccgacgggtgggcgaggggaagtcggagcgggacgctgttcggtgcctcaagcgctaccttgcgcgccagctcttccggctactcgaggcagtgccagcgactacttgacgaacatagaagcat

SEQ ID NO: 1002 - DNA, 1396 bp, unidentified
  source 1..1396: mol_type = unassigned DNA; note = element_11cc11f
  misc_feature 1..2: note = core
  misc_feature 3..129: note = LE
  misc_feature 130..1158: note = CDS
  misc_feature 1159..1396: note = RE
  misc_feature 1178..1356: note = bridgeRNA
acatggggtaattgcgggagcgaagccccatgaaaccaatcccaaatgggaggcggctgctcccccgataagatggacgtacgggctcacgattcccacgggcccaggcaactatcggagagagcagccatggatgattttatcggccttgatgtctcgatgaaagagacggcaatctcaattcgacgcgccggcgcccgcgtctggcggggcaaatgtgcttctgatccgaagctcattgccgagcttgttcacaagcgcgcgccggacgtgaaacgcgtcgtgttcgaaaccggccccctgtcggtatggttctatcatgcgcttcgcgctgagggattgccggcaatctgcatcgatgcacgtcatgccaaggctgcgctcgatatggcgcccaataaaaccgatgccaacgacgcggatggtttggcgcatctggcggaggtgggcttttaccgtgaagtacgcgtcaagggattcgacagcatgctgacccgcacgctggtcggggcccgcgcccggctggttcgcatgaccactgagctgtccaaccagatccgcgggctcatgaaaaccttcggcataatcgtgccggcgggcaaggggaacatgttcgagaggcatgtccaacgcctccttgcggaccaagagcaactggctcctgttatcctgccactgctgaaagcatggtgcagccttcgcatgcgcgctgccgatctcgcccgtcaactcattgtggatgcgcgccaaagcgagacctgtaaaattctcatgtcgatccccggcgtcggtgtgactgttgcaacgtcctttgcggcggccatcgaagatccgagcaacttcaagacatctcgctccgtcggtgcctggctcggcctgacaacccgccgctaccaatcgggcgagattgattatgatggtcacatctcgcggcggggcgatcctcgtttgcgcacccttctttacgaagctgcgacggtcatgctgacccgcagttcggctgccagttgcctgcggacatgggggctcaaactcaaggaaagggttggcttcaaacgtgctgctgtagccgttgcgcgcaaattagccgtgacgatgctcgcaatgctcaagaccagtgcatacttcgatcggcaactcggaggagtcgcagcatgagatttttgtgaatagcgttcaacatccgagcgcttcagacgtccctgccgggacgtgggcagagtcattccgcctcgaaagttgcacgctgattgagtggcgtgcgtatgcgacattggaaggctcctcccgcgaagccccatcgtgcggcggctgctgtcgaccgcgtagacaaccatgcaccggcagtgccgtcgaaacgcctaaagacggttgacgaccccatcgcaattagaca

SEQ ID NO: 1003 - DNA, 1178 bp, unidentified
  source 1..1178: mol_type = unassigned DNA; note = element_11d4d6a
  misc_feature 1..2: note = core
  misc_feature 3..224: note = LE
  misc_feature 225..1175: note = CDS
  misc_feature 1176..1178: note = RE
  misc_feature 23..200: note = bridgeRNA
cttgtatgtttaccccggcaagtcaaaaactgggcttgtcggggtggagggacagaagacgcttctggctcaaatgaaagagcacagacggtaggagacctcgtcccacccctcaccttcaagcgccgataaggaatccatcggctcgagaccgacgatatttggcaagccagcgctcggtgaggccccgacaagcccttccaagttagctcggaggtcctgtcatggcaatgccagttcaacgcccccatgtcggtatcgacgtcggcaagtttcgtctcgacatcgccaccgatgacggtgggcaccagtccatcgagaacacgcccacggccattggcgaatggctcgattcgctgggcgagtcggtccgaatcgcccttgaggccaccagccactaccatctcgaactcgctctcgaggcgcatcgacgcgggcatgagatttttctgatcaacggctaccggctcaaccggtatcgcgacagcattggcacacgagccaagacggatgccggtgatgcccgcctgttgctgcgctatctatctcgggagattgatgagctgcgcccgtggagcccgccgggcaaagcctaccggcagctccaaacgctgctccggcgacgagccacgctggtacaggtccgagtcgccctccagcagagccttgcgggcattccaaccctcaaagcaagcctccagcggatcgtcgcccagctcaagcagacggatcagttgatccagaagcacatccgccaatgcctcaaggaggctggctgggaggctgacgccaaacgctgccaggcgatcgaaggcgtgggtcccgttaccgcagcgagtctgacgacgttgttccatcgaggaaactttcgcaacagcgatgccttcatcgcctttcttgggctcgatgtgcgggttcgggattcggggatcaagtccggcaaacgccggttgacccgccaaggcgatcccgaggcacgccgactgctttatcttgccgccatgcaggcaaaacgacagccggcgtgggaggccttttaccaacgacacgtcgcccgaggaatggcacctactcaggcgttggtcgcccttgcgagaaaactggctcgagtcgctttcagtttgatgcagaaacagactgactacgtgccgagaatcccttgtggggagacatagaat

SEQ ID NO: 1004 - DNA, 1409 bp, unidentified
  source 1..1409: mol_type = unassigned DNA; note = element_11df1f9
  misc_feature 1: note = core
  misc_feature 2..90: note = LE
  misc_feature 91..1128: note = CDS
  misc_feature 1129..1409: note = RE
  misc_feature 1178..1404: note = bridgeRNA
taatggtatggacgcccccttcccgaaccggcatcaaggtgccaaagtggaaatgggttcaatccacttaaatggaaaggagcgtccgagatgaagattacgacaatcgggatcgatctggcaaagaacgtgtttcaggtgcatggggtggatgagggtggcaaggcggttttgcgcaagcagctcaagcgcaaggacgtggtgagtttctttgcaaatctcgcgccctgcttgatcggcatggaagcttgcggcagcgcccattactgggcgaggaagctcgccgtgctgggccacacggtacgcctgatggctccgcagtttgtgaagccctacgtcaagacgaacaagagcgatcgcaacgatgccgaggcgatctgtgaggcggttgcacggccgaacatgcgctttgtgccggtgaagacgggcgagcagcaggcggtgctctcggtgcaccgagcgcgccaggggttcgtgaaggcgcgcaccgcgcaggcgaaccagattcgaggcttgctggctgagttcgggatcgtgattcccaagggcatggggcacatcgctaagcgcttgccggagattctggaggacggcgagaacggggtgccgggaatgatgcgcgagttgctcgagcggctgggtgagaatttgaaggatatggacaagcaagtcggtgaactggagcgccagatcaagctttggcatcgtgagaacgagcgaagccgcaagctggaagccattgccggcattgggccgatcaccgcgagcgctctggtggccacggtgggcgatgcgaagagcttcaagaatgctcggcaactaccggcttggctgggcatggtgccgcgccacgagggcaccgggggcaaagcgaagctgggcaggatcagcaaacgaggtgatgtgtatttgcgcacgctgttgattcacggggcgcgcgcggtgatccgtcaattcgagcgcaagcccgatcaggccgatgggtggttgaagaagctgcttgcgcggcgcaacaagaacatcgccgcggtggcgctggcggccaagaacgcgcgcattgcctgggcgctgctggcgcacgagcggccctaccagtccgattacgttgcgagacgcgcgaccgcgtaatcgcggtcggttgaactgaacgaaggaacggtttagcaaaggagggcttccgccgattgctcaggcaatcatgacgtgatggcaagataggtgagaccgtgacggggtaagcctgctcacccccctggcacttcgagtgcgctaaggtgatgaggcccctgtcagccgattccatcagggaccgaggcacaagcctcaagcaaagtccggatctatggctgcaatcttctcctatcagtcgtcatcgattgatcgcttgacaaaccgggggcgtccatcta

SEQ ID NO: 1005 - DNA, 1361 bp, unidentified
  source 1..1361: mol_type = unassigned DNA; note = element_11e375a
  misc_feature 1..2: note = core
  misc_feature 3..77: note = LE
  misc_feature 78..1100: note = CDS
  misc_feature 1101..1361: note = RE
  misc_feature 1079..1348: note = bridgeRNA
cgatggggtggacgccccccgacggcatctttgtgccaaggtagaggtgttgttaaaccgctacgagggaggcgtccgtgggacaggctaccatcatcggcatcgatttggccaagaacgtttttcaaattcatggagcgaccgccgacggcgcggtggcttttcgtaaaaaggtgtctcggtccaagctcttaccttttctatcttcccaagcgctgtgtttggtggcgatggaagcctgtggcagttcccatcattgggggagcgaaattcaggcgctcggccacgatgtgcgcctgattgcgcccgcgtacgtcaaaccatttgtaaaacgtcagaagaatgacatggccgacgcggaggcgatcgccgaagcagcttcaaggccaacgatgcgttttgtcgcggtgaagagcgtcgcgaagcaggcctcggcaatggttttcaaaacgcgcgatcttttggtgcggcagcgaacccagacgatcaacgcgctgcggggccatttgacggaatatggcgtaatcgcaccgcaagggctaccaaaccttgaccgcctcgtgtcggaggtgaggagttcaagcagcggattgcccgctatcgtcaccgagctctctgaactgctgcttgagcatattgccgctctcgacgagcgaatcgcaggtctcgaccgtcagctccgcgagcaggtccgcacagatgaaacagccaaacgactggtaacagtgcccggcatcggcccaatttgcgccgcagcgatcttagccttggcgccggcgccggaaaccttcgccaaagggcgcgacttcgccgcctggcttggcctcactccgaggcagcattctaccggcgggaaggcgaagctcgggtcggtttccagaatgggtcagcgtgatctccggcgcctgttgattattggcgccatgtcggtcgtgcgatgggcggcgcgccggggcgctcccgcaggatcttggcttgcgcggatgatggcgaaaaagccgcgaatgctcgtcgcaacggctttagcaaataaaatggcgcgggtcgcatgggcgttgcttgcgcatggcggaatatacgaggttccagccggcgcctgaaggagaggcggcggccgggctgtcagcggatgtggcgagtcgaaggaggcttatgggcaaacggtcgaaagaacgggatcgggaaaaccagtccgtgccgaagcgccttgagcgcgcgtaagcgtgatggacctgatcttcgcacttccataagggcctgcggcgtgtgaagccgcattttgaggccggacacacgacagcgctcgaccacatgctcatgaccgaaaagatttcgcttgcatccgtgggggcgtccacaca

SEQ ID NO: 1006 - DNA, 1549 bp, unidentified
  source 1..1549: mol_type = unassigned DNA; note = element_11ef5aa
  misc_feature 1: note = core
  misc_feature 2..82: note = LE
  misc_feature 83..1138: note = CDS
  misc_feature 1139..1549: note = RE
  misc_feature 1311..1540: note = bridgeRNA
taatgggatggcccggccgtgctcagcgatttacctgctgagccgtgtcgggaggcgtaaagcaaagctcaaggagcatgcgatgcgcacatctcagaatacagccgaatccatcaacacaatcggaatcgacgtcggcaagaatacgtttcatttggtcgggctggacaagcgcggtgcgattgttctgcagcaaaaggtaacccgtcatcagcttgggcgccggctcagcaatatctcgcgctgcctgatcggaatggaaacctgttccgggacgcactttatcgcacggcagcttgcggcgcttggtcacgatgtgcgtctgatcccagcgcagtacgtgaaaccattcctcaaggggcacaaaaatgactaccgcgatgccgaggcaatcgcggaagcggtgcaacgaccaaccatgcacttcgtgtcgatcaagacgccggagcagatggatttactggccctgcaccgtgtgcgttcgcgccttgtcaggcaacgcacgggggtggccaatcaaatccgcggctttctgcttgagcgcgggatcactgtgcggcaaggcttcatgccattacgcaaagcgctgcccgaaattttgagctcaaaatccgatgcgctgtcgccaagaatgatcaacctcattggcgagctgatccaggactggcgccgattggacgaccgcattgccagcgtatcgaccgaaatcgaagcgatagcaaagcgggacgagagctgccaacggctcatgagcgttccgggcgtcggtccgatcgtctccagcgcagtcgtggcagcgatcggcaacggcactggcttcaagcaggggcgcgattttgccgcctggcttggcctgataccgaagcaggagtcgaccggggaccgcaccatcctgggcaagatatccaagcgcggaaacaaatacgtgaggacactgttcgtgcaggccgcacacgttgtcctcgagcggcggccaaggacagcaaggcagggactgtggccctggatcgagcaggcatcgaagcggcttcaccgcaacatgctggcaatcgcgctcgctaataagcttgcccgcatcgcgtgggcagttctcgcccgcgggcacgcctatcagccgaggatcattgccaatgcctgacaaagccttgctcaggtccaccaaggggatgtccgccacccctctccgctaccgtcgctcgccacatcgggcgagcgagcgacggtggctccgaggggatggcttcacctgatccctccaacatcaaaatcgaacggaagacggagactgagcacatcaatatcgatagcttccccaccgaggtctgcgagatggaatgatgagatggacgaacggtctgcccagcgcaaccacgagactgggtgccaaaatggcccttcgaggtcttgccgctagtcagcctggatgcgcgcggatacccatgatggtccggagcaaaagatgctccacgaagagacctgatacattgatgcagctctcacgttcgtcgctctcggaaatccgtcttgcaccgcgcggccgggccataca

SEQ ID NO: 1007 - DNA, 1345 bp, unidentified
  source 1..1345: mol_type = unassigned DNA; note = element_11f4746
  misc_feature 1..3: note = core
  misc_feature 4..226: note = LE
  misc_feature 227..1204: note = CDS
  misc_feature 1205..1345: note = RE
  misc_feature 50..217: note = bridgeRNA
tcggtcgtacatttgcacagttcaatattattgaatagatttatcttcaaatatcaggtatcacaagcatggaataaggcagagaatcgtaaggttaaaaccgttaatgacgttcggtccccatgcttttacatctgaagactggatagttcgttgtggcggcaagactgaccccgagtttgcgacgtaagtgcaaaagatgtagctcctgacaaaaaataataatatgacatacataggcattgacattagcaaagcgaccttcgtggctgctttcccggtagagagaggttatcgtaccgagactttccaaaatgacaccaagggcatccgtagattcatttcaaaactgtccagtgacacccatcattgcgtgatggaagcaacgggtaactactgtttcctgcttctttatcttcttgacaaggccggcatcagggcaagccttgttaatcccaagaaaataaagaattatgcccgcgtgatgttgtctgtcacaaagacagatgccaaggacgcatgccttattgcggatttcggcgaacgtttcaagccggaaccatacaagttcccgtccgaacagattatgctgcttaagcagaagaaaacagtcatacgtcaacttcaaaagcagttgacggcaacgaaaaaccttcatacgtcgcttgagcctctgccagttaaggacaaaaagtgtattcagtcgctgaaacagaccacggcattctttgaaaagcagatcaagtatatgcaacaggaaatggaggaggttgtatccgaggttttcgccagacagttgaaagccctcacatctatcaagggtataggtgtgacccttgccagcgcactcatcatagccactggcggcttcacctattttgacaacgcaaagcagctttcacgtttcgcaggcatttgccccaccattgaacgatccggcacaagcatcaacatacgaggacatatcaaccgaaacggggatgagaacctgcgttcaatgctgtatattgcggcatggtcggcaagccggcacaacaaggcatgcagggaatgctaccaacggctgagaagcaacggaaagtcagggaaactggccatgatagctgtagcgaacaaacttattcgacaggcattcgctgttgtgacatcaaattcatcatacattgatggctatatttccacgaaacctaatgctgacatctgacaaatactaatctcattatggaggaagatggatgggaggagtggaagaaactgaacataaaaagcagatacggacaattacattaaataatctgaggaaaatgtgagttttgactcttttttatttggattttaatatagt

SEQ ID NO: 1008 - DNA, 1813 bp, unidentified
  source 1..1813: mol_type = unassigned DNA; note = element_11f4a39
  misc_feature 1..3: note = core
  misc_feature 4..376: note = LE
  misc_feature 377..1669: note = CDS
  misc_feature 1670..1813: note = RE
  misc_feature 130..313: note = bridgeRNA
tctggtatgatgtagtcatagaccaataaggtcatccacatcatattctctaatctatatcctggttggtaagaggattctcctccataatcactccaaccatagatacgtgtataagttacatacatttttgtatgattattcactcctagactatgtctgttacataaggtattattttccattggatagggaaaaggacgattttctcctagggagctggcttatgtccagtaatacccgtaacttaagactgtcattccatcaatgaaaatttatgttttaggctggttgggagcaattaagctatacccgtataacgcgccaggtagtgtattcattgttttttatggaaccctatcggaaggagcatataatgcataacaaaaactatatttccgtcggcattgatgtcggttcagcttttagctttatgacaattcttgcgccagacgaaacagtgatcttgaaacctttcaagattactcacaataataaggattctttggaacgagctgtttctgaaattaaaaaagcagaagagctgtattccttagaaagtcgcacctttctagaatccactgggatttatcatttcccgctcttctgctatcttgttgattgtggttttaacgcgtccataatcaatcctattattacacattctactaagaatggaaatatcagaaaagtaaaaaatgataaaatcgattctaaaggtattgccaaactaggattatcaaaagatattcctgtttcccagttcccagcaaagctggttcttgaactgcgtagccttacccgtaagtattacgatttaactgatgagcgttctgctcatatcaataaacttaaaggagacctgcataccgtgtttcctcagtatcttgacgttttctgtgatgttaccggcaagacctcaacaatgattcttcgccagtacggtactccagacaagatacttcgtggtcataagaagaccatgattgaaaaaatatcaaaagcttcacgaaaaggtcttgccaaagcttctgaaagatatgagaaactctgtgctgcagctaatgctgcaaagacatttggatgtcaaatagacagtatctacttcaatatctttttaactttggaccttgttgaaaagcttgattctgctttggattccatactgaatcgtattaggcagctgattacattcaataaaaacgagaagtttattcagcagattaaacttttaaatacaatcccaggtgttggctttctgactgctgtaacaatcatgtgcgaaataggtgatttctcagcattccgtaatccaaaacaactttttgcttacttcggattagatcctgaagtaaatgaatctggaaaattcgttggcactcagttacatatgagcaaacgtggctccagaatcgcgcgccgtgctatctttgcagtagcactcgcctccattcgtacaaaacgtaatggagagggcatcaatccatacctccgtaagtattacgaattaaagtctggacaaaagcctaagatggttgcaatcggtgctgtaatgcataaagtctgcaacatcgtatttgctgttcttcgtgatgaaaaggcatttgagcttcggtcaccagaagaacactgtaagcagtatcaaagacctgctttagcagctgcataaagatgcagctatataaaaccataggagcttcttgacgaaaatccaagtgatttacgtttgttaaagttactcatttttaggtttcaaaacataaaagaaaaatatctattttttgtcttttaggtattgactataactagctgg

SEQ ID NO: 1009 - DNA, 1526 bp, unidentified
  source 1..1526: mol_type = unassigned DNA; note = element_121986e
  misc_feature 1: note = core
  misc_feature 2..120: note = LE
  misc_feature 121..1140: note = CDS
  misc_feature 1141..1526: note = RE
  misc_feature 1181..1425: note = bridgeRNA
gaatgaaagggacttccccgtcccgagtgatccgcgcagttgcggggtacggcatcaaagtgccacgatgggaagtgcaacctctcatcaactcactcgtttttgtggaaggggaagtccatgtctgccattgtcaccatcggaatcgatctcgccaagaacgtctttgctgttcacggagtggatgacacaggcaagagcgtgctggtgcgccccagcgtggcgcgtgccaagttgctcgaactcatcgcctcgctgccaccttgcctcatcggcatggaagcatgctccggcgcacatcactgggcgcgcgagtttcaaaactttggccacaccgtgctcatcatggcgcccaagttcgtcatcccttaccgcctctcgggtcgccgtggcaagaacgatgcggccgacgcagccgcaatctgcgaagccgtcacccgcccaaacatgcgattcgtaccgatcaaatcgatcgatcagcaaggccagctcatggtgcaccgcgcacgccaaggctttgtggagcagcgcaccgccacattcaaccgcatccggggcctgctctctgagctgggcatcgtgctggcgctcaaagccgctgtggtgcgccgcgaggcgatggcccgcctggaagacctgcccggctgggccaacaccgtcatcggggacctgctcagcgaggtcacccatctggacgaacgcattgcgcagtacgaccggcacattgcgttgatggcgcgccacagcacagaggccaaacgcctgatgcagctgagcggcgtggggccaaccaccgccacggcgctgctcagcacgattggcaacgggcacgacttcaagtgtggccgccaactgtgcgcctggctgggtttggtgcctgggcagtacagctcaggcggtaagcagcgcctggggcgcatcacgaaggcgggtgacccgtacctgcgcagcctgctggtgctcggtgcccgagcggtgctggcagcggccaagaacaagagtgatccgatcagtcgctgggccgtgagcctggagcagcggcgcggttactggaaggccatcgtggctattgccgccaagaacgcccgcatgtgctgggccgtgctcagccgaggcgaggcattcaggttgccggcctgagcagcgcctattgagagattgacatgacaccgcagatcagaccgtccgccgcgtgaaggcttgttgttgatgtgcaaaggttaggacctgcgccggggaatgctcgattaactttaggggataccgggtgagaaatcgccccaagcccgactaacgaatggagccctcggcgcgcgtctttcatcagggttcgctgccatgtgatgcagcaagaatgaccgtttgtagtaccgccgtccgcaccgtttgccacagagcatcaacacaccgccaacactgggctgggagtcgatctggattgaaaaccgcaaaccgtttgcctgagtcgattgcgctgcaatcaactcaggatggattgcgcttgcaaaggtggggaagcccttgta

SEQ ID NO: 1010 - DNA, 1480 bp, unidentified
  source 1..1480: mol_type = unassigned DNA; note = element_121c72d
  misc_feature 1: note = core
  misc_feature 2..239: note = LE
  misc_feature 240..1457: note = CDS
  misc_feature 1458..1480: note = RE
  misc_feature 44..211: note = bridgeRNA
cgttacctttttcgtagccttggtcctgttgcaggataagggtgtgttggccggtcggtcccggcatggtttttgcccccagtcgttcatgatccggggggtgttgtcaccgggaccgacttggcggcagttgatcgctgatagaggcacgacgacgggtccttcgtaacgtggatgccgactcctgccgccgttgaccagccagcacagaacggtgactgttgaacaagggagcgggtgtggcggtgattctggatcagcaggacatagacgtattcatcggattggacgtcgggaaatccggccatcatgcagtggctttgaatcgatcagggaaaaagctcttcgataaggccctgcccaacgacgagaccaggctgcgggaaatcctcgccggtctgtctgggcacggaagaatcctgctcgtcgtggaccagccggccaccatcggcgcactgccggtcgcggtggcccgggccgccggtgcagcggtcggctaccttccaggcctggcgatgcgcaggatcgcggatctgcaccctggccaggccaaaaccgacgcccgggacgcggcaatcatcgccgaagccgcacggagcatgcctcacacgctgcgctccatcgccctggatgatgagatgctggccgaactcggcgtgctctgcggcttcgatgacgatctcgccgcacagatcaccgcgacgtccaaccggatccgcgggctactgacccagatccacccggctctggaacgggcccttggcccgcatctcgatcaccccgccgtggccgatctgctgacgcggtatcctacaccggctgcgttgaagaccgccggccgagggcacgtccgtgctcgactgaagaagcaggcaccgcgggccgcggaacgtctaacggacgcggtcttcgcggccctgaacgagcaaaccgttgtggtgatcggcaccagcgcggccgggattgtgctgccgaaactggccgaacaactcctgtcgctgcggcaccagcgcgacgacattgccgcccaggttgaagccctcgtggaggcccaccctctttaccgggtcctgacctcgatgcccggcgtcggcgtcaggacctgcgcccgcatcctgaccgaagtgaccagcaaacacttcgccagcgccgcccacttggcgtcctacgccggcattgcccccgtcacccggcgctccgggacgtcgatccggggtgaacacacgagccggcgcgggaacaagaaactcaaacgcgccctgttcctctccgccttcgcggccctgcaccacccgccgtcgcgcgcctactacgaccggaaacgggccgagggcaaacgtcacaaccaagccctcatcgccctcgcacgccgacgctctgacgtactcttcgccatgctccgcgacggaaccctctaccaggaccccgaaccacggaacctgccatcagcagcttgacgaaaaccatagaggcaccctcc

SEQ ID NO: 1011 - DNA, 1422 bp, unidentified
  source 1..1422: mol_type = unassigned DNA; note = element_122be24
  misc_feature 1: note = core
  misc_feature 2..89: note = LE
  misc_feature 90..1133: note = CDS
  misc_feature 1134..1422: note = RE
  misc_feature 1189..1414: note = bridgeRNA
taatggaatggacgcccctactctgttcggcatcgaagtgccaaagtggaagtgtcgagcaaccacttaaacaggcaggagcgtccgatatgaacattacgacggtcggcgtggatttggcaaaaaatgttttccaggtgcacggggtcgacaagcgcggtaagccgcttgcccgtaagcagctcaagcgagggcaggtgattggcttcttcgcgaacatgccgccgtgcctgatcggcatggaagcctgcgcaagcgctcacttctgggcgcgcaaactcatcgcgctgggtcatgacgtaaagttgatggcaccgcagttcgtcaagccatatgtaaagaccaacaagaacgatgcgtccgatgcggaggcgatctgcgaggctgtggcgcggccgaatatgcgctttgtgccggtcaagagcgttgaccagcaagcggtacttgccctgcaccgtgcgaggcagggttttgtggcagcccgcacggcgcaagccaatcagctccggggtctgctgggcgagtttggtattgcattgccgttggggattagttgggtgccgaggaagattcctgagattctggaggatgctcagaacggcctgcccgtgattagccgcgaactcttcgctcggttactcagccactttcgggagctcgaccgacaggtgaaagagattgagagacagatcgaggcatggcatcgggacgatgcggccagccagcgtttgcaggccattcctggcatcgggccgatcacggcgagcgcgctggtggcgagcattgggaacgcgagcacgttcaagaatgggcgccagctggcagcctggctgggtctggtgccgaggcaatgttcctcagggggcaaaaatcagctactcgggatcagtaagcggggcgacacgtacttacgcacgctgctgatccatggcacgcgttcggtcatgcagcatctgaagcctggggctggccgcacgcaggggtggctcgaaagcctgatcaagcggcgccatcacaatattgcggcggtcgcgttggccaacaagaacgcccgcatcgtctgggctgttctggcccatggtcgagactaccaacccggctacgtctccacgcgagttgcaatgtcggtttaaccgcaacagcggcggcggatccagagtcaacgagctcaatacaacacttcccaccaccgagtgctcaggcgttcctcaaagtgatggcattacaggtcagaccggggtcgactcaacctgcgttagcccaaggacttcaacagtccgcggaattgattaggcgtcgaccagcatattccatcagggcccgcagccatgtgctgcactgcaaggccggatgtatggctgcactctcttcctgtgacccagaaacgaaaagaagcgcttggcatgtaggggcgtccatgta

SEQ ID NO: 1012 - DNA, 1522 bp, unidentified
  source 1..1522: mol_type = unassigned DNA; note = element_1232619
  misc_feature 1..3: note = core
  misc_feature 4..491: note = LE
  misc_feature 492..1376: note = CDS
  misc_feature 1377..1522: note = RE
  misc_feature 3..220: note = bridgeRNA
cttatattatatttaacgcagttagctactgccaaagcccaagtggtatacttggaataagccactgtggattagttcatttcctccaatcgcttgacgatttccgaaaggatctaaccacagctttttgtttcaattggtaatgagtttgataacgcatagacgttttatctcgtctaaggtaacaaggcaaaaagttcgtggataaccaagtagacttgaaatactatatctggaggtactcccatgctttatgtgggcattgatgtcgctaaaaataaacacgatgttacagccttgaatgttcgaggaaaactgttcttaaaccactcactttttcaaataataaagctggttttgaactattagatctgtctcttcgacagctcaaccaagactgtctcatcgctcttgaagataccggacattatgcctttaatctactgaacttcctgcatgaacaaggatataaagtttacacctacactcctttgctcatcaaggaatttgccaaatcattatcacttcgcaagactaaaacggataagaaagacgctcatggcatcgctcttaaacttctttctgaccccaatcgtgaacaatttcaacacgataatcggcaagtagaactaaaaatactggctagacatattcatcgtctcaagaaaaaacagtctgattggaaagtacaatacactcgttgtcttgatatcatctttcctgagttggataaaatcgttggaaagcattcagaatatacctaccaactcttgacatgctaccctaatcctcagaaaaggcttgaggcaggatttgataagctgatagaaattaagcgattgaccgcttctaaaattcaggatatcctctcagtcgcacctcgttctatcggaacaacatctcctgctcgtgaattcgaaatcatcgaaaacatcaaacattacaagaggctcattgacaaggcggaaacatgtgtcaatgacttgatggctgagttcaactcgatcataacgacggttactgggattgggaatcgtttaggggcggtcattttagccgagattcgaaatattcatgcctttgataatcctgctcaattacaagctttcgctggactggattcttctatttatcagtcaggtcagattgatttagctggaagaatggtcaaacggggttctcctcatctgcggtgggcactcatacaagctgccaaagcatgcgctcgcttttcacctgcttttaaggcctatcttaagactaagttagaacaaggaaaacattacaatgtagccatcatccaccttgcaaaaaaacttatccgaaccctgttttatatcctaaaaaagagctgccatttgacgaacaaaaagtgatgtaatttctgaaattaacacaggattacctttgaaaaaatggactttttcaagggctttttgccgtgctctaaaatcatcgccaaatcatcaaattgaaataagaaataatttagataaaattattgacttttcttatagtttgt

SEQ ID NO: 1013 - DNA, 1366 bp, unidentified
  source 1..1366: mol_type = unassigned DNA; note = element_123a990
  misc_feature 1..2: note = core
  misc_feature 3..78: note = LE
  misc_feature 79..1104: note = CDS
  misc_feature 1105..1366: note = RE
  misc_feature 1080..1353: note = bridgeRNA
tgatggggtagacgccccccaacggcctcggtgtgccacagtggaggtgttgatgagcaccacttgagggaggcgtccatgggagaggttagcacaatcgggttggatctggcgaagaatgtctttcaggctcatggggctgatgcatcgggagcggtgctgttccgcaagaagctgcggcggcaccagcttctcaccttctttgccggccagaagccctgcacggtggcgatggaggcctgcagcagctcgcattactgggcacgtgagatcgcaaaactcggtcatagcgtccgcctgatctcaccggcttacgtgaaaccgtttgtgaagcggcaaaagaacgatgcggccgacgccgaggcgatctgcgaggcggcccagcgcccgaccatgcgcttcgtggctccgaagagtgagcaggctcaagcggcggcggttgtgttcagagcccgtgatctcctggtgaaacagcggacccagatcatcaacgccctgcgcgggcacttggcggagttcgggattgtggtggccaaaggcccagctcgtgttccgcaactcgtgcgggctgtcgcggatccggaggagccaatcccggagctcgcccgacccatcctccagatgctgatcgagactctccgaggcctggacgagcaggtcgcccgtctggatggtgagatcgcccagcgggccaaggaggatgagacggcgcgtcggctgatgaccattcccggggttggtccggtgattgcagtggctctggccgcactggccccaccagccgaaacgttcaggcgcgggcgcgactttgctgcctgggtcgggcttacgccgttgcagcgctccaccggcggcaagcagaagctgggtgccacctcgaaaatgggcgaacgcacgctacgccgcctgctgattattggggcgaacacgatcttgatccgggctgcccgcaacggggtgccggctagctcgtggcttgcacggatgatggcgcgcaagccaccgatgctggtgcgggtggcactcgccaacaagatggcccgcatcgtctgggcgctgctggcgcgaggtgaggtgcatcgggctccggctgtgggtgcgtaggcactcgcggccgcgaggctgttggggcgcaggaagagcgaaggagaggtatggcgcaacggtcactgagacgggatcagacaaaccagttcaggaacaggcgcttcgagcgcgtagatttgattgggacctgatccgcgaactcccatccgggcccgcggcatgggaacggccgcagttgaggccgcacacatgtccgtatctgacctgcgcgttgcaccaacccgaagattcttcttgcgtcacgcggggcgtctacaca

SEQ ID NO: 1014 - DNA, 1463 bp, unidentified
  source 1..1463: mol_type = unassigned DNA; note = element_123d04a
  misc_feature 1: note = core
  misc_feature 2..228: note = LE
  misc_feature 229..1380: note = CDS
  misc_feature 1381..1463: note = RE
  misc_feature 15..240: note = bridgeRNA
ctgattaacactgctggtggacgttgcggtgtttccgtagcgttgtgagggtccggtcggctggctcggttagtgcctgccgcctcggttgaggctggcttcttttcgaactgtctgccggccggattctcttgctgtggcgtggctcgaaagaggcgagagcacatcgaacccgaatcaggaatgcccgccacggtccccacccattgaccggaaggcgacatcaccatgaccatcatgatcggaatcgatcctcacaaagcgacccacacagcggtcgcgatcgacggcgacgaacgggtcctcgacgagttcaccctgcgagcctcgaaagcacagacgacgcggttgcgttcctgggcgggacagttcgacggcccggagtgggcggtcgagtccgcccgcggactcggctatctgttggcccaacagcttgtcgccgctggggagaccgtgtttgacgtgccaccgctgctggcctcgagggtgagggtgttgggatcgggacgttcccagaagaacgaccccaacgacgcccgctcggtcgcgatcgcagcgatgcggtcggaccggctctgtcgggtcaccacagatgatcacgcccaggtgttgcgcctgttggtgaaacgccaccgcgacacagcgcagctccgagccaagctgatcgttcggctctcagctctgacgaccgaactgtcagcgggcgggatcgggccaaaagccacaccacagaaggcgatcgagctcctcaagagggtcgaagtgaccgacgaggtggcacgttcccgggtgctgatcgccggtgaactcctcgacgacgtggcgcgcctcgacctgttgttgaagccatcaaagcaacggatcgagacggccgtcgtcacgtcgggaaccaccttgtgtgacatcgtcgggatcggcccgatctgcgcggcgacgatcatcggctacaccgggaacatcggccggttcccgacccgggcacacttcgcgacctacaacgcgacagcgccgatcgaagcgtcttcgggcggcaaggtccgtcaccggctcaacccgcgggggaaccggcagctcaacttcgcgatccacatcgccgctgtcgttcagatccgctccggagacgaaggccgagtgttctacgaccgcaaaatcgccgaaggtagatccaacaaggaagcgacccgctcgttgaaaaacgacggatctctgatcgggtctacagccacctcgtcgccgacgcgaaacgggcagccgcgagctgaacggcaggtgggtccgggaggacaaccaggaacgactctgcaatccagcgtggccggcttgaatcctgaacaccggcgcttcggacaagtcacttcccggacccgacaatcacgataggaccgaccccggcacctccgccagggaccccaccgaacgcgcccaccatcaccccgaaagaaccccttgacacaaagaggctt

SEQ ID NO: 1015 - DNA, 1348 bp, unidentified
  source 1..1348: mol_type = unassigned DNA; note = element_1243a01
  misc_feature 1: note = core
  misc_feature 2..73: note = LE
  misc_feature 74..1096: note = CDS
  misc_feature 1097..1348: note = RE
  misc_feature 1103..1338: note = bridgeRNA
tatgggatggcccgcccctctctggagcgatccgttaggattgctctgtttggaacgagagaggaacggaccgatgtcgatatttgtgctcggaattgatcttggcaagaacgtctgcagcctcgtcgggctcgacgaaaccggcgccgtggttctgcgccgtcgccttcgtcgtgacggtgtggcggacttcgtcggcaggatggagccttgcattgtggcgatggaagcctgctgcggggcgcatcaccttgggcgggtacttggtgccagggatcacacgatccggctgatgtcgccggaatatgtgcgaccctacgtgaaggcgaacaagaacgacgaccacgatgcagaggcgatcgctgaagccgcaacacggccgacgatgcggtttgtgccggtgaagagcgaggcgcaatcggacatccaggcgctgcatcgggcgcggtcgcgcctggcggagcgcacggcgctgatcaatcacctgtgcgcattgttgctggagcgcggcatcgtcgttgctcagggtcggcgcaagctggaagatgtgcttggggttttcgccgatgaggacgattcccggctgtcgtcgcgcatgcggcttctgatcgaggacttgcgcgccgagtggcgcagcctcgatgaacggattgccgccttcgatgctgagttcgtgcggatggcgcgtgccgacgaagcggcccgtcgcctgtcgacgatccccggtatcggggtcatcaacgccaccgcactgacggccgcggtcggcgacgcagcaagcttcgggcgcggtcgtgaccttgccgcctggctgggcctcacaccccggcaggcgaccaccgggggcaagcccaggctgctgggcatatcgaagcgcggcaaccgctacctgcgcgcaaacctgatccatggcgctcgcgcggcactgccgcgcatcatggctcaggatacgtcgctgggccgatgggctcgtcgcctgtcggaacgggcgcacaagaacatcgtcgtcgtcgcgctggcggccaagcttgcgcgcatcatctgggcggtgctgcgcaaagatcgtggcttcgatccggcgatcgcggcggcatagaacgcaacagtcgtcggcctctatgccgatcgtcgcgataatctgcgggtggtgagaagaagatggcctgacagtcgagcggcagcctggaagcctggcaaattgaacggtcgatcgagaccgctgtgattatgaggaccaggctgcgcggatctccatcttggccgggacacgatcccgagaccggatacgttgacgcagactgaccagagctatttttcaaaaccccttgcggacggggcgggccatacg

SEQ ID NO: 1016 - DNA, 1384 bp, unidentified
  source 1..1384: mol_type = unassigned DNA; note = element_12473d9
  misc_feature 1..2: note = core
  misc_feature 3..87: note = LE
  misc_feature 88..1116: note = CDS
  misc_feature 1117..1384: note = RE
  misc_feature 1090..1368: note = bridgeRNA
agatggggtggatgccgctctccccagacggcatcgcaatgtgccaagcttgcggtgttgtatcacaagctgaaggagagggcatccatgggagaggttaccatcatcggcatcgatctcgcaaagaacgtgttccaggtgcacggtgccgcggcggacgggtccgtcgtgttccgcaagaagctgacgcgaccacagtttgcccggttcatggcggagcagccgccgtgcctcgtggtgatggaggcctgcgccagtgcgcatcattgggcgcgggaaatgtcccgccacgggcataaggtccggctgattgcgccgcactacgtcaagccgttcatcaagcgccagaagaatgacgccgccgatgcggaagcgatcgtcgaggcggcgctgcgaccgaccatgcggtttgtggaacccaagacacaggaacagcaagcccgagcggttgcgttccggacgcgcgaacagctcgtgaagcaacgcaccgaagccgtgaatgcgctaagatcgcatctctacgagttcggccatgtcgcccccgtggggattggctatgtaccgcgcctggaacaggtcatcgcagatcctgacgccgacattcccgatctggcgcgcgagatctgccggatgctcctcgaccagatcaaccagctgaccgaccggatcgatgcgctgaaagccaggatcgcggccttgtcgaacgaagcggaaatgccgcgccagctgcagacgatgccgggtgtcggcccgatcacagccctggcggtcgagaccttcgcaccgccgatggagcagttccgccgagggcgcgacttcgccgcttggctcggcctggtgccgcggcagcattccaccgggggtaagcagaagctggggaagacctcgaagatggggcagcgcgacatccggcggttgctggtcatcggcgctacagccgtgatccgctgggcctcgcgccgcggtgcgccgaaggggtcgtggctggcgaggatgctggaacgcaagccggtcccggtcgtggccgtcgccctggccaacaagatggcgcgtggcatctgggcgatgttgacgcgcggcgaaagctatcgtggtccagtgctgatcggcgcctgatcgggcaccgaatgggcactcgggccaccgagttgtgaggaagtcatgatctgaatgggcacatgatcgacatgatccggatcgggaaaaccagaaaccttctccgagcctcgagctcgctgttggagatttggacccggtccgcgtatcaccatcccggccagcggcgccatgtcagccgcacgaacaggcctgacaaaagtacgcactcgatcacaagtccagaagaccagaatttccttgcaaaccgagcggcatccacaaaaga

SEQ ID NO: 1017 - DNA, 1488 bp, unidentified
  source 1..1488: mol_type = unassigned DNA; note = element_1247da0
  misc_feature 1..2: note = core
  misc_feature 3..94: note = LE
  misc_feature 95..1111: note = CDS
  misc_feature 1112..1488: note = RE
  misc_feature 1246..1486: note = bridgeRNA
cgatgaaatggtctcctcccgatcctacgaatcggcgtcacaatgcgccatgatgggagattcaactttccatcacaaagtacgggagaagaccatgaacaagattacgacaattggactggatttggcaaaaaacgtttttcatcttgtcggttgcgatgcgcgtggacaaaggcagcttaaaaagcagctgagccgacgccagatgttgaactatttcgccaatctgccttcctgcttgattggcatggaagcctgcggcacggcgcattactgggcgcgggaacttcaagccctggggcacgaagtgaaattgataccggcacagcatgtcaaagcctatttgcggggcaacaagaatgactacaatgatgcccaggcgatagccgaagcggtggttcgcccgcaaatgcgttttgtggcgatcaaaactcccgaagaacaggacatccaggcgctgcatcgcctgcgcacacggcgtgtggcggaacggacagccttatgcaaccagctgcgcggactgctcagtgagtacggcattgtaattcctcgcggcattaccgccttgaagcggtacctgccccggttgctcgaagacgccgagaatggcttgagtgaccgcttccggcgttttctgaaacaagcttccgggcaactggaagaactggaagcgcacatcgatttcttcgatgaagaaatggcacaattcagccaccagcatgaagcctgccagcgactccagacgattcccggatttggggtcgttgtgtcgagcgtcttttttgcgcaggtaggcaatggtgaagcgttccggcgcggacgggatgtcgcggcttcgctgggattggtgccacgccagtacagtagtggtggcaaggaggttttattgggcattagcaagcggggagacagttatctgcgcgggttgttgattcatggtgcgcgtgccgtggtgcgtcatgccgcagggaagcaggatcgcctgagtcgctggattcagcggctggtcgaacgacgtggacataacaaggcggtggtggcgctggccaacaaaatggcgcgcatgggctgggcgatattggctcacaaaaccacctatcaggaggcatgaggaaagagggatgtccagatatgccgccacggctgtcgatatagcctgtggaattgtggacgagtcctacggagcggcgcacgatcccacaggctcaacaacaaatgaaaattgaaataattgaattgaggtaacctgccaacgattgcgaagcatttgtcgccatagatgacacaacaggtcagaccggcgtattgaaaacctgattaacctgaaggtcgaaaagaccgcagtgccggcaaggacaatacgcgcgtatcttcatcgaggccaggagtccattgatcggctccaccaaacaggccggatatacggaagcaatcctgtccctgtcatttgtcaacacagatgcttgcaaaatgggaggagaccatata

SEQ ID NO: 1018 - DNA, 1397 bp, unidentified
  source 1..1397: mol_type = unassigned DNA; note = element_124a0d8
  misc_feature 1..2: note = core
  misc_feature 3..89: note = LE
  misc_feature 90..1121: note = CDS
  misc_feature 1122..1397: note = RE
  misc_feature 1092..1384: note = bridgeRNA
agatggggtggttgccgccctcccagacggcatcgagatgtgccaaaattgtgagtgttagcgctcactgagcgaaaagggaggcaaccatggacaagaatacgatgatcggggtcgatctggcaaagaatatttttcagcttcatatcaccacgatgacaggcgctcttttatcgaaaaagaagctttctcgggacagatttaaagaatttatgaagtcgcatgaaccggctattgtcgttttagaagcatgcggtagtgcgcattattgggctgaaacgcttggcgagatgggtcatgacgtaaagttgatcgcgcctcaatatgtgaaaccctttgtcaaacgccaaaagaatgatgcggcggacgcggaagcgatcgttgtcgcggctcagcgccctgagatgcgttttgttgcgactaaaacgaaagaacagcgcgcaaaagtcgttctttttcgctcacgcgagcgcttggttcatcaacgaacagagcaagttaacgcgctgcgtgctgtgctttatgagcatggctatgtgatcccgcaagggatcgcgtctatcagccgggttgaagacatactcgcggcaccaaagtgcgacttgcctgatcttgtttatgatgaatgtcgagaattgctcgaacacatttccaacaacacaaagcttatcaacgctaagaccgatctgattaaacaattggccaaacagacggatatggcgcgccagcttcaaacaatccctggtgttgggccaatgacggcgatggcaattgaggctttcgcgccacccatggacctcttcagaaatggccgcgatttgtctgcctggctggggcttgtgccgcgccaatattcatctggcggcaaagaacggctcgggcgtgtttcaaaggccgggcaagcagatatccgacgacttctgatcatcggcgcgatgtctcgcctgacatggctagggaaaaaatccatcccagaaggatcatggttggctcagatgatggcgcgcaagccaaagatgcttgttgcaattgcattagcgaataaaatggcgcgcatcatttgggccatgttgacgaggggaacagattatcgagatccgatgaagacggcgacagcatgattttcataatcagcaaagcttgtattcttcggtagaaggagtgtgagaagtcaataatctgaatgggcaaaacgatcgaaaagatctggattaggaaaacctgttaagtcctaagagtcggtgaactcgataattagatgaggacctgatccgcagatcaccataccggccagcggcttcatgtaatgctgcattaaaaggccttacagaagaccgcattcgatcactctgcccggaaagagaaaaacttcttgcattacgggcggcaaccacaga

SEQ ID NO: 1019 - DNA, 1176 bp, unidentified
  source 1..1176: mol_type = unassigned DNA; note = element_1259b9d
  misc_feature 1..2: note = core
  misc_feature 3..206: note = LE
  misc_feature 207..1154: note = CDS
  misc_feature 1155..1176: note = RE
  misc_feature 3..182: note = bridgeRNA
cttgtatggtaggacttgaagggaggaaggagggacaaagtcggcttctgactgttgacgcagtacagactgtgggagatttcgcccctcctcccttcacacccaagcgccgataaagaatgcttcaggctcgaccgacgaaagtaacaagcctgcgcctctgggtggcccttcaagtcatcaaaccttatcccggaggatttccaatggcaatgtcggcagctgagagcaggtctgttaggggtgtcgatgtagccaagaatgaattggtgatttatgaccagaaacgcgatcagctgatcacgattcccaataccaaaactgctatcaagcagtggttgaaggccttggcaggtgcggtctcgattgcgatcgaagccaccgatatttatcacgttatgtttgccgacctggcttatgaggcgggttgcagcgtgtacttggtcgacggctatgctctgagtcattaccgaaagggcgtcaatgtccgcgctaaaacggatgcaatcgatgctcgactacttgcccgttacctgagaaacgaaggtggaaacctccatccctgggtgccaccgcaacccttctaccgcaagcttcttagtctgtttcgccgtcgcgccgcacttgtgcaagcgcggaccagtttgacgctgagctgggccaacgagcctctgctcaaggctgctttcaaatcgcagctagcttcgatgcagcgtttggaggcgctggtggaaaagatgatcaaagagctgcttgaaaaagcaggactgatggcgcaagtgaagcgctgcatgaaggtagagggtattggatttctaaccgccgcgcgtctggtaagaagttaccagcgaggacagtttagtggtggcgatgcatttatcgctttcttaggcatggacttgagagtcgcccagtcagggcagaaaaaaggactctcaaaattgaccaaacgagacgatccagaagcccgccgtttgctgcacaacgcggcgatgtctgcacgcagaacaactgcctggaaggactattacgaaacccagcgcgcccgtggatttagctccatccaggtgctggtcatgcttgcccgccagctggctcgagtggtattcgcactcctgcaaaatggaagcgaataccaaacgaaagccgcttagcgcttggcaaaaaccatagaat

SEQ ID NO: 1020 - DNA, 1456 bp, unidentified
  source 1..1456: mol_type = unassigned DNA; note = element_12638d1
  misc_feature 1..4: note = core
  misc_feature 5..246: note = LE
  misc_feature 247..1440: note = CDS
  misc_feature 1441..1456: note = RE
  misc_feature 1..250: note = bridgeRNA
ccccgttaccttcttcgtagccctgcaacacagggcgacggtcgccaagttcggtatgacttcttgcccctgtcactcgaatgatccgggggggtgatgtcgccgaacctggtgacgtcgatggaccgctgatagggacacggccgcctgctgtgccggggcatcgggcaggtctcctcgtaacgtgggtgccgggtatcgacgtcggatcggtgaccgtccggagcggaacgaaaggcgcgcttcatggaccccacctacgccgtgttctgcggcatcgacgtgggcaaaggcgaacaccacgccgtcggactcgaccccgccggcactcgactgttcgacaaagccctgcccaacgacgagaccaaactccgcgctgtgttcgaccgcctggccgaacacggctcggtgctggtgatcgtcgaccaaccgaacaccatcggtgccctgccggtcaccgtcgcccgcgcctgcggccacgccgtggcctacctgccgggcctgacgatgcgccgcgtcgccgacctgtaccccggacaagccaagaccgatgcccgcgatgcgttcatcatcgccgatactgcccggaccatgcctcacacgctgcgccgggtcgatgtcggtgacgaagccttggccgagctcgaggtgctcgtcgggttcgacgacgatctcgccggggaggccacccgcatcagcaaccgtatccgcggattgctcaccggaatccaccccgcgctcgaacgcgttctcggcccacggatcactcatccggcggtgctcgaaatcctgtcgcgctgcggcggtccggtcggtatccgacaggccggcaagcgccggctcaccgccctcgcgaccaagcatgctccgcggatgggagcccgactggccgaggaggtcctcgttgccctcgatgcacaaacggtgacggtgccgggcagcaacgccgccgagatcgtcctgccgaaactggccgactcgttgaaagaggttctgcaacagcgcaagagcattgcagaagatgtggagaggatgctcgaaggccaccctctttcccaagtcctgatgtcgatgcccggcgtcggcatcaggactgcagcgcgcatcctgctcgaagtcggtgatggttcggcgttcgcttcggcggcacatctggcggcctatgccggtatcgctccggtgacccatcgctccggatcgtcgatccgtggtgagcacccagctcggtcgggtaaccgcaagcttaaacgggcgttgttcttgtctgcgttcgcgtcgttgcacgacccaaccagccgtgcctattacgaccgcaaacgcgccgagggcaagaagcacaatgccgccttgatctgtctcgctcgccgtcgttgcgacgtgctctacgcgatgctcaagaacaagactttctaccgcacgcccgctgctgccgccgcttgacgaatccatagggaca

SEQ ID NO: 1021 - DNA, 1469 bp, unidentified
  source 1..1469: mol_type = unassigned DNA; note = element_12655c8
  misc_feature 1: note = core
  misc_feature 2..222: note = LE
  misc_feature 223..1449: note = CDS
  misc_feature 1450..1469: note = RE
  misc_feature 14..240: note = bridgeRNA
ctaattgagatcgaggcggatgttgcgggtttgccgtagcgtccgtgaggcccggcgggctggctccctaaccgcctgccgaccgcgtcagtggtctggctttatatcgaggtgccagcctgccgggtctcgccgcggtgtggctcgaaagaggaacgagcgcgagcaccgtaattaggcatgcccgccgcggtcccgtcttgcccggaacgaggactggagatgctggtgacagcggtgatgatcggcgtggacccgcataagggatcacacacggcggtggcgatcggcgcggccgaggagccgctgggcaggctgcgggtgcctgcctcagccggccaggcgcagcggctggtgacctgggcggcgaagtggccgcagcgggcctgggcggtggagggcgccggcggcctggggcacctgctggcccagcagctggtcgcggccggcgagctggtgctggacgtgcagccgaagctggcggcccgggtccggctgctggaggccggggacagtaacaagaacgacccgaacgacgccttctcggtggcggtcgcggcgctgcggtcgaaggcccggcggcaggtgagcgccgatgaccacgcggcggtgctgcgggtgtggtcgcggcggcaccgggacctgggccgggccaaaaaccaggccgcgtgccgcctccacgccgtcctgtgcgaactggtacctggcggcgtgcccgaggagatcaccgcagctcaggccgcccggattctcggcacccccacgccgtacggcgcggccggccaggcccgcatcgacctggccgccgagctcctggcggacatgcgccgcctggatgagcagaggcgcgagtcgaagaagaagctcgcggccgcggtccgcgcgtcgggcaccagcctgaccggcatcttcggcgtgggcccggtcgtcgccgccaccgtgatcggtgacgccgccgacgtggcccggttcgccagccgcggtcacttcgccgcctacaacggcaccgcgccgatcgaggtctcttctggcaaccgcaagatctaccggctgtcgctgcgtgggaaccggcgcatcaaccacgccatccacatggccgcgatcacccagatccgctactcccacagccagggccgcgcctattacgacaagaagctagccgagggcaagacgcacaaagaggccctgaggtctctcaagcgccggatcagcgacgccatctacgcccgcctccgcgccgacgcccgccaggccgccaccagcctgaaccagggcccgggagggcaaccggggaacgaccctgactccagcgcggccggctcacaccccgcacaccggctcttcggacaagccactcccggacctgactccaccctacggcccgccaccccggccgggccggccctgccgccgggagcagtctcgaagaagacccgccgcagtccttgacaacgactgcaaagaggact

SEQ ID NO: 1022 - DNA, 1197 bp, unidentified
  source 1..1197: mol_type = unassigned DNA; note = element_126a6e0
  misc_feature 1..2: note = core
  misc_feature 3..225: note = LE
  misc_feature 226..1182: note = CDS
  misc_feature 1183..1197: note = RE
  misc_feature 6..202: note = bridgeRNA
cttatatcttgatcattaccccataaaggaacatgatccccagttgatcactgggtggatacggatgagatggtaacagcccctgggcttctaaacctgtccgatagattcatcctccgtattctttattcgccctgtaaactgtacggtatcttgtgtctatgagcacgtattgataaggatagttctggcgatgagttatctaacctttgtgagttctgtattatggctacttttgtcggtgttgacgttgcaagtaaaaaatttgatgttgcagttttagataaagaaaacaaaataaaaaataaagttttcactaattcacttcaggaatttaacgatttctttgactggctcaatacatatggaacggttcatgtttgtatggaagctacaggggcttatagtaccccattagcgacatttctttttgaatcttctattgctgtcagcgtcgagaaccctgccagaatacacgcttttgcgcaaactgaacttactcgcaataaaacggacaaaagcgatgccagaatgattgcccgttactgccgcctctatcagcctccactatggcaacctgaaccactccatatccgtcaactacttgctttagtgaatcgcctggatgcgctaaaagagatgctaagaatggagcagaatagaatgttggttgctaatgaaatcatcatgtcatcattacaaaaaaacacggaatcattattatcacaaatacatgaaattcaacaaaatattaaagagcatatcaatgctaacaaggaacttaagaaaagcaaagcattattaacatcaattcctggcgtaggtgatattcttagttgtacatttcttgcttatgttggtgatatatcaaaattcagcaataataaaaaactggtcgcatgggttggactcaatccaatgcaacaagagtcggggctatggaaaggccatagtaaaatctctaaaagaggtaatattgaattaagaaaagcattatatatgccagccgttgccgcattaacgcataacccaatattaattgccttaaaaaatagactggcaggaagaggtaaagcgggtaaaagtattgtctgtgctggcatgaagaaattattgcaattgatgtatggcgtattgaaatctggtgagtattttaatgcaaaaatacagcttgtaaaatgaggggcaacacggtat

SEQ ID NO: 1023 - DNA, 1412 bp, unidentified
  source 1..1412: mol_type = unassigned DNA; note = element_126bd8f
  misc_feature 1..3: note = core
  misc_feature 4..87: note = LE
  misc_feature 88..1137: note = CDS
  misc_feature 1138..1412: note = RE
  misc_feature 1156..1398: note = bridgeRNA
tgatgcggtggacggcgcccactctgcggcatcgaagtgccatagggtagttgcgtcgaagcgcaaccacattgaggggagccgtccatgggtgaggttagcacgatcggggtcgatattgcgaagtcggtttttcaggttcacggcgtcgatgcggatggcgcggtggtgatccgcaaacgtgtcggtcgagcgaaggttattgagttctttgctaatttgccgtcttgcctcattggcatggaagcatgtgcaacggcgcaccagtgggcgcgcgagctcaagaagctcgggcacgacgttcggctcatgccgccgacctatgtcaaagcctacgtgaagcgcggcaagaacgatgcggctgacgcggcagcgatctgcgagggcgtgacgcggccatcgatgcgttttgtgccgatcaagagcgtcgagcagcagagcgcgctgatgctgcaccggacgcgggatctcctgatccgccagagaactcaactgatcaacgcactgcgtgcccacctggccgaactcgggctggtggcagcgaaggggcatgaaggattgcagcagttggttatggccgtgacggagagcagcgataagcggctgccgagtaacgcccgctttgcctgtcagtcgctcgttgcgcagctctatgcgttgcagacccagatcaacgggctcgataaacgcatcattcaagcccatcgcgccaatgcggacagcaaacgactcgaagccattccagggttcggcgtgatcctatccacggcggtcgtggcgacgatgaccgacccaagggcgtttaggaccgggcgcgagttcgcagcctggatcggattggtgccgcggcagaactccaccggcggaaaggagcgtcttggctctatttccaagcagggcgatcgctacctgcgccgactattcgtcctcggtgcaatatccattgtcggaaccgcgcgcacgcggccagacaagtatccctgggtaaccgaactgctgggacgtcggccggccaaggtggcggcggtggcactggccaacaagatggcgcggaccgcttgggcggtgctggccaaaggcgagacctatcggacgccgacacgctcaagtagcgccgccatcgcagcgatagcctaaagggtttggtattcggaatgtgaggttacgtcgagggcgtataggaacgtcgagggtgatgatggtttgatgcgaaccggttggaccggggatcgggagaacccgctattgggtcaagcgctgtcgagcgcgagcgaatgatagggacccgatctgcggatcacatcagggccagcggtcatgagcgccgcacaaacaggccggacacatgacttgcacccgaccgcaagcagaaagccaaaagaatcccttgacccgtgggcgccgtccacaca

SEQ ID NO: 1024 - DNA, 1357 bp, unidentified
  source 1..1357: mol_type = unassigned DNA; note = element_1281f19
  misc_feature 1..2: note = core
  misc_feature 3..76: note = LE
  misc_feature 77..1102: note = CDS
  misc_feature 1103..1357: note = RE
  misc_feature 1075..1345: note = bridgeRNA
tgatggggtggacgccccccgacggcatcgatgtgccacagtggaggtgttgaacaccactttgagggaggcgtccgtgtcggaagttagcataattgggttggatatcgccaagcatgtttttcaggcgcatggggtagatgcatcaggccatgcgattttgcgcaggaagattgcccggtctaaactgctgccattctttgccgctcatccgccttgcctggttgtgttggaggcatgtggcggagcccatcattgggcgcgcgagttgctcaagctcggtcatgatgtacggttgatagccccggcctatgtgaagccgtttgtaaagcgccaaaagaacgacgcggccgatgccgaggcgatctgcgaggcggcacagcgccccagcatgcggttcgtgccggtgaaaactgaggaacagcaagcagcggcgatggtgttccggggtcgagatctactggttcgccagcgtactcagatcagcaatgccttgcgcgggcacatgacagaatatggttggatcgcaccgaagggcttggcgcatctggaaaagctcagggcgctgctctctgatcgatcggcggtgcccgaaggggtgcggtcggtatgcatggtgttgcttgataatctggccatgctcgaccggcagatcgcgctactcgacaaggagatcgtgcggcgctctcgcgaggatgcagtcgcgctccgcctgatgacgatcccaggcatcggaccgatcacggcaacggcgatcaccgcgcttgctccgccgtcggggacgttctccaaggggcgtgacttcgccgcctgggtcggccttacgccgcgccaacactcgacagggggcaaacagaagctgggatccatctcgaagatgggcgagcgcacgctgcgaaggctgctgattatcggcagcagtgcagtagtcctacaggcgagcaaacgcggcgcggcgaagggatcgtggctcgagcagatgctggcccgcaagccacgcatgctggtgacggttgcgctggcgaacaagacggcacggatcgtctgggcgctgctgacgaaggatgaagtttacaaagctccggtcgcagccacggcgtaagccaaggcgggccagaggtcgtcggaacgtagtcggtcgaaggagggtatggcacaacggtcggcgagacgggatcggaagaaccagagcttcccaccgtgcttcatcagcacgctacgggtgatgtggttccggtccgcgaactcccatacgggcccgcagctatcatcgctgcatcagaggccggacagatggcagcatccgactatgtgcctacctccaaataccacttgcgttaatcggggcgtccacaga

SEQ ID NO: 1025 - DNA, 1315 bp, unidentified
  source 1..1315: mol_type = unassigned DNA; note = element_129069c
  misc_feature 1..2: note = core
  misc_feature 3..192: note = LE
  misc_feature 193..1152: note = CDS
  misc_feature 1153..1315: note = RE
  misc_feature 28..202: note = bridgeRNA
cttgtgtccgcaaaatctgccagaatgcgcgaacgggcggttctcaccaaccgcccgtcgctagatctgagcccgttcgtgctcaaaggcctgggagcctgacggggagctagggacagatccggtgtgtcttcctcaacccgaacagttgcatgggcttcgagcccggacgagcaaggaagggagtggatgatggcacaaaacgatcgcattgtcgtcggtatcgatgtggccaagggcaaggtggatgcatgcatccgcccgttgtcgcaacggcaaacgttcccgagcaccgcagcggggcaccgccaactggtggcctggctgcgcaagcacaaagtagccaaggcggtgatggaggcatccggcggctatgagcgggactgggccagggtgctgcgtcaggctggcatcgaggtgcggattgtcgatcccaagcgcgtgcgcagcttcgcccgatcggccggacggctcgccaagaacgatacgatcgacgcggagatgatcgcctggttcgccgagacgttcgacgaagtattggaccagatccacgatgccgcacgcgacgagctggcgacactagtcaaagcgcgcaaagccctggttgatctgaggatccgcctgcaaagccagaacgaacatgcggtgccgggagcggttcagaaagcccacgctcgcgtcttgaagggcctcgacatcgagacggccaagatcgaggacgccatcaccgccacgatcaaggccacaccggcatttgccaaacgcgccgagatcatcgagagcgtgccgggtctcggcgatgtggcctctgcggtcctccttgcgggcctcccagagctcgggacagtgcgcgaggaggtcgctgccgcgttgttgggagccgctccttatgacgacgacagcggcaaacggcgtggtgagcgccacatcaagggcggtcggcgctgggtccgcaacgccctctacatgccctgtatcggcgcagccacccagagcaacccggtgctcaaggcctactatgaaaggctgatcgccaagggaaagctgaagaaggttgcagtgattgcctgcatgcgcaagctgatcgtcattctcaacacgatgattgcacgcggcgagaaatgggatcccgcccgctatgcgttgcggtgaactgatcgagcgcgcctccatgcgctcggtcccggaccgagcgcatgccaagccgacagaccggcgagcggacggggtcaaggccgtcagccgccgaaggcgggggcgcgtcttcgcgccagccttgaggccggctgatcggcggtctatttcagcacagttg

SEQ ID NO: 1026 - DNA, 1540 bp, unidentified
  source 1..1540: mol_type = unassigned DNA; note = element_129ae6e
  misc_feature 1..2: note = core
  misc_feature 3..242: note = LE
  misc_feature 243..1418: note = CDS
  misc_feature 1419..1540: note = RE
  misc_feature 3..220: note = bridgeRNA
ctcgtattataaagtagtagtagaattgtcctagtccaaggaaatatgctacactgtaaaagatgctgtggattggtttctgacccccaccgcttgacggttttaatttaggctccaaccacagctctttgcagtattgttaatcagttagataccgctcgacggtttatttagaacgaggctacaagagcaaagagatttgtggatcatagcatcaagaataaataaccggaggtatcattatgatttgcgttggtatcgatgtagcgaaggacaaacacgattgcttcattctcagttcggaaggtgaaattctggcagatgttttcacgatccccaacaattcggtagggtttgacactcttttacagaccattcgttcttgcacgagcccccaagaaaaaataaaggtaggacttgaggctaccggacattacagttacaacattcttgggttcttgttagacaacggtctgaccacctatgtcctaaacccgcttcacaccaacctctaccgcaaaagtcttagtctcagaaagaccaagacagatcgaatcgatgcgcgaacaattgctactatgatcttgtctagagtggacctcaaatcctacacagacctatcataccacaatgaagagttaaaatcactaacaagatacagatttactaaagtgaatgaacgagcaaaattgaagcaatccgtttctcgcttggtcaccattctcttcccagagctggaaaagctagttccttcgcttcatatggcctctgtttatgctttattaagcgagtttccgggtgcacaccagattgccaactctcatctaactcgactgaaaacggtactctcgaatgcttcgcatggacgttacggtaaggaaaaggcgattgagattcgtgaggctgcacggaactctattggttctcgtagacgcgctgcgtccatggaattacagcacacgcttcttttccttgctacaatggatgttgtgattgaggaaatagaagtccagattcaagaaatcttggaggagattcaatccccaatgaccaccattcctggtattggcttccgcatgggagctatgatcttggctgaagtgggtgatttctcgcagttcagttctccagataaaatcctggcttacgccggtctctctccctctacctaccagtccggccaacttacaaatgctcactctcgcatggagaaacgaggttctaagtatttgagatatgctcttttcaatgctacgaaacttgtttgtcaacacaaccccatctttactgattacctgtccaagaagattgctgagggaaaacactactatgttgccatttctcatgctgctaagaagctagtgcgattaatctatgccatggagttgtcgggtgagtcctaccgaaaagtagcgtaagctagcttaatacaaacattttctagcaacgtcgttttcgacgttctatttctcatgccgttttgaggttggaagtttttcacaatatttttatttttggggcttgacttttgatagttagt

SEQ ID NO: 1027 - DNA, 1376 bp, unidentified
  source 1..1376: mol_type = unassigned DNA; note = element_12a37c6
  misc_feature 1..2: note = core
  misc_feature 3..547: note = LE
  misc_feature 548..1300: note = CDS
  misc_feature 1301..1376: note = RE
ctcctatgtttataaaggaagttaattcatatataaatttagcaagaataaagtgaaaaaagtgagagtacgcacgcaactaaataactctaaaagtatattgttggttagaaatcacctcactttttttatatcttttagagtttgaacagaatgtaaggaataattataaataattatatccagaatatccactaggagaaaaaacgaggaaagatactcactttatatgctattaaaaaccatgtaaaatgaaacaaatcttaaaacaagtcttgggtattgacgtagctcaaaaagaactagtagtaactctgggaaaaatgtataatgatttcacgttagatctttatgcttacaaagtctttaaaaataataaaataggttttgctgccttactcaaatggctagatccaattataaataaagagataaagctacagtttgtaatggaagcaacaggtgtttatcatcaaaaattcgcgtattatttagataaaaaaaatgtaatttaactatcgtattaccaaataagattagtaattatatgagaactcttaatgtaagaaccattactgacaaaacagcatcacaagccatttgtcaatttggtttagaacgaaaattagagtgttggacaaaaccaaaaaaagtattcaaaaagctacagcaacttacaagagagcgaagccaaatagtagatgaacgcgtaattgtaaagaaccaactgcatgccgaaaaaactgaagcagaacctaataaaagtagtttaaagcgtttaaaaactagaattgaatttcttaaccaacaagaaaaggagattaagatagaaattcaaaacatagtaaataaggatactcaattaaaaaaagaattaaaaaatatttgcacaattcctagtgtagggatgctaacagcggtaattgttatagcagaaacaaatggatttgaactgattagaaataaaaaacaaatcaccagttatgcaagtttagatataaaagaaaaacaatctggaacatctataagatctaaaataaggatatcaaaaaaaagaaatcgtaatttgagaaaagcgatacatttaccatcattatctgcagtaaaatataataaatcccataaagaattatatttgagattaacggctaaaagtggtgtaaaaatgaaaggactgattgctgttcaaagaaaattattagaattaatttatgtcgtttataaaaacaaagaaggtttcattcaaaattatgagcaacaaaaaagagcaactctattagaaatagaaaccgccctttagaaactagctcgaaaccgttttgaaaaataaaaatataaaaaaaatatgattattttgttgtaaattaacacagaat

SEQ ID NO: 1028 - DNA, 1415 bp, unidentified
  source 1..1415: mol_type = unassigned DNA; note = element_12b41dd
  misc_feature 1..2: note = core
  misc_feature 3..84: note = LE
  misc_feature 85..1113: note = CDS
  misc_feature 1114..1415: note = RE
  misc_feature 1156..1402: note = bridgeRNA
tgatgtggtggacggcgcccgctcccggcaacgacgtgccatagggtgatcgttgtgatcgaatcacatcagggagccgtccacatgcaaattacaacgatcggtttggatatcgccaagaacgtgttccaggttcacgggatcgacgccagcgagaaggtcttcgttcggaagcaactccggcgcagccaggtgctggcgttcttcaaagcgctgccgccgtgccttgtcggcatggaggcttgcggcacggcccattattgggcgcgtgaactcaagaagcttggtcaccaggtacggctgatgccggcgaaggacgtgaaggcttacgtcaagcgcaacaagaacgatgccgctgacgccgaggcgatctgcgaggcggtgcgacgcccgaccatgcgtttcgtgcaggtcaaatcggccgagcagcagggtcggttgatgcagcatcgaacgcgcgatcttttgatgcggcagcggacccaggtgatcaatgcattgcgggcgcatatggccgagctcggcattgtggctacgcaaggacgtgaagggatcaaggagttgctgacgatcattgcgagcgaagaggatgcgcgcttgccggtcgatgctcacgcgagcctcgtcgtgctggcggcggggcttcaggcggtgcagacgatgattggatcgatcgagaagcggatcattgttcagcatcgctcgaacgaggcgagcaagcggctcgagaccatccccggaattggtgttatcggggcgaccgcgattgcagcgaccgtcccggatccgaaggcattccggtcgggtcgtgatttggcggcctggatcgggctggtgccgcgccaagattcgaccggcggcaaacagaagctcgggccgatctcgaaacagggcgaccaatatctgaggcgcattctggtcgtcggagcccatgcggtgttgaggcgggcgcgccagcagccggagaaatatccttggctcacacagcttctcgcccgcaaaccgttcaaagtggtcgcggtggcgcttgccaacaagatggcgcgcatcgcttgggcattgctggccaagggcggcacctatcgggcgcctgcgcttgcggcaggggcgtaaggagtctggcgatgggaggatgaggttgcgtccgtgcgtacacgaactgcaggggtgatgacgacattgatgcgaaacggtcgagaccgtcgattgggaaaactcgtgaagggccacgcgatacttgagcgcgcgcttttggttgggacccgatcagcggatcacatcagggccagcggccattgcggctgcatcgcaatggaggtcagtcctccattcgaaaacaggccggatacatggctgcacccgaacgcttcgcagataagtcagattcctcttgcaccgcgggcgccgtccataca

SEQ ID NO: 1029 - DNA, 1438 bp, unidentified
  source 1..1438: mol_type = unassigned DNA; note = element_12b9d36
  misc_feature 1..2: note = core
  misc_feature 3..82: note = LE
  misc_feature 83..1186: note = CDS
  misc_feature 1187..1438: note = RE
  misc_feature 1256..1377: note = bridgeRNA
taattggatggactcgcccaggccgaggcgtcagtgcgccgcggtggcagtctaaacagccaacgacagcgagggcgagtccatgaaaaagcatacgacgggtaatcagtctttgtctccatccgatcttgcggcgtgcactacggtggcggccgatctggccaagcgggtcttccagatcgccggcgaagatgcgctgggccaggtgctttatgaagagcgcatcaagtcgcgtgaaggtttccatgcctttctctgcaagctagaaccccacgttgtcgttctcatggaaaccggtccgggcgcccaggcctgggcgcgtcagctacaggatcagggcaatctggcgcgaatacttccagccggtcgtgtggccgatcatcgcagcggcgccaaaaatgatcgcaatgatgcacacgcaattttgcgtgccggtcgcgacgacagaatttcggcggtgcctatcaaaaatgctgcagagttggccatgcaggcactgcaccgcatccggcaaggctgtgtacgtcgacgcacggcggtgggtaaccaaatgcgcggtttactgcttgagcacggtgtggccatggcccaaggcgaagctgcgatcattcagaaagtacctcgggttctggaagatgccacccaaccgttgccggatatgttccgcgaattgatcgatgagttgctggccgaatggtgtcatctgggcgaacggatcaggggcttgaccgggcgtctggaggaggcagccaaacaggacagaactaccatgcggttgatgaccatacggggtgtcgggccgatcattgccaccgcgatagtggccaagcaaacccggcccgagcgattcgccgatgcccgcatgtttgcagcttacttcggcctggtgcctgatcaaaacagctcaggagagcgggttaggctgggtcgaatgaccaagcggggtgatagctacatccgcagcctggcgatacagggcgctcatgcggtgttgcggcagctgcggcacgattccgatcagccggatgaccgtcggctgctgcaatggctgaaccacctggggagcaaaaaagctgcggcagggttggcgaaccgcaacctgcgcattatctggtcgcttttacagaatgatcagacttatcgccgtgaaccgtccaacaggcaggagacggcgatgagtcactgactcaaagagttctgccaccggggcgcgaaggcgctcctgcccctgctgaaaaacattgaccccaggtaagaccgtcgcggattgatgccttggctcctactggcccttgaggcctgaatgtaatgggcataccgcgagctcaaccaatgttggccagaagcccagagcggcttcctcgaacaggccttatacatagatgcaaccgggtagcagtgtttaaaagcgggtagacagtggaggcgagtccataca

SEQ ID NO: 1030 - DNA, 1274 bp, unidentified
  source 1..1274: mol_type = unassigned DNA; note = element_12bf355
  misc_feature 1: note = core
  misc_feature 2..240: note = LE
  misc_feature 241..1194: note = CDS
  misc_feature 1195..1274: note = RE
  misc_feature 22..237: note = bridgeRNA
cgttactttcttcgtagcccttgttcgtgtagttatgtgagggtgttggcctgtcaggcccggtatggttcttgcccccagtcgcccatgatccggggggtgttgtcactgggtctgactggcatcaggtgatcgctgataggggctggaccgggacgtgtcccaggccgttcgtaacgtggatgtcgagacttgatgccgcggttcaggccgacttgtggaacctgagacggaggattcatgatcgagagctacgacagcgtcgacgtcttcattggcgtggatgtcggtaagggagaacaccacgcggtcgcccttgaccgggctggcaggcaactcttcgacaaggcactgcccaatgacgaagcgaagctccgcgagctgatcgggcagctgaaacgacacggcctggtcttgttcgtcgtcgatcagcccgcgaccatcggcgccctgccgatcgccgtcgcgcaatcggaaaatgttctcgtgggctgtctccccgggcgggcaatgaggcgcatcgcggatctgcacgggggcgaagccaagaccgacgcccgcgacgcggcgatcatcgccgaagccgcgaggagcctcccgcatgctttgcgttcactgcagctggccgatgagcaggtcgctgagctctcgatgctttgcggtttcgacgacgatgtcctcggccagatcacggccacgagcaaccgtattcggggcctgctcacccgggcgctgggcgagcagaccgtcgtggtgacgggcacgaacgcgaccagcatcgtgctccccaagcttgccgaacagctcgccgcgctccgccggcaacgggacgagatcgccgtcgaagtcgagcggctcgtggaggcgcaccctcttcaccccgtcctgatcagcaggcctggagtcggggtcgggaccgcagccagactcctcaccgaagtctccggcaaggacttcgcgaccgccaaccacctcgccgcctacgctggcctcgccccggtgaccaggcgctccggcagctccatccgcggcgaacatccctccgggcgaggcaacaagatcctcaaacgggcgatatttctctccgctttcgccgccctccgcgacccggtctcacgggcctactacgaccgcaagatcgcccagggcaagcgccacaaccaagccctgatagccctcgcccgacgacgctgagacgtcctctatgccatgctgcgcgacagcaccatctatcaaaccgaccatcaaattgcggcttgacaaaaacatacggg

SEQ ID NO: 1031 - DNA, 1489 bp, unidentified
  source 1..1489: mol_type = unassigned DNA; note = element_12d66ed
  misc_feature 1: note = core
  misc_feature 2..142: note = LE
  misc_feature 143..1192: note = CDS
  misc_feature 1193..1489: note = RE
  misc_feature 1226..1485: note = bridgeRNA
atggtatggacgcctcccccctcgctgatcgactgcgcgtggtggagaaacaagtgatgaatttgggggcctcgcagtcgacggcatcaagtgccagagtggaagttcgacgtagtaaccactctcagacggaggccccgaaatgaatcgtacgacgtatggcttggacattgcaaagaacgtgatgcaacttcactgggttgatggcgagacgggcgagatcgagcgcaagaagctcgctcgagccaagctgagcgaattcttcgcgcagcggcaaccggcgcgcgtggcaatggaggcgtgcggcagtgcgcaccattgggcgcgcgtgctgggcggcctgggccaccaggtggagttgcttccggcgcgacaggtgcgtgcgtttgtgcgcagcaacaaagatgacgcagccgatgcacgcgccatctggctggcggcgcagcacacggacatccgtcgtgcaccggtcaagaccctggagcagcaggcggtgatgtcgctgcaccgggcacgttcgcactgggtgagcgtgcgcacggccacgatcaacatgctgcgcagcttgctgtatgagttcggagtcgtgctgccaggcggcaagaaggcaggtttgaagacgatcagcgccaagcgcgcggagatcgacgtccaactgccgcagccgatgcgtcggctggtcgacctgcagctcgagacgctcaagggggtcgatctcagcatcgatcgcctggacgctgagatcgccgagcaacaacgccagcttgccgcggcacgcacgctgcgagaagtgccgggcattggcgtgctcggcgcgacagcgctggccgccacgctgggtgacgcgagcggctggcgctcgggacgggagtttgcagccagccttgggctggttccatcgcacagcggaacaggcggcaagacgcacgtgggtcacctgagcaagcgcggtgacccctacctgcgcaccctgctcattcacggtgcacgcgcggtcatcgcccaggcgaaggtaaaacccgcatggctcgaagaattgctgcgacgccggccactgaacgtagcggtggtggcgttggccaacaagatggctcgcacggtctgggcgctggtggcgcacgggcgggcgtaccgatcggagtggaagagcactccgccaagcggctggggcgcgcaagcgcagacagcttagatcaacaacctgagacaacaacctataggagtggaagccgcaaagagtgcgtgagtcgagtcgatgaagtgatggtggagcggtcggaccgcgggtcgggtaaagctgaatgtttgtctgggcaagcctcgtgccaagcccgccacggagatgagcaccgaccccgcgcatgaccatcaaggccagcgggcgggcttgggtccgatctgcacaaacaggccggatataagaccgcagtcattaccgccccagtcagaacttcaaaaactcgcttgccacacgggaggcgtccatata

SEQ ID NO: 1032 - DNA, 1211 bp, unidentified
  source 1..1211: mol_type = unassigned DNA; note = element_12d916c
  misc_feature 1..2: note = core
  misc_feature 3..267: note = LE
  misc_feature 268..1119: note = CDS
  misc_feature 1120..1211: note = RE
  misc_feature 12..189: note = bridgeRNA
cttgtatctttcctccggtggtgattagctatcaccaccgcgcgccgatgaccgcgagttggtgcccaaagcgaggactttgtgggacagatagcggctcggcagcgcactgctgggccggcgagacactggacggtatcgtagggcgaggaccctgtatgtacaaggcaagtgggcgcagtggctgacagcagtttgttatctgcaggaggccaagtccatgttttcataggtattgatgtatcaaaggccaagctggattgcacgttgctgacggctgaggctgacaagtgtaagaccaaggtggtggtcaacaccgccgcgggcgtacaagccctgctggcgtggtgcgccaaacacggcgcacagccggcgcagttgcacgccatcctggagcctacgggtctgtatcacgagcaagcggccacggcgctgccccaggtccgggtctctttggtcaatcccgcccaggcccgggactttgccaaggccttggcgctgcgctccaaaaatgatgcgctcgacagctacgtgctggctcgctatggacagacgctgagcccggcgctgtggcacccggcgcccttgcatgcgcgtcaactgcgcgccttgttgacgcgacgcgaggcgctgagcaaggatctgttgcgtgagctcaatcgcaaagagaagagccagttcagcccctcggcgcccttggtcgatggttccatcgacaaggccatcgcgttcttgcgcgaacagatcaaacaaatcgagcgggcgatcgatcagcacatcgacaaccaccccgacctcaagcaagactgcgagctgctgaactccatccccgccatcgggcctcaggccggcaacgccatcctggccgtcatgcacaatcggcatatcgactccgcccagagcctggccgcctatctcggggtggtccctgtgcagcgccaatccggcagcagtctgaacagctgcgcacgcctgtccaaagccggccctcccaggtgcgcgccacgttatacatggcggccctggttgggacccgccacaacccccacatccgcgccctttaccagcgcctgctcaaagcaggaaaaagcaaaaaggccgcgctgggcgcggccatgagaaaactggtgcatctgtgcttcggggtcctcaaaaaccgcatcccctaccagcccaattacgccatgaacggttgactgccaagacggtat

SEQ ID NO: 1033 - DNA, 1413 bp, unidentified
  source 1..1413: mol_type = unassigned DNA; note = element_12dc666
  misc_feature 1: note = core
  misc_feature 2..89: note = LE
  misc_feature 90..1124: note = CDS
  misc_feature 1125..1413: note = RE
  misc_feature 1175..1405: note = bridgeRNA
caatgggatggactcctcctcccctaaacggcatcgaggtgccagactggaagtgttaatcaccagtcaacagagaaaaggagtccaccatgaacaagcttagtcgggttggtattgatttggcaaagaacgtctttcagatacacggtgtggatcggcacgacaaggtcgtatggcgccgacggttgacgcgtgacaagtggctcaatgcgttactggaaaagatagatccaggctgcgagattggaatggaagcctgtgcgggagcacaccactgggcacgcgaaatgcaggccgagggttttaccgtaaagctgatagccccgcaatttgtgaaaccctatgtgaagagtaacaagaacgatgccaatgatgccgaggcgatctgcgaagcaatgagcagacctaacatgcggtttgtggccgtcaagacagtggagcaacaggatattcaggcggcacatcgaattcgcaccgagttaatcggacaccgtacggccaaggccaaccagatcagaggcctggttgcagagtatgggatggtggccccccaacaattggcgcgcttgcgagcggcggtaccgaattggctagaagatgccgagaatggcttgacgagccgcttccgctgcttactggctggcctgtggggggacctgaagactctggatcatcgtgtggcggaacttgatcacgagattaatgtgattgctcagagcgaccctgtcgcaaagcggctgcaacaacttcgaggtattgggccgatggtcgcgacggcactggttgccactgtgggtaatgctgagcagttcgctaatgggcgacaaatggccgcgtcactgggactgacgcccaggcaacacagttctggcggtaaagaccggatactgggtatcagtaagcgtggcgatgcccatctccgaagcatactgattcatggggcacgatcggtaatccgaacggccaaggccaaggatgaccgattaagccaatgggtaacgagccttgcggaaagacgccacccgaatgtggccgctgtagcattggccaataaaacggctcgcattgcctgggccatgttgaggaatggtacggactatgaacctgactatcttgtggcttgacgcatcacacaggttagatgactggttaatcacactgtaaacaggagtacttcaaccacgattgcaaagcaagccgaacgatggcgaacaggtcgaaccggcgccggtagaacccgaaaaggtccgggtgcgagaagcacgagaactcgatggggagctggcgcgcgaatagcccattatggcccggcatcggtaaactggtgccacagttagaggccggatatacgtgagcagtcgtacctcatcgccatagaacggagtgcttgcaaaccgaggaggagtccatata

SEQ ID NO: 1034 - DNA, 1507 bp, unidentified
  source 1..1507: mol_type = unassigned DNA; note = element_12dd1fd
  misc_feature 1..2: note = core
  misc_feature 3..172: note = LE
  misc_feature 173..1222: note = CDS
  misc_feature 1223..1507: note = RE
  misc_feature 1247..1505: note = bridgeRNA
agatggcatggacacctcccacccgaagaaccgacgccgaggcattcgaaaggccgctgaataccgctgagcaaggagaaggcaaggccgtggcgggggtggggcctcgcgtcgcacggcatcgagtgccaaagtgaagttcctgatgaacttcggcagacggaggccccgaatggatcgtacgacttacggtttggacattgcaaagaacgtgatgcaactgcactgggttgatgccgagacgggcgagattggacgcaagaagctggcgcgggccaggctggcggcgtacttcgcgcagctgcagccggcgcgcatcgtgatggaagcgtgcggcagcgcacaccactgggcgcgggtgttcacggcgctgggtcaccaagtggagctgctgccggcggcgcaggtgcgagcgttcgtgcgcagccacaaggacgatgcggccgacgcgcgggccatctggctggcggcgcagcaaggcgacatccggcgcgtgccgcaaaagaacgtgcagcagcaggcgatgctgtcgctgcaccgtacgaggcaacactgggtgagcgtgcgcacggccacggtgaactcgctgcgaggattgctgtacgagttcggcgtggtgctgcgcggagggcgccaagccgggctgaaggcgctggccgagcagcgagccgcgatcgacccgcagttgcccactgcgatgcacagcctgctcgacggccaattgcacacgctcgaactgctgcagcagcgcatcgacgcgctggagtgccagatcgcggcgctgcaagggcagctgaagggcgcgcccgagctcgaccaagtgcccggcatcggcgtgctcggcgccacggccctggccgccacgctgagtgacggcaaagcctggcgttcggggcgcgagttctcggccagcctgggactggtgcccgcgcactctggcaccggcggcaaggtgcgcgtggggcacctgagcaagcgcggcgacccgtacctgcgcacgctgctcatccacggggcgcgctcggtgatcgagcacgccaagcaccagcccaagtggctcgaagagctgctggcacgccggcccaagaacgtggcggtggtggcgctggccaacaagatggcacgcacggcctgggcgatggtcgcccatggccgggcgtatcagcgggactggaagagtgccaggcccgggagcgcggccgcgcaagcggcaggcgcatagatcaacctcacagacaaaggagtggacgccgcaaagagtgcgtgagtcgagtcgatgaagtgatggcaaagcggtcggaccgcgggccgggcaaagctgaatggtttgcaggggcatcgctgatgcaaaccccgcgacggagatgagcaccggcctcgcgaatgaccatcaaggccagcggcgggctcgtcccggctgcacctcaaggccggatgtaagaccgcagtcgtatccgccgagtcagaacttcaggaactcgcttgccacacgggaggtgtccatgta

SEQ ID NO: 1035 - DNA, 1385 bp, unidentified
  source 1..1385: mol_type = unassigned DNA; note = element_12f56cb
  misc_feature 1: note = core
  misc_feature 2..87: note = LE
  misc_feature 88..1134: note = CDS
  misc_feature 1135..1385: note = RE
  misc_feature 1146..1383: note = bridgeRNA
taatgggatggtccgtcccgctcatcaaacggcatcgcaatgtgccagaatggagatattccaaacgaagaaggagcgagacgaaccatgaacaagtatagcgatcagaaaagcatcaaggtagtgggcatagatttggcgaagagcgtatttcatctgcatggattggataaaagcggtcataccatgatgcgcaagcggctgagtcgtcagaagctgattgagttgatggcacagcttcccccgtgcctggtgggtatggaggcgtgtggaggctctcacgactgggcacgtagattaatggcgatggggcatgatgtccgactcattagtccccagtttgtaaagccgtatgtgaagagcaacaagaacgatgcggctgatgccgcagcgatctgtgaggcggtgcaacgtccggatatgcgctttgtgccgatcaaaagtgttgagcagcaggatatccagagcctgcaccgtgcacgctcactggtcgtatcgcatcgaacagcacaggcaaatcagatgcgtggtttgatgctggaatatggtgtggttatcgccaaaagcgttgctgcattgcgtaaagcagtgccggaaatcctggaagatgcggacaatgctttaacacccatgttcagagagcttctctgtggattatgggaagagatgctcaggctggatcagcgtatttcgacttatgatgcagaaatcaaacatctgagtgaacagagcgaggtgtgtaagcgactcatgacgattcccggcatcgggccaatggtatccaccgcactggttgcggcagttgctgatggcaaagcgtttaagagtggtcgggagatggcggcatggttagggcttgttccaagacaacactcaacgggtggtaagccgaggcttctgggtatcagcaagcgaggtgatgtctatctgcgcaaactgctgattcacggtgcacgggcagctctgcgctgggcagacaggaagcaggacaggcgtagtcgatgggtgagtgatctggcaaccagacgaggtcagaatatcgcagcagtagctttggccaacaagacagtacgcacagcctgggcactgatgaccagagaagaagagtacagaactgctacagcaacggtttaagagtagaaaggagtttcaagtaaattgcgcggattgagtgagtgatggcgacaaaggcagatagctgcatttccacaagcctgacggggacacgggtcaatatagaccgttattgtgatgaggccggaaatgtgcagcgaattccatcggggccagaagctacccagcttcaaacaaaggccggatatatgtatgcaattttcctttaaagccgatcaaacttttccttgcaatgcgggacggtccatata

SEQ ID NO: 1036 - DNA, 1225 bp, unidentified
  source 1..1225: mol_type = unassigned DNA; note = element_12f6856
  misc_feature 1..2: note = core
  misc_feature 3..239: note = LE
  misc_feature 240..1214: note = CDS
  misc_feature 1215..1225: note = RE
  misc_feature 6..212: note = bridgeRNA
cttgtatgtcgactagcccgcatcagtgggcgatagtctccgactgatcatcggaaggagggcctggaagacgactcgctccttaggcttcgagcctgcatcgtagatagtgctccggccctccgcactcacccagtgaatccgaacggtatcttgagcccgcattacgcgagagctcgtattggcaaggttggatcgggtgtagtgatgatcgacgagcattcattgaggaggaccctatgcccatcgttgtcggcgttgatattgccaaacggacattcgatatcgccctgctgcaagccaatggcaaataccgcaccaagggcaacctgagcaatgatccggctggtttcagggcgtttacccagtggctggaaaaatatgccgagccgggggcctgggtcgttatggaggcgaccaacgtgtaccacgaagcccttgccgatcatctggtagggctgggttatcggctgtgcgtggtcaatccggcgcggatcgccagctatgcacaaagccaactgcagcgggtgaagaccgacaaggtcgatgccaagctgatggcgctgtttggtacgcggcacatcgacgaactgcagccctggcaacccgagccgccggcccggcggcgcctgcgcgccctggtgcggcgctacgaagagctcaaggagctctaccggatggaaagcaaccgcctggacacggccgagtccagcgtcaaggaatcgatcctttcggtgatgacccacttggagcggcagatcgaccagaccctgaaagcaatccaggaacagatcgacgacgatcctgacctgcgcggcaagcgcgatctactggtgagcatcgacggtatcagcgacaagaccgctgccttgttgctggcggagttgggcgacctctcacggttcgacaatgcgcgtgccgtcgtcgcctttgccggcctgaatccacgcctacagcaatccggtagccaccaggggcaggtgcggatctcccgcatgggctcggccaggctgcgggccggcctgtacatgccggccatgtgcgcgatgctgcacaacgcagcggtaaaggccctgcgcctacgtctgcaagagaacggaaaaaccggcaagcaaatcatctgcgctgctatgcgcaagctgctccatatcgcctatggcgttctcaaatcaggccagcccttcaaggcagaactggccttgcccgctcgctagagacacggtat

SEQ ID NO: 1037 - DNA, 1434 bp, unidentified
  source 1..1434: mol_type = unassigned DNA; note = element_1308ee0
  misc_feature 1: note = core
  misc_feature 2..139: note = LE
  misc_feature 140..1159: note = CDS
  misc_feature 1160..1434: note = RE
  misc_feature 1196..1431: note = bridgeRNA
atggtatggacgcctcccaccttaggggtggagtagacggatgagcttgtcgaggaagaggaccctccgtgccgacggcatcaaagtgccttagtgtggaaggtgttcagactttcacaggctaccggagggtccagagatgaaggctaccgtagttggagtggatatcgcaaagcgggtgtttcagctgcactgggtagagcccgagacgggcgagatcatgtcgctgcagctaaagcgggagaggtttttggagcattttgccaatcgggcgagctgcgtggtcgggatggaggcgtgcggaggctcccagcactgggcgcgctcgctgcagaagctcggtcaccaggtcaagttgctgtcggcgcggatggtcaagccttttgtggtgggcaacaagaacgatgtggccgatgcccgggcgatttggaccgcagtgcagcagccgaagatcaaggcggtggcggtcaaaaccgaggagcagcaagcggtgctggcgctgcatcggatgcgcgaacagctggtgaagttccgcacggcgcagatcaatgggctgcgggggctgctgaccgagtacggcgaggtcatgccgcagggtcgagcggggatcaagcgggatatccccggggccctgggccgtctggcgggtcggctgccggcgatggtgatcgacaccttgcgcgagcagtacgcgcgcttaagcgagctggatgagcaagtcagccagatcgagcggcggttacggcagtggcagcgtgaggacccggcggcgcagcgcgttgcggcgatcccgggggtggggctgctgagtgcaacggcggcgattgcgacgatgggtgatgcccgagcgttcaagtcaggtcgcgagtttgcggcctggctggggttggtgccacggcaaacgggcacgggcggtcgagtccgattactcggcatcagcaaacgcggtgacaagtatctgcgcacgctgctgatccacggcgcccgcgcggtgctcacgcacaccaaagcaccgcccgagtgggtaaccgaattagtgaagcgtcggcccaagaatgtggctgtcgtggcgatggcgaacaagatggcacgcacgatctgggcgctcacggctcatgagcgggcgtatcaatccgggtacgtgagtcagccggcatagggccgagatcacgttgatttaaccaccaacaaaggaaggtacgccaaaaggttgcgcaaggactacaacgtgtgatgggaaacaggtcagaccgtgacccgccaagcctgcatgtctgtccgagcttagagctctcaggagaaatgaggcgcgggtcagcggaatccatcagggcccgcaggctttggcctgcacaacaggccggatataaacctgcagcctcatctgtcgctcatcacgccacgaagtccttgccatcgggaggcgtccatata

SEQ ID NO: 1038 - DNA, 1332 bp, unidentified
  source 1..1332: mol_type = unassigned DNA; note = element_1310de4
  misc_feature 1..2: note = core
  misc_feature 3..76: note = LE
  misc_feature 77..1114: note = CDS
  misc_feature 1115..1332: note = RE
  misc_feature 1089..1317: note = bridgeRNA
agataattggactcccccagctcatagagctgggttaatattttagttctcacacaaaaatattttggagtccaacatgcacaatataatcgcaggtgttgatttagcaaaagaagaaattcaggtttgtgtttgtaaacacaacaaggtgcagtctaatcgggcgcagacaccgacacaatttgcttcttggttagcttcatcaaaacccatgactattgtatttgaggcatgcagcacatcaaattattggaaacaaatcgcgctaacacatgggcatgatgcacgacttatttcagccaaacttgttgccagtgtgagacaaaaccaaaaaacggataaaaatgacgccttagccgttgctcaagctgctcaactcactgatgtttcatttattaacggtaaatcaaaagagcaacaagaactccaaacgttagctcgcttacgagaacttgccgttaaacataaagtggcgatgcaaaatcagattaaatctttattattagaatttaatatcagggtgtcacccagccaaggcggcttaagccgtgtcgttcagggagttctggaagatgctgaaaatggcttctccatggtctttcgggaagcgttaaatactggatggcagcaactcctactcagcattgaagcgatacacaaatatgatagttatttagagaaagcggcaaatcagcatgtgatttgtaaaactttacaagcattggaaggcgttggcccactgaatgcgatcaatccctatattgctctcggttgtggggaaatggggcaatttaaaaaaggccgggatgcttctgcctgcattggtttaaccccagttcaacatacttccggtggtaaagtgaaactcggctctgtgggtaagtacgttcaaaataacacgattagaagctgcttggtgagtggcgccatgtcagcagttaaccatgcaacccgacgtacggcaaaaacaaagaaagacctatggatacaacaaatggtcgaacgtagggggaagcgctgcactgctgttgcgttggccaataaaacagtaagaactgcctttgccatgctagcgaatggaacagaatataaagcagaacttttggctgcttaaacaaggtttgtcaaacaacgataatgctcgataaaagatgaaaatcagcttgtttagtcagtgcttcgctcagagcttttagctcgctatcgagatttgacaacaagttcgcgtaaatatcatagagccagggatagctacccaattagagctcgtacataagcacgcatttattctttcattgatattaatgttgttgacaagggggagtccacata

SEQ ID NO: 1039 - DNA, 1211 bp, unidentified
  source 1..1211: mol_type = unassigned DNA; note = element_1311286
  misc_feature 1..2: note = core
  misc_feature 3..217: note = LE
  misc_feature 218..1189: note = CDS
  misc_feature 1190..1211: note = RE
  misc_feature 12..191: note = bridgeRNA
cttgtatcttgatcgagttgatggttagctaccgtcaactgaggtgaagaccagcttgagtccaccctgaaggcagtgaccttgtggcgtagattaagcccttcacctctccccaccccattactgaacactggacggtatccaagggcgtcgaccctgcatgtacaaggcgagtgtgggagtggacgagggacaatcaagactacaaggagaaacgatgttttatcttggtgtggacgtttccaaagcaaagctcgactgcttgctcctcgacagcacgactggcaaggtcaagtcgaagtccattcagaatacgaatgccggcttcaaacaactgatcgaatggctggccgaaaagaaggcacctaacgcgcatgtcatcatggaaccgaccggggtgtatcacgagccggctgccctggcattgaccgacgccggcctcatgctatcgctggtcaatccagcccagctacgccagttcgcccaaggtctgggcgtcaaaaacaaaactgataaagccgatagcagtgtgctggcgcgctacggcgaaactttgaagcccgaagcatggcagccgccctcgaggtctgctcgccacctcaaggcgctactggcccgccgcgacgccattgcagacgatttgcagcgcgagcaaaaccgtcaggaagccattgagttcgcgatatcgccggacgaagtcaaggagtccatcaatcaatctatctcgtttttaaaggccgagctcaagcggttagacgaaacaatcaaagagcatatcgacagcgatcctgatctgcgcggcaaaaaagaactgttagagacgattcctggcgtaggtgaacgggtatcgagcaacctgaccgcactattttctgccaaaactttcgacagtgctgaacaactggctgcctatctcggtctcgtgccagtacagtgggaatctggtacgtcggtgcgaggccgtccacgcctgtccaaagcaggcccatcgcaccttcgcaaactgctctacatgcccgccgtcgtggcgcggcagtggaatccgcacatcaaactatttagcgatcgcctgatcgccaaaggcaagagcaagatggcggtaatcggcgcctgcatgcgcaaactggcccacctgtgttttggagttgtacacacgggtaagccatacgacccgaattacgctatgtgatgcttgacggacgagacggtat

SEQ ID NO: 1040 - DNA, 1227 bp, unidentified
  source 1..1227: mol_type = unassigned DNA; note = element_13182e8
  misc_feature 1..4: note = core
  misc_feature 5..371: note = LE
  misc_feature 372..1043: note = CDS
  misc_feature 1044..1227: note = RE
  misc_feature 1..191: note = bridgeRNA
ttccgtaggactgagcacggcccgggagggccgggtgtggctgagatcgccttgcgtcaagtcgcttactgggaatgtccgcccgactctccggggcgccctggctgctaattgagatgtgcgctcggtcgctggttacggatgcgtcagcggggtgtcccacggggccgctagcgatcggttgaacagcaaccctagggacggagagacagcgcgtggcagcgttacgggaccaggcattcatcggactagacatcggtaagacccaccattgggtgtgcgcactgcagcgcctatccaggcgaaggcaagaccgacgccaaggacgcctacgtgatcgccgagaccgcccgcatcagagggatctgccgatgatcgaccaggaccccgatctagtccgaaacctcgccgtgctgaccgggtaccgagcagatctcgtcgccgaccgagtgcggatgatcaatcggctgcgggacctgatgaccagcgtgttcccaagcctggaacgagaattcgactactcctcgcacaagggagcgttggtgctgctcaccggctatgcgagcccagatcggctccgccgcgttggccaaacacggctagccggctggctacggcatcggaaggtgcgtgactacgccaatatcgctgcccgcgccgtcgacgcggccaaggcgcagtcgatcaccctccccggccaagacctcaccaccaccatcgtcgccgagctcgcggccagcatcctcgccctcgatgaacgcctgaagaccctcgacgagcagatcgagcagactttcaaccagcatccgcaggccacgatcatccagtccatgcccggcttcgggccgttcctcggcgccgtactgctggtcggtgccggagacctgcgcgccttccccagcgctagccacctcgccgcagctgccgggctggtccccgttcccaacgattccggacgcagaaccggcaacctgcaccgtccgcaccgatacagccgccccccttaccacacgtgttctacctgtcagcgcaaaccagcatgatgcgagccggacctaaccgcgactactacctcaagaaacgagcgcacgggcacacccacagcaaagccgtaatatccctcgcacgccgccgagtcgatgtgctctggtcactgctgcgcgacaaccgacattgggtcaccgaccctccacagcatgcgcaggcggcttgacaacatcattgaga

SEQ ID NO: 1041 - DNA, 1390 bp, unidentified
  source 1..1390: mol_type = unassigned DNA; note = element_131f871
  misc_feature 1: note = core
  misc_feature 2..88: note = LE
  misc_feature 89..1123: note = CDS
  misc_feature 1124..1390: note = RE
  misc_feature 1160..1382: note = bridgeRNA
caatgggatggacgcccccgcccataatcgtatcgccgtgccagagtgagtggtgtcaccatccacttgcacgaaggggtaatcagccatggaaatcagaactgttggtatcgacctagccaaaaacgtgttccagatccatggcatgaacgagcgaggcaagcccctattgcgcaagcaactgaagcgcgatcaggtggcagtattttttgccaacttaccgccctgcctgatcggcatggaagcttgtagtagtgctcattactgggcccgtacgcttgaaacgcttggccataccgtgcgactcatggccccgcaattcgtcaaaccctatgtcaaaagcaacaagaatgatgcagcagatgccgaggccatctgcgaggctgtaactcgtccaacgatgcgttttgtgccgattaagaatgttgagcagcagtctgtattggccttgcatcgtgcgcgtcagggattcgtgaaggcacgcacagcccaggccaatcaaatccgagggctgcttgctgagtttggtctgattgtgccgcaaggaatcgcccacattactacgaggctcccgagcgtaatcgaaggcgcggctaatgagctgccggtctcattccgtcagcttattgagcgactgatcgagcacttcaaggtgctggataaagaggttgaggagcttgaagcgcagatcaaggcgtggcaccgagccgacgagatcagccgccaattagaaagggtaccaggcattggcccgctgactgctagtgcgttagtcgcctctatcggcgatgcgaagaactttaaaaacggacggcaattagctgcctggttaggtctcgtgcctcggcagcattccagcggcggaaggccaacgttgctaggcatgagcaaacgcggcgacgcgtatctgcgaaccttgatgattcatggctcccgctcagtgatctatcgggccggccagaaaaacgatcccgatagctggctggtcaagttaatcaaacggcgcaatatcaatgttgctgccgtggccttggcaaacaagacggccaggatcgtctgggctttactgaccaacaaaagcgagtaccaacctgattaccggcattcattgacgactgcatagacgagtcttcggagtttcatcgacgtagatcacaccaccgattgcacaggcaatcacttagtgatggcaagacaggtaagaccgtggtcggcacaaccctcgccggacgaggcacttagagtgcgtgtaagcgattgaggcgctgaccagcagaacccatcagggacagcgagcacgtctcgtagtgaaagtccggatgtacgggtgcaatctttaccttcaaaccgtttctaaatgaaagcttggcaaacagggggcgtccatgta

SEQ ID NO: 1042 - DNA, 1322 bp, unidentified
  source 1..1322: mol_type = unassigned DNA; note = element_1320b3f
  misc_feature 1..2: note = core
  misc_feature 3..67: note = LE
  misc_feature 68..1078: note = CDS
  misc_feature 1079..1322: note = RE
  misc_feature 1057..1309: note = bridgeRNA
cgttggggtggacggccccgcggcatctggtgccaaggttcgctgtcgaagtgaacaggagccgtccatgaccgagcttacccgcattgcgatcgacacgtccaagtccgtcttcaccctgcatggcacggatgccgacgggcgggcggtgctgcgacgcaatctgcgccgccaggacatggtgccattcttcgcgcgccgaccgccgatggaggtggtgctggaggcctgcggcggctcgcatcactggggccgtgtgctggctgggctcggccacacggtgcggttgatcccgccgcaatacgtcaaacccttcgtcaagcgcggcaagaacgatcgcaacgatgccgaggcgatcagcgaagccgcggcccggccggagatgcgcgaggtcgcggtcaagtcggcgaggcagcaggccaacgcgatgctgctgtcggtgcgcgagctcctggtgcgccaacgcacgcagctggtcaacgcgctgcgcggacacgcggccgagttcggtcatgtcggccgccttggccgccaaggcgtggcaaagctgctggccgacgtcgccgaggacgcggagctgccgacgccggcgaaggacgcattggcgttgctgggcgccgagatcggtcggctggatgcgcggctggccgaggtcgacgcccggctggtggcgcaacacaaacagacgccaaccagccagatgctggcggaggtgccggggatcgggccgatcggcgcgctgagcctggtgctgcgggtcgacttcagccagttcaagtcggggcggcatttcgcctcctggctggggctgactccgcgcgagcattccaccggcggcaagacgcggctgggcgggatcagccgcgccggcgatgagcggttgcgccagctgctggtgctgggagcaaccgcggtgatcaggcaggccaagccgggaagagcctcggcttggctcatcgctttgctggcaaggcggccgcgcaagctcgcggcggtcgccctggccaacaagatggcgcgcatcgtctgggcgatgatgacgcgcggcgaggcgtatcgccagccggccaccgcctgaccactctttgatgccaagggtgcagggctgaggaagagagatgctgatcggtcgagccgacgatccacagaacccgggtagcccggtggccatcaaggccgctaatccgtttgggcgtggatcgcggaacccatctgggccagcggacatcgtgccgcgcaaaacaggccggacacacgactgccatcgcaccagatcagattttctccccctcaccccttgcacccagggggccgtccacaca

SEQ ID NO: 1043 - DNA, 1349 bp, unidentified
  source 1..1349: mol_type = unassigned DNA; note = element_132ab26
  misc_feature 1: note = core
  misc_feature 2..278: note = LE
  misc_feature 279..1325: note = CDS
  misc_feature 1326..1349: note = RE
  misc_feature 20..267: note = bridgeRNA
ctgtgagtgtgggcatgtcggtaccggccggtttggctggggccggccagggttggtgcctggtggcgcccggtgactcctagcgtgcccggccgtctttgtggcgtgccttgctaatgacatgtcccgggtgctgccagcaccggcctggccaccctcgactggcctgatcaggagcttgtccggtccttgggccgtgactcatcacaggattgccgcgggagtttgcctccaggccggtgccgctgttccagcatcgcaccgactgaggagacgcagtgattcttgccgcggaagccgacatgatcatcggggtcgatacgcacctggacacccacaccgcagctatctgcgacgcccggggccgggtgctctggcagttgcaggtgccggccacggcggcgggatacgcccgcctgctggcctgggcccgttcggttgccggcaacagcccggtgatgtgggcggtcgaaggaacccggcactacggcctcggcctggcccgctatctgaccggagccggtgagcaggtcagcgagatcgacaacagccgccacgtgggcaagcgccgggccggcaagagcgatgcgatcgacgccgtccgtgcggcccgcgagctgctggcccgcccgcacccggcgcagatgcgcgccgacggggaccgggaggcgctgcggctgctgatgatcgaccgcgacaacgcggttcagtcctgcaagaccgcccgcaccgcgctggccgcgatcctggtcaccgcacccgcgccgctgcgcgagcagctccgcggcctgccccgcgagcggcgcgcgaaacaatgcgcctcgctggcctgccccgacgatgctgaccggcagacccgggtcttgcaccagaccctgacccggctcggccagcggatcgccggcctcgccgacaccgccgccgagttggaagcacagatcacccagatcgtcgaggagatggctcccggcctggtcgctgccgagcccggcctcggcgcgctcagcgctgcccagctcctgctgtcgtggtcccacgccggccggatccgcagcgaggcagccttcgccatgctgtcgggcaccgccccggtcccggtctcctccggccgcaccgaccggcaccggctcaaccgcctcggcgaccgccagctcaaccgcgccctgcacaccgtcgccgtcacccgcatgcgctgccacccgccgacccttgcctacgttcagcgccgccgggccgaaggcaagaccgacaaggacatccgccgctgcctcaagcgctacctggcccgccacctctaccggaccctcaacagccaattctcatgaacgacttgacgaacataggagcgt

SEQ ID NO: 1044 - DNA, 1309 bp, unidentified
  source 1..1309: mol_type = unassigned DNA; note = element_132b9dc
  misc_feature 1: note = core
  misc_feature 2..88: note = LE
  misc_feature 89..1093: note = CDS
  misc_feature 1094..1309: note = RE
  misc_feature 1084..1303: note = bridgeRNA
gaatgaaagggacttccccagctcggagcggcatcgaagtgccaagattgaagtgtctagttttcaatctgatacgagaggggaagtcatggagaaggttactaccgtgggaatcgatctggcaaagcgggtcttcgcgttgcatggggtagatggtaccggtcgtgtggtgctgcggcgaacggtgcgaagagagcagctgatggaggtggtcgccgccttatctccgtgtctcattggcatggagaccggcggtggcgcccatgactgggcgcggcgcttccagcagctcgggcataccgtgcacctgatggcggccaagttcgtctcgccctatcgcagaaacggtaagaacgacgggaacgacgctgaggcgatctgcgaggccgtgtcccggccaggcatgcgctttgttcccgtgaagagcgctgagcagcaagcgatcctgacactgcatcgggtgcgccagggtttcatcgtcgagcgcacggcaaccatcaatcggattcgcgggctgctgatggaatttggcgtcgccctgcctttgcgcagcatcgtggttcggcgtcaggcgcgcgaggctgccgaggttctgcctgccttggctcggcgcgcaatcgaggatctgtgcgcccatttgagggatctcgatgcccgcatcgcggcctacgatcgcgagctcgatcagcaggcacgctgcagcgaagcggcccagcgccttatgaagatccgcggagtaggcccgatgagcgcattagcgatcgtggcaaccgtaggcaatgcacgcgacttccgcagcggcaggcagttcgccgcatggcttggactcacgccgcaccagcattcatctggaggtaaagccaggctcggcacgatcacaaagcgcggggacgcttacctgcgcacgctgctcatccttggcgcgcgatcggtgatccacacggcagctcgccataccgaccgaatgtcacgctgggtagcgagcatcgaatcgcgtcgcggatatcaacgcacgctcgtagctatcgcaaacaagaacgccaggatcgcctgggcgctgcttagcaagaacgaggaattgcggttggcttaacgactcgaggcggcaaacgttgatgcagatcggtcagaccgacgcccggacaccctgaacatttaactggcagcttcagatgccgactaacgtgcgaggaccgggtgcgcggctttcatcagggccagagcaaaagcgctcattacaggccgtttatagtgaagcagtccgacctatttgctccgacggaattgtcgttaaagggaagtccttata

SEQ ID NO: 1045 - DNA, 1257 bp, unidentified
  source 1..1257: mol_type = unassigned DNA; note = element_132ecd4
  misc_feature 1..3: note = core
  misc_feature 4..221: note = LE
  misc_feature 222..1232: note = CDS
  misc_feature 1233..1257: note = RE
  misc_feature 25..201: note = bridgeRNA
catataaaagaagtagtcccaaataaagtaaattatctgggactaagctagggtgagaagaagagactaacgcgtcaaaggcttcgagcttccggggatgccaaagtctcttctcgctctagcgattctgagcttctataacaggtaatcgcacaagatctttaaccgatatgaaaaagccatgaatcgctcttacctttcaatgtaaggatagtagatttatgaaaactctctctatttcgcagttaaaaaactgtaccgctattggcattgatgtctctaaaaagacgctagattttgcaggattaacggcaggaaaaaccattctgtatcaactcaacaacaccgtagagtcgatagaaaagttggctgaaaagctcgtagaatcgcagtacaaaggtaaaataatctgtgaatcaaccggccactatcatctcaagttagtctctgtattttcaaagcataatcttaatctctacgtcattaatccattgcaatcgagcaagcatagcaaagctaacattcgcaagactaaaacagatcccgtcgatgctgagacactagccacaatgtgtcttactgagagaaacctgcctaaaccgactaaactaagtgaccgtaatctattgattacattgaaagtaggccaaataaaggcaatagagaagctaatacagaaaatggggagtagccttcgtttgttcgaggaaacttatcaaggtttagggtttgagttagatgaagttcaacaagagctcgctacgaaactggcggaattaaagtcgcttcacaagcgtatgcttcgagagcttgaggccttgattgttgaaactaacgaaagcgcaagagacaccgatatcttagccagtattccaggcatctcttcgaccactgcagctcttttaagccaactggatagaagggttaagagttgtcattcatgggtagcgtttgttgggttggacaccagcattcgacaaagcggaacgtggagagggaaaggcaaactgagtaaacgaggaaacacctatttgaggaaaagaatcttctgctctgcttggggagcgacaatgcatgatgagcattttaaagcttactacgacaaactgagggcagaaggaaggagctataaagaagccttgtgtatcttagctaagaagcaaattaggatcgcttatcacttgttgagcagtggtgaaaaatacgatcctattaaggcttttggggcctaataatttgacaaagtcgtttaacagg

SEQ ID NO: 1046 - DNA, 1495 bp, unidentified
  source 1..1495: mol_type = unassigned DNA; note = element_1334c3b
  misc_feature 1..2: note = core
  misc_feature 3..222: note = LE
  misc_feature 223..1191: note = CDS
  misc_feature 1192..1495: note = RE
  misc_feature 9..181: note = bridgeRNA
cttgtatattgaaagaagtggtagaccgtcacacccttggtcatattagaccgctttgtagcatgggtcaccacaacaatctcctagacagaactcgaacagtcgccagggtcaaagctttaaacactgataattaaagtatacagtccgcatcaggcaaggatgagtgaaatcaaggagatgtaaataaaacagggtacacaaattttttgagagttaaaaatggaaaacatctctgtctctcagtgggtaggtattgatgtgagcaaagcgactcttgatgtttatatccgtccaatgggtaaagcattgaaggttggtaacacagttttagaaatatctaatctcatcgagcaactaaaattatacgatttaaatcttatcgtactcgaagccacaggaggattagaaacagaactggtaattcaattacaggcagcacttttaccagtggcattaatcaatccccgccaagggcgagattttgctaaagcgacaggtcgattagcaaaaacagatgcaattgatgcacaaatattggcacattttggggaagcaatgaaaccccaaatcttagcaattgagagtgacagtgcacgtcaattaactgaattaataagtcgcagacgacaactagttgagatgcagactgctgaaaaaaatcgccatgcgcgtgctcgtggtaaagctttggcagatattgacgctcatattgaatatcttgaaggtcgtctcaaacaacttaatcaagaaattgaagacttgacacgaagcaatcttgaatggattgataaagttaatttactcaaaactactcctgggattggtcaagttatttctacaaccttagtttctgacttaccagaactaggaaagctaactgctaaacaaatatctcgtttagttggtgttgcaccgattaatcatgatagtggtcaacacaaaggtaagcggatgattcatggtggtcgtgcccatgttcgtgcaactctttatatgggtgctgttgttgctatgcgttacaatcctgtgatcaaagctttttacgagcgtcttgttgaacgtggtaaatccaaaaaactggccctgactgcttgcgttcataaaatgttagtcattttaaatgcaatggttcgggataatttaccttggcgtgtaactgacaacttacaaccgattgtcaacacttgagattacaatcctttttatacaatgctagttcacgagaattggcgaacgctgacgattttatgcgatcgctctgtgcgggataaatttttcatgctctctttttccaccacgagaaatccagcaactggggaagattcagcggcgaagcggagtggctggtgcgggctgcaaccatcttgaccaagagccacaagtctttttgcccgtaccagccaccgctgaatctagcgtagcgttccccagttgcgtcaatgttaatagtcgcgcttttttgttaacgttcgcttgacattcaagacagtcg

SEQ ID NO: 1047 - DNA, 1354 bp, unidentified
  source 1..1354: mol_type = unassigned DNA; note = element_133bb8f
  misc_feature 1..3: note = core
  misc_feature 4..55: note = LE
  misc_feature 56..1078: note = CDS
  misc_feature 1079..1354: note = RE
  misc_feature 1093..1342: note = bridgeRNA
tgatggtgtgaacggcacccgcgcggcgtctggctcaatgaaggaccgtgccaaaatggttgtcgttagagcaacggaaggagcgccgtccacgggaaagtctatcactgatttgtcgtctgtcacgaccgttgggctcgatctggccaagcacgtctttcaagttcgcggcgttgatgcttcagggcgcgttgtggtcgccaaggcgatcaggcgcacaagctgccgtgaagccggcgggtcggcgcatcattgggcgcgcgagctgatcacgctcggcgatgaggcgcggatgatgcctccggcttatgtaaagccctatattcgccggcagaagaacgacgcatcggacgcggcggcgatctgcgaggcggtgacccggccttcgatgcggtttgtcggcgtgcgctcgcgtgagaaccaggcggcgttgatgcgtcacaaggcgcgggagatgctggtcacgcaacgcaggcagctgctcaatgggctgcgcggccacttaaccgaggtcggcgtcatcgctccgaaagggctgagatccgcccgcgaactggccgagctgatcgaggcctgcgacgagacaatcccatttgaagtgtgcgaggcgctcgcgccgctgctggtgcaactacggaacctcgacgaagcgattgcacggctcgatcgcatcctagcaaagctggcgcagaaggacgaaacggcgcgtcgcttgatgagcatccccggcttcggcccgatcaccgcctcggcgatggcggcgaccattcaggatacgtccagtttcgctggcccgcgcgagttcgccgcctttctcggactgacgcccaagcagaactcatcgggcggcaagccaaagctcgggcgcaatcgctatttgcgcaaactgcttgtcgtgggtgcgcatgcggtgctgtttcaccgcaagccgcacaccgatccgctgcggatgtgggcgaagaagctgatcgagaagaaacccttcaaactcgtcgctgtggctctcgccaacaagatggcgcgcatcgccttcgcactcctgcggggcaagacggtctatcgggaagttccggcgtaaggagtatcggtagagctcgcggccgggcgcaccaagagccgaggcggcacaagagtcgagggtgactgagaggtgatgcgcaggaaaacggattgatcctgaagcccgcggcattgtccgcgcagtcaagcgcgctgctctgatcggggcaacggatcagcggacaacatcaggccagcggatccaatcgtccgcgcgaaaggccgaagacatgaccgcactcgcgaccagcgcaacgccgaaaaataacccttgatcagcgggcgcgtccagaca

SEQ ID NO: 1048 - DNA, 1123 bp, unidentified
  source 1..1123: mol_type = unassigned DNA; note = element_133d057
  misc_feature 1..2: note = core
  misc_feature 3..170: note = LE
  misc_feature 171..1100: note = CDS
  misc_feature 1101..1123: note = RE
  misc_feature 1..169: note = bridgeRNA
cctgtgtattggctttgtgatataaggagagtgggcggaaggccgtcggaatcctggtcgtttgagaccgcctgctggcttttggacctccgcccacctttattgatcccagcctgaacagttgattgaggccgttggcgcggacctcgtagcacaggatgaggcttgccatgatacaccctgtttacatcggatgcgatgtctcaaaggcacatctcgatcttttcgataccataacccaaaagcacatccgcatacccaacaccgccgttgccatcgacgaatggctctccacccttgagggacgtgaggcgcgcgtcattctggaagcaaccggacgctacgaccggctcctgtgcacggcattggaaaggtggcaacgaccctattgccgggtcaatccagccaaggcccgcaattttgcaagagccaccggccagcttgccaaaaccgatagcatcgatgcacgactgctggcgcgtatgggcgaggcgctttcgccagccgtgacgccggtatccgatccggccagacagcggctggaaagcctgcatacgcgccgtgaccagctcgtggccatgcgccagcaggaacgtgtacgtcttcataccgcagatccatcggagcgcgacagcatcgagcgccacctcggctggctcaatagggagattgcagtggtcgaaaaagagtgccagtcccatgtccgcgagaatgcgatgctgagtgaacaaagcgaaagacttcgctccattcccggcatcggccaggtcacggcatttactctgatggctcacatgccggaactgggtgacagctctcctggtagcatggcagctcttgcaggacttgctcccttcaatgccgatagcggcatccatcgcggccagcgtcatatccgcggtggacgaaaacgtgtgcgtgacgccctctacatggccgcactggtggcctatcgattaaagtcgtccttcgcatgcctcattcaaaccatgcaggccagaggcaaaccattcaagatcatgatcatcgccatcgcccgcaaattgctcgtcatcgcaaacgcaattcttagggataaaaccaccttcaaaacagcctgaaacaatattcaccaatacagttg

SEQ ID NO: 1049 - DNA, 1355 bp, unidentified
  source 1..1355: mol_type = unassigned DNA; note = element_133d458
  misc_feature 1..3: note = core
  misc_feature 4..185: note = LE
  misc_feature 186..1103: note = CDS
  misc_feature 1104..1355: note = RE
  misc_feature 1079..1343: note = bridgeRNA
tgatggggtggacgccccccggcggcatcttatgccaaggtaggtgtgtcgagcacctataagcaggaggcgtccatggaagaagttagcacgatcgggttggatatcgccaagtcggtttttcaagctcacggagcggatgaggcgggcgtcagctgttcagccaacggcttacgcgagccaaggtgttgccattcttcgccgcgcagcctcgctgcctggttgctttggaggcgtgtggcagctcccatcactgggcccgcgagcttgcgcagttggggcatgatgtccggcttattccccctgcctacgtaaagccgttcgtgaagcggcagaagaacgatgcggccgatgccgaggcgatctgcgaagcagcgcggcgacccaacatgcgcttcgtcgcggtgaagagcgaggagcagcaagcgtcgggactggtgtttcgcacacgcgacctccttgtcaggcaacgtacgcagacgatcaacgcgatccgcggacatctcgccgagtatgggtgggtggcaccgcggggtccaagttggatgtcgatgctcggtgagctggtcgacaatgatctcggtgcctcgttaccgccagtagctcgcgatatgttccgcgccatgctcggcctgctcgacgagctggattgtcgcatcgccgaactcgataaggagatcgcacggcccgcgtgtgaggatgaggtggtttgccggctcatgacgataccgggtattggccccatcgcggcgacggcgattgcagcgttggctcctgcgatggagacgtttcgtcgcggccgtgattttgccgcttggctcgggctcaccccgaagcagaattcgacgggtggcaagaccaagctcgggcgcatctcgaagatgggcgagcgcactttgaggcgcctgctgatcataggggcgagtgccgtcgttcaacacgccagccggcgcggtgctccggaaggctcatggctggctggcatgctcacgcgcaaaccgcgtatgttggtcagcgtggcgcaggccaacaagacagcacgcattatctgggccgtgctaacgacgaagcaggattacagagctcgggtggtgtcaggttaaaacgacaacaccagaggtcgtcggaggacggcaagcgatcgaaggagagtatggcgcaacagtcggtaggacgggatcggaaaaaccaggatttgctctcgtgcctctagcacgtctgtctgatttggatctgatccgcgaactcccaaacaggcccgcagcaacgctgcacccaaaggccggacagatggcagcatccgatcaagcgcaattctcgaaatcaccgcttgccttccgtggggcgtccacaga

SEQ ID NO: 1050 - DNA, 1577 bp, unidentified
  source 1..1577: mol_type = unassigned DNA; note = element_133edb5
  misc_feature 1..8: note = core
  misc_feature 9..284: note = LE
  misc_feature 285..1460: note = CDS
  misc_feature 1461..1577: note = RE
  misc_feature 52..262: note = bridgeRNA
tttgatacgtataatccaatcatcggtgatggtgattggatttttcctttctcccgggttctccggggtattcttttaccatctctgatatactttctctggcgctgtggatctgtatctatttcgttacagctttgactggtatgaggtgtctcagaccacagcttttcgtctattactgttaatcagtttgttaacgctcgacgtttctatttacgtgattacacagccggattctctgtggaagacaacagcgccaattctattttaggaggtttttcaccatgtctctgtacttcgccgggattgatatctccaagtacaaacacgattgctgcattatctctgcagttgatcagcaggtcgtttcgaagttcactttcaagaacgacaaagatggcttctctgaacttctgacagttctgcactctctctccagccctgaggacataagaatagggtttgaatctaccgcccattatgccctcaaccttgaactctttcttgagaaagctcaccacagctttatggaagttaatccagttctcatttctgagtacaagaagtccactactcttcgcagaacgaagacggaccgtgtcgattgcgagtcgatcgcccgctggctaatgactgtagagtacaaaccccactcaaagggattttatcatgcttattccctaaagtcattaacacgtttgcgtgacaagcttatccggcagcgttctttctatctcgtgaagatcaccaatgtcctggatcacacttttccggagtttaaacccttcttcaatgaacgatttagcaagaccgctctgtatctgctggaaaactacggctccgctgaaaagatggcccgtatgaatactgcctcttacgagaagcttcgttcactttcccgtgggaagttttctccacagcagttccttgcgcttaagtcacttgccgccaataccgttggcgtaaacaattccatctttgacacggaactgcgaagccttctgacactctataaggctacagctgaacagatcagtatccttgagaaccagatcaccgaattgatagaggaagtccatcctcactacatgtcgattccgggaattggtccaatgtctgcggctgtcatctatgctgagtacggggatatctccaacttttcaaacccttcccagatgctggcatttgcaggcctggagcccggaattaacgattccggtactgaaagtcacggcggccgaatggtcaaacgcggttcctcacagcttcgttatgtgctgatgaactgtgctttaccattgatccgctttgatatgacctttgcttcctactacgccaagaaacgcgcagaaggcaagccccacagagtagccatgtctcatgtcaccaagaagcttgtcagggtcatttttgcattggagaggcagaacactgactttgtagcgcaggctcttcgctgacaactgaaatcatctctgatccgatgccatctgaaatacgatttcttcagatggcttattgttgtgcaatttccaaggttcatcaaaaatcttcaatttgtacttgactgtttatag

SEQ ID NO: 1051 - DNA, 1536 bp, unidentified
  source 1..1536: mol_type = unassigned DNA; note = element_133f57d
  misc_feature 1..2: note = core
  misc_feature 3..241: note = LE
  misc_feature 242..1420: note = CDS
  misc_feature 1421..1536: note = RE
  misc_feature 3..219: note = bridgeRNA
cttgtattatagagtagtagttattagagcccctctccaagggcttgtgctacactgtaagagatgctgtggattggtgttgtcctcctaccacaagatggttcttgaaaggttccaaccacagccccttacacttttgttaatcagttaaataccgccagacggtttatgtggaacaaggctacaaaagtaaggtgcactgtggatgcagcatcacattttttcgtcggaggtatttgttatggtgatttctgttggtattgatgtttcaaaagacaagcacgattgctttatcgtcagctctgagggtgaagttctggcagatgtatttaccattccaaacacgatggatgggtttaaccttctgttgcagagagtccgggagtgcaccacaccacaggacaaaataaaggtagggcttgaggcgaccgggcattacagctacaatctgcttgggtttcttcttgacaatggcctggccacctatgtcctgaaccccttgtgtacaaacctttaccggaaaagcctcagtcttagaaagaccaaaactgaccgggtggatgcacgaacgattgcgtctatgctgttgtccgatgtgggcctcaaaccctacacagacacagcataccacaacgaggagctaaagtcactcaccagataccgttttgacaaggtaaaagagcgcgccaagctgaaaagttctatcgctcgactgatctgcatcctgtttccagagttggaaaagctcgttccttctctgcatattgcttctgtctactccctgttggaggagtttcccggtgcccaacagattgccgcaactcatttgacgagactgaaagcactacttgaaacagcctctaagggacgctacaaacgggatatggctcttgaaatccgagatgccgccagaaactctattggctcctcgatgcctgccaagtctcttgaattacagcataccattcgtcttatccgtgaattggataatgaaattactgaaattgaagagcagattcaagccattatggatgaacttaattctcccattaccacgatcccagggattggattccgaatggctgccatgatttttgctgaggttggtgacttcacccgctttgattccccggacaagctgttagcctacgccgggatgtccccctcaacttatcagtccgggcagctcaagaactgttacccccacatggaaaagcgtggctctcgatacttgcgctacgcactttacaacgcaaccaagtatgtctgtcactggaacccgacttttgctgattatcttgccaagaagcgcgcagagggtaagcattacaatgtcgcactgtctcacgccaccaaaaaattagtacgccttatatttgctttggagaaatccagagagacataccgtttggccgtctgacttctttttgatagctgttcggggccttctcgggcctctgctttgctataccttttttgagctatctgattttcaccaccaccattcatttttgtggttgacttttaatagttaat

SEQ ID NO: 1052 - DNA, 1540 bp, unidentified
  source 1..1540: mol_type = unassigned DNA; note = element_13401e9
  misc_feature 1..3: note = core
  misc_feature 4..242: note = LE
  misc_feature 243..1424: note = CDS
  misc_feature 1425..1540: note = RE
  misc_feature 8..222: note = bridgeRNA
tttcgtattatcaggttagccagtaattactggttggcctttttttatggtcgttttacgatgaggaagccgggagaacgtggtggttttaggggcaatgaccccgtcacaaaaactgttctcccacgacctccaatgaccatgtttgagctggtagaggctattgacctcgcatcacaagcgaagctatgggtttggaaccatcgtgggatagccggtaaatcttttatttggaggttgttatggaaccagttataggtgtggatgtggcaaaagggtttagtgtgcttcaagcctttacgagacgaaacgaaccttatggaagggcagaaagcctgtcgcatgaggagcacgggcttgaacggttgggggagctcctcgcggagttgcaggagacaacaaaatgtactccggtagtggttttggaagcgacagggcactaccaccgggtactggtagcgtatctggagcgtggcggctggaggtactttatcgtgaatccgttgcagtcgaaacgggccaaaggaacgcaactgcgcaaggttaaaacagatgctgcagatgcatggcatttagcagatatgtattaccgcggagacgttacaccacatcgtatatgggacgaagcgtttacagagttgcagcatgtgacccggcaacatgagtttgtgacggggatgtttgtgcaggcgaagttaaacaccagagctttattagatcaggttttcccggggtacgagaaggtctttcgggatctgttttcggttacgtctctaaaggtgctggcgcgttgtctggagggagaaccgggagatcttcatcagatcatcgagaacagtggcgcagggaagtcgcggtcgaaacgctgggttcaagaaaaagccgaacggctccaggaagtgctgacgcattggaaaaagcagaggagaagttcttctcaaagcgttgctttgcacggtatggttagcttattgcttcagttttcggagcagctaagtacattggagaagcaaatggagaagatggcatccagtctccacgaagtagaactaatgaagagtatacctggcgtaggagataagcttgcagcagcccttgtcgctgaaataggggacgtaggacagtttcaaaacccgaaacaactcgttgcttttgcaggcttagaccctggcatattcagctcagggaagtttaaggcgacaagctcgaagatcacgaaacgtggttccaagagactgcgacgtgctttatatttagcggtacagtgtgggatacgcgggagcatcaaccgtaagcttcgagattattatgatagaaaaagaaaagagggcaaggcttacaaggtggtcgtgatcgcttgcgccaacaagcttcttcatcacatattcgccatcctcagtaagaaccagccctataacccttaaatccatatttccccaaatatcctttactcatgaaggttatttgtcatgctcataaaatagtataccaacaaaccatttgcagaccaagagcaaaaagcttgacaagtattagctgg

SEQ ID NO: 1053 - DNA, 1368 bp, unidentified
  source 1..1368: mol_type = unassigned DNA; note = element_134e291
  misc_feature 1..2: note = core
  misc_feature 3..75: note = LE
  misc_feature 76..1092: note = CDS
  misc_feature 1093..1368: note = RE
agatgggatgaaaagtgggcgtaccttcctgatacgtgctcgaggcacagatacagattaggaggaaggtacgccatgaagacccacgtaggagtagatctccatcagcgattttgttacttaacggcgatgaacgcaagcgggaggatatgcaggcaggggcaggtggtgaacgagggaggggcgctgcaggcgtggttgcgggagttgccgcggcctcgccaggtggtggtagaggcgagcggattctggccggcatttgcgcgggcggcggcggtggagtcggagcggctggtgatggtgcatccccagcgggtgaaggcgattgcctcggcgaagctgaagaacgaccgggtggattcggagactttggcgcatctgtcgcgctgcgatttgttgcccgaggcgtggatggcggatccggcgacgcagcagttgcggctgcgggtacgactgcggatcgcgctggggcggcagcgggcacgggccaagaaccagctgcaggcggtgctgcatcaggagggattcaggaagccggtgacggacgtgttcggccggcgcggacgagcatggctgaagggattggagctgagtgaagcggggcggctggtggtggacacgtggctgcgcgaggtggatcgtctggacgcagaactgaccacgcagacgcgggaactggagcggctggcgaaggcggatgcgcgggccggatggctgcagtcggttcctgggatcggggcgtatgcggcgatggtgattctggccgagatcggcgatgtggagcgattcgccagcaagcgggcgctggccagttatgcggggctgacgccggtggtgcgcgagtctgcgggccggcgcaaacggggcgggattacgcatcagggatcgaacacgctgcgctggatcatgctgcaggtggcgcaggtggcggcgcggtggtcgcctggggcgcggagttattatgccgggctgcgcgcgaggaagccggcccaggtggcgcggactgcgctggcgcggaagttgctcaccgtggtgtgggcgctgctgcgtcacggggtggattttgatgaggagttgttcatccgcggctaaaaagcaggccgtggaaaagtggaaagctcgacaacgcttcccactttcccaccgcctcgacggctgcggaatgagaaaggcgtttgcgacggttgcaaggagaacccggccagctcgttcatcctgtgcccaccgcggttcgggaaaaaccacggaagggcctgctcagatggagcggccgggattcgtatcacccttgtgtgccatgagcacgaatagaagtctgtcggcaactattcgcaaatgcctgtggacaggtgcggcccttttcataga

SEQ ID NO: 1054 - DNA, 1304 bp, unidentified
  source 1..1304: mol_type = unassigned DNA; note = element_134fd5f
  misc_feature 1..2: note = core
  misc_feature 3..267: note = LE
  misc_feature 268..1260: note = CDS
  misc_feature 1261..1304: note = RE
  misc_feature 56..252: note = bridgeRNA
atttcctttgtattaataaacagattaattagccttattatttttattaagatgggggtctgggggtgttaataaactaatcatcttgcggataacgttaatataaaaggtaggagacctttcgtcacttctagtctttgaggactttcgttcgtataagttcctaccttttataaattgccaaggcccagctagaatacttactttgaaatatcaaaggtaattggcaaaggcaatttctgtttaataaaactaaatggataacgtatgaaaaactggaatgttattttaggggtagatgtttcaaagttgagccttgacatctgctgtgcagaacgaagactgcatattaagatcgaaaactgtagtaagggctttaagcaatttatacaatggtgcaggttgaatggtatcactcttaatgaggtactggtattgcttgaatatacaggaggttacgaataccgcttcctgcagttctgcgaatcgatcaatattgcctattgcaggattccggggcttgagatcaaaaagtccatgggaatggtaaggggcaagaacgacaaggtagatgcctaccgtataggccaatatggagaggaaaagtctaaaagactggttccttccagaccaatgaacaacagtatcctagacctaaggcaactaatgagctaccgcaaaagggtggtaagggaaaaggctggtcagttatcgacattaaaagaacgcatacatatgtatggacagcgtaaagcagatccaattattaagctgctagagatgcagatcaaaaacaacagccttgtattggcaatggtggaagggcagataaaagaactgataggggctgatgatgcaatgtcgaaaaactataggatattgaaaagcattaaggggattggtcctataaatgcacagatgagcatagcctataccgagaacttctgctcctttaccgacggtaggaagtatgcagtatatgttggggtaatcccattcgaacatagttctggaacaagtatacgagggcgtaggcgtgttagtcatatggccaataaagaattgaagcaggaacttaaccaagccgcaaaatcagctatgcagcatgaccctgaaataaaaagttacgcagaaagaaagctaaagacaaaaccatacaacctggtattgaacaacataaagttcaagctgatcatgagaatgttctcactggtccgaagggaagaaatgtatgtggaaaactataaaatcagtgcatagaaaaatatttattaaggaaaatttggaaatatcataatcctaga

SEQ ID NO: 1055 - DNA, 1425 bp, unidentified
  source 1..1425: mol_type = unassigned DNA; note = element_1353ebf
  misc_feature 1..5: note = core
  misc_feature 6..204: note = LE
  misc_feature 205..1410: note = CDS
  misc_feature 1411..1425: note = RE
  misc_feature 1..188: note = bridgeRNA
tccctaagaatgtgaggcggtccgggaggaccgggtgtggctgatggcacgttgccctcgagggctcggaaggaatggccgcccggtcctccggggcgctccgactgctgattgagaactgcggtcatcgctggttagggacctgtcggcggagtgttcttcggaccgggaagtgctggtcacgagggatgcggagcgagggacttgagcacgtctgacaaccggatatgggtcggcgtcgacgctggcaaggggcatcactgggcggcaggggtggacggcgaaggggagaccctgttctcgacgaaggtgattaacgacgagtcgcagatcctctccctcatcaaggcggcgagggagagggccggtgagatccggtgggcggtggacatctccggccgtgcctccacgctgctgctggccttgttgatcgcccacggccaacacgtcgtctacgtgcccggccgcaccgtcaaccgtatgtccggcgcctaccgcggcgagggcaagaccgacgccaaggacgcgcacgtcatcgccgaccaggcccgcatgcgtccgaaaggcttcgtccggctggacacaccgcccgaactggtcaccacgctcagggtgctgaccaactaccgggccgacctgatcgccgaccgagtgcggctgatcaaccggctgcgcgacctgctggtcggcatctgccccgccctggagcgggccttcgactactccgcggccaagggcccggtcgtcatgctgaccgagtaccagaccccggccgccctgcggcggatcggcgtcaagcggctgacgacctggctggagcgccgcaaggtccgcggcgccgatgccgtcgccgcgaaggccgtggaggccgcgcagtcgcagatgatcgaactgcccggcgagaagcgggccgcgaagctggtgagcgacctcgcccaccagctcctggccctggatgagcggatcaaggaaaacgaccgggagatccgcgagaccttccgcaccgacgagcgcgccgagatcatcgaatcgatgcccggcatgggccccatcctcggcgccgagctcgtcgccatcgtcggtgacctgtccggctacttggacgctggccgcctggcctcccatgccggcctggcaccagtcccgcgcgactccggccgccgcaccggcaactaccaccggcccaagcgctacaaccggcgcctgcggcacatcttctacctggccgcccagaccgccatgatgcggcccggaccgtcccgggactactacctgaagaagcgcggggaagggctgctgcacacccaggccctgctcgcgctggctcggcgccgggtggacgtgctgtgggcgatgctgcgtgacaagaggctgttcacctccgccccgccagtcacgcaggcggcttgacacgatcattgagat

SEQ ID NO: 1056 - DNA, 1596 bp, unidentified
  source 1..1596: mol_type = unassigned DNA; note = element_135d152
  misc_feature 1..3: note = core
  misc_feature 4..238: note = LE
  misc_feature 239..1447: note = CDS
  misc_feature 1448..1596: note = RE
  misc_feature 53..222: note = bridgeRNA
cttatctgttaaactcaacccagggagcaggaatactcacccaggttggcaaaaatttttaattaaaactttccgggaaaaggatttcatctcctggcagttcgactgcccacgaaagagctaccttccctgatcaaatttgcagactgcggttcatagaagggttgtgcttcgagcaccgcgttagataaggcccactgccagtctgcaacaaaattcgtacgcggaggttttggacatgtactttgtagggattgactgggctgacctccatcatgacgtaactgtactcgatgaaaaaggtcaagagcttaagtacttcaccattccccacaaaagggaaggcatggagctgttgaagcaaaaacttttaagcatcgaccccaatccagaaagcttcgcttgcttggtggaaaccaagaacggtcttctggtgcagtttcttttagaagtcggttttccggtttacccgctcaacccgaaagttgtggattaccggcgaaaaccctccggggctaagagtgacccaattgatgccaggctgctggccaacatcggccgctccgatctggcgcagcttaagaggctaaagccggatacggaactgatcagcgagttaaagatattgacccgggaccaggacagccttatccaggaatccacccggctgaccaataagctcattgcctgcttgaaggagtattacccggtagctctagagttcttctcaaagccaaccctgccggtagctctggagtttttcaagggttaccccaccccggatctggtcagggaagctaccgttccagagatagccgcctttttaaaagcctgtaagcatccccggcccaaccagacagccgtctccatctggcagaaggcgcatgagccgcagcttcgggccagcgcccccaccgtgcgggcaaaatgccgcttgctgctcgccctggtgggtcagctggaggtagtcaaggagcagatagccgcttatgatgaggaaattaaccgcctttttcagttgcactccgacagcaggatcttcgctagcctgcccggagcggccggaaggctggcgccaagactgctggcggagtggggcgacgaccgggaacgttacgagaacgcagcagtggtccaggctttagcaggcacctccccggttctttttcagagcggcaagtatcgctttgcccagcagcgcaaatcctgcatcaaacctttccgtcgggcaatgcaactgtttgccttccagagcatcaagcaggtttgttgggcgcgggaatattacgacgccaaaagaagccagggtaaaacccaccacgaagctttacgggctttggcaaatatctgggtacggattatctttgccatgtggaaaagccatgcttgctacgatgaagccacgtttatgaccgcccgcgccaggcatcttaattgggcagcataaggttaaatattaggttgtcaatgttctaaccgctggcgactaaattttaatccagttggagccaggcggaaggggtgaaggcgtcttttaaagcgctcgaacatctgtgctacttataaaaattaagttttgctattgacatagaaggt

SEQ ID NO: 1057 - DNA, 1400 bp, unidentified
  source 1..1400: mol_type = unassigned DNA; note = element_135e79b
  misc_feature 1: note = core
  misc_feature 2..80: note = LE
  misc_feature 81..1100: note = CDS
  misc_feature 1101..1400: note = RE
  misc_feature 1177..1394: note = bridgeRNA
taatgagatggtccgccgcttgattcacctggttagcaggtggatggtggtggtagttcctgtgaaggaggatcatcgacatgcagatacattcagttggcatcgaccttggcaagacaacctttcaccttgtagcgctgggcgcagctggcaacgtgcttgtgcggaagaagttcacgcagaagcaactgctggcctacacggcgaacatgcagacctctctgatcgggatggaggcgtgctccggagcgcattttctcggtcgggcgctgcataagcaaggacacgatatacggctgattccagcccagtttgtgaagcccttcgtgaagtcgaacaagaacgacttcatcgatgcggaggcgatcgccgaggccgtagaacgcaagaacatgcgctttgtcccgatcaagacagacgatcaactagatttgcaagcgatccatcgagtgcgcgaccggctcattgcgcgacgtacggcagtgatcaaccagctgagagcgtttctgcttgaacgtggcctagtatttgcacggacgccagccaagctcaaggccgccatggcggacatccttgagaacgccgagtccaacctaacgtcgcggatgcgtaacctgataagcgggttgtggagcgagtggaagcttgttgagcagcagatcgaagagctgaacgatgaactggagcggatctctgccgcggatgcgggctgcacgcgcattcgcaagataccaggcataggccccgtcgtggccacggccatcgtcgctgccatcggcaacggtgcggcgttccgcaagggacgagagttcgcagcatggctcggcgtcgtgccacgccagtactcgaccggcggtaaggcaaagctgtttggcatcagtaagcggggtcaggagtacctgcgcaggatcctgattcacggcgcgcgagcagcggtactgcatatcaagcgcgacagagcaccgattggtgcctggctcgatgcactcgacgccagagcacacaagaacgtcgtcgttgtcgccatggccaataagctggcccgtatcgcttgggctgtgctctccagtggtaacgagtacagacccgttgcaacgtagtggtctggaaaaggcgccttcggcttggaagcgctcccactttcccgcaccactacgacgactagcatttctctaccgaagtctgcacaggggttgtaaggacgaaagaacagtcacaacggcgtgtctgcagcctgatgttacgaatggtcttcagggaccgacgagttttaaaggacagacacgcgcgcatctcatcctggccaggagagacgatctccacctaaaggccgaatacatttgcgcagacttgtcttctcgaccaacttttttccttgcagtcgcgcggcggaccataca

SEQ ID NO: 1058 - DNA, 1383 bp, unidentified
  source 1..1383: mol_type = unassigned DNA; note = element_1360a04
  misc_feature 1: note = core
  misc_feature 2..88: note = LE
  misc_feature 89..1111: note = CDS
  misc_feature 1112..1383: note = RE
  misc_feature 1154..1375: note = bridgeRNA
caatgggatggacgcccccacccgtaacggcatcgatgtgccaaagtggatgtatcgagcaaccacttaaaccgaggggggcgtcatcatggagattacgacagttggcatcgatctggcaaagagtgtgttccaggtccacgcggtagatcagcatgggaaggttgcactgaagaggcagctcaagcgcggtcagatggcggaatttttcgccaatctaccagcctgcctgattgggatggaagcctgtggcagcgctcatttctgggcgagaaagctgcaagcgctcgggcacacagtgaagttgatggcgccgcagttcgtcaaaccgtacgtgaaaacgaataagcacgacgctgctgatgccgaggcgatttgcgaggtggtccggcggccgaacatgcgattcgtgccgatcaagaatcttgagcagcaggcagtgctggcgctgcatcgggtacgccagggatgggttaaagcaaggacggcgcaagccaatcagatccgtggcttgttgagtgaattcggcttcgttgtgccacaagggatcggacacatcaccagccgggtgccagcgatactcgatgacgcgacgaacgagttacccggggcattcaaggagctcgtgctacggttgctcgagcacttcagggacctggaccggcaagtgaacgagatggaacaccagatccagcactggcatcgaaccaatgcgctatcgcgtaagttggagaagattccggggatcggaccgatcacagccagcgccctgatcgcttcggttggcgatgcgaagaattttgcaaacggccggcagctggcagcttggctgggcctggtaccgaagcagcactcgtccggcgggaagacaaatttgcaagggatcagcaagcgcggcgacacgtacctgcgaacgctgctcatccatggcgttcgagcggtcattcggcaattcgaacacaaaaccaatatacagggatggctagccaagctgctcggccggcgcaacaagaacgtagcagcagtcgcactggcgaacaagaatgcccggattgcgtgggccctgctagcacacgacagcgattttcgatccgattacgccgctgcataatcggatcggcagaagtaaaggcagcacaaggttgtcgattccaccgattacacaggcaatcatgcagtgatggcagaacaggtaagaccgtggttggcaaagcccgctgttaggctggcacgcgaagtgcgatagagcgatagaggcgccaaccagcagatcccatcagggaccgcggcaaatcgccgcatataaagtccggatgtacgggtgcaatctttaccttcacgccgtcatgaactgagtgcttggcaaaccagggcgtccatgta

SEQ ID NO: 1059 - DNA, 1587 bp, unidentified
  source 1..1587: mol_type = unassigned DNA; note = element_1360bd2
  misc_feature 1..2: note = core
  misc_feature 3..264: note = LE
  misc_feature 265..1440: note = CDS
  misc_feature 1441..1587: note = RE
  misc_feature 3..224: note = bridgeRNA
ctcgtattataaaatagtagtgtttatagaccctctccaaggtctgtatgctatactattggagatactgtggattgttttcctgctcctaccacttgatggttttgtaaaggctacaaccacagtctctttgtatatttgttaatcagttagataccgcatgacggtttatttagtacgaggttacaagcgcaaagaaccctgtggtcctaaacagtatcattacaatccctttagggaaatctattacttaggagtattcttatgatctacgttggaattgatgttgccaaagataagcacgactgctttatctctaactctgatggcgaaatcctctataatgctttcactatccaaaacaaccgggaaggctttgacgaactatatcaaaagatacttttcgttgaagtcgatatgtccaatataaaagtaggactggaagccactggacactacaactacaacttactcggttatctcattgataaaggtttgccgacctacgttatcaatccgcttcacactaatctttacagaaaaagtctcagccttagaaagacgaaaacggataaggtggatgcccgaaccattgctatgttgttgatgtctgatgtgaacttaaagtcctactcagttacatcatatcacaatgaggagctaaagtcactcactcgttaccgttttgataaggttcaggaacgggctcagctcaaacagtccatctccagactggtcaccattctgtttccggaactggaaaagctcgttcctacccttcatttggcttctgtatatgcacttctcggtgaacttccctctgccgaccagatagcctcttgccatttgacacatctgacaaaacttctgcaaacagcttcaaaaggtcgctacagccgggagaaagccattgagatcagagatgctgccagaacctcgattggctccagaatgcccgccaaatctcttgaattaaaacatactctcaaactcatcggcgagttagattctgagattgctgaaatcgaatccgaaatcaaaaagatcatggatgagatcaattctccaatcctgaccattccaggtattggttaccgcatgggtgctatgatccttgcagaagtgggcgatttttcccgctttgattccccagacaagctccttgcctatgcaggtgtatcaccctcgacttatcaatccggccagttggaatcctcgtactcccacatggaaaagcgtggttccagatatctgcgttttgctctgatcaatgctgccaagtatgtctgccactgggatgaaagcttcggtacctatctccagaagaagatttcggaagggaagcattacaatgttgccattacccatgccacaaagaaacttgtgcggctcatctatgcaatggagaaatccggtaaaccttacataaaagctgcgtgatctttttctgatataaaacactccattggagcaccgacaaccgatgctctgtttgtcatgcgattttcaatgtgcatttgttactgagagacttgtttcagggaattgaaaaatctcccaaaaaactattgacttttaatagttagt

SEQ ID NO: 1060 - DNA, 1619 bp, unidentified
  source 1..1619: mol_type = unassigned DNA; note = element_136435d
  misc_feature 1..3: note = core
  misc_feature 4..269: note = LE
  misc_feature 270..1454: note = CDS
  misc_feature 1455..1619: note = RE
  misc_feature 21..244: note = bridgeRNA
cttgtatattaatgttcatcagagtcgtggaactttgatgactgttttctgttaatctctcaagccacgtgagataatagaaccgtgcagttgagggcgtctttttcctccttgagatttggactcgttttaaagagtgacgcctcagctttacgggtaggattcgtattagctggatgagttttcgtctcgtatctccaacaaggtagaattgccgtaaagtccgtggaaaacctctctgcaactttaattgaaaggttggtgcaactgtgtatataatcggcatcgacatcgctaagaaatctcatgaagtatgtttcatgaatcaagaaggagatattttagatggaaacacttttaatattcccaacactctttccggtcttgaaaaatttcaaaaaatgcttaacaagtatggtcttaactccaacaatgttcttgtcggcatggaagctactggtcattattggctagttctttactcttggttaatagagcaagagtttgatgttaagctcattaatcctatcgttactgacgcttacagaaagatgcatattcgcaaaaccaagaacgatcgaattgatgcagaagttgttgcaagagtaattatgcttggggaataccaagaaactcctgttgctgaagaaactactttatctcttcgccaactttgccgttttagattatctcaagttcaaacctgtggtgatttgaaacgaaaatgcatagccgttctagatcaagttttccctgaatattccaatcttttcacagatacatttggcataagctccaagacaatcttgaaagaatattcaactccggaagaattagcttctatacacacaaccaaacttactaatcttctcaagaaagcttctaaaggtcgtttcggaaaagaaaaagctttagaagtgaaagctgttgctaagcaatctataggtattacctttgctactgatgcttttgcttttcaaatgaaacagattcttgaacaactagaatttattgaagaacaagttaaattgctggatcaacaaattgaagagtatatggaaaaattagattctcctattattacaattcctggagttggtcctgtttatggtgctgttatattatctgaattaggtaatatccatcgtttcccaggcggtaaacaaatcgtttcttacgcaggtattgatgcttctgtcaacgaatcgggtagttttaaaggaaaccgagccagcatgtctaaacgaggttctgcttatcttagacgagcaatattcggtgctgctttcatcgcatcttggtcagatccagaattatctgaatactacaaaagattaagagacaggggaaaacaccattatgtcgcagtaggtgctgtagctagaaaactttgttatataatttatgcagttttaagcgaaaatagaccttttgaacaacgaccaccaacgtaactgcttgtatcatttactgtgtttttctaaagcattttcgaatgttttatttgtgttgcactgttcctattcaattttcaagtttcaatatggttttcctgttttttcactttttgttcagctcttaatatcttttaaatttatatttgactttttatagctggt

SEQ ID NO: 1061 - DNA, 1332 bp, unidentified
  source 1..1332: mol_type = unassigned DNA; note = element_136a903
  misc_feature 1..2: note = core
  misc_feature 3..257: note = LE
  misc_feature 258..1322: note = CDS
  misc_feature 1323..1332: note = RE
  misc_feature 18..250: note = bridgeRNA
tctactggtccaccatggtgggtgtcgggagggtttcgacgggagccgcccgacagcggggctggggtgactcaagcaagatctgtcccacgtggaccttgtcgtgacctgtccaccagcgctcgcaggccaaggccctggccgcgggagtgaccttatagaagcctgtgcagccgataactcacagtagatctgtcccccgggccagggccctggtagtcgtcccgttcctgaccaagaggaagcaggacaccaccatggtgacagtgggtatcgatccgcacaaggacatgcaccaggccgtcgcgctggcccaggacggcacccgcctgggcagggccaagaaggtcaagactggccccgaggccctgggccagctcttgacctggatccgcgccctggccggaaacggcccggtgctgtgggccatcgagggcggccccggcctgggccgggccctggccgacgctctgctgggagcgggccaggaagtggtgtgggtgccaccgcgcgccatggccgcccaccgccgcctcagcgggccggtgggcgccaagtccgacgtgatcgacgcggtggccatcgcacgtgcggccctggccacccctgacctggcccgccaccggattgacccgcaggtgcggaaggtgcgttcgctggtgggcctgcgccagaacctgaccgatcagcgtgtggccctgaccaaccgggtgctggcggcggtgcacatcgagctggaccaccgcctgggcaagggggcattgaaaacccgggccaaggtgggtcgggtgcgtgctctggtggagggggccgagctggacgaggtggcgcggtgggtgctgctggagcagctggaggagatccacaccctgttcgtgcgtgctgccgaggtggagcggcgtctcaaggagctggtggagccgttggcgccgaacttgttggggattcgtggtgtgggtgtggtctgggctgcggtgttgctctcgcaggtgggggatgtgtcgcggtttgcgacctcggcgaagatggcgcggtgggcggggagcgcgccgattccggtgttttcctctgggcgggatcgtcatcggttgcaccggggtgggaaccggcaggtgaaccgggcgctgcactcgatcggggtggtccaggttcggcttggtgagccagcgcgggagttcgtgcgttcccgggaggaggctaagggcaccaagggtgcgtatcgggctttgaagcggcatctggcggatgtggtgtatcgggcgatggtcgctgatcaagtggtgagagggcgggctgaggtctctcttcagcccgccacttgacatagaagcg

SEQ ID NO: 1062 - DNA, 1313 bp, unidentified
  source 1..1313: mol_type = unassigned DNA; note = element_1372b12
  misc_feature 1..2: note = core
  misc_feature 3..77: note = LE
  misc_feature 78..1094: note = CDS
  misc_feature 1095..1313: note = RE
  misc_feature 1097..1307: note = bridgeRNA
ttaattagatggttcgcctcacctctaagctagctcagctaatcttagagttaggcaaataaaagaggcaaaccatcatgtcattaattaaagtgcttggtatcgatttaggcaaatccacatttcatttagttggtcatgaccactcaggtcgagagcagctaagacgcaaattcaaccgcaaacaactccttcagtttttagtcaaacacgagccagtcaccatagcgatggagtcttgtggaggaagtcactggttagctcgtaaactagtgtcatttggccatcaagttaagctaatccctcctcaatatgtaaaaccttacgttaaaaccaataaaaatgattttattgacgcggatgccatagcagaagctgcgacacgaccttctatgcgctttgtcagtataaaaacggaagaagctcaggtgattgccgttattcagcgtattcgggctagctatatcaaagagcgcacagcttgcatgtcacgcattggcgctatcttacttgaatttggtatgagctttcctagaggacatagccaaatgaagcaattatttcagtggctagcagagcataaagcgtcaatcagtcccatgttgatgcttgagcttgttgaacatcatgaatattacacacaccttaataccctcatacaaaaacaagataaaaagctaaccgaattagtttcaaaagacgaacgcgctcaattgctaaaaaccattcctggcgtgggagacttaacagcaagccgctgtttatctgacattagtaatgctcaagattttaaaaatggtcgtcatatggcgtcatggcttggattagttcctcatcagcactcgaccggcggtaaatcgacgttactagggattagcaagcgtggtaacaaatccttacgtacgttatttatccacggagctagggcattgatgtcacgaccagagttagcgagtaaatgctttggagagtggctcgtcaacctcagggcaaggaaaccttataacgttgcagtggtcgcgttagccaataagctagctcgcatctcatggtcagtcatggtgacgaaacaaccatttaaaataactgtttaacccgaatttgcaatggataatgaagatgacaaaacgattaattggctaggttgaagacctgacacaaaaaacagcatgttaataatgctttgggctttttgaggacaatctagcgcggatctcatcgtggagcgggtgatatgcctatgactccgaatacattagcgcaaatcaccccgttatcgaaatatcacttgcaataacgaggcgaaccataca

SEQ ID NO: 1063 - DNA, 1325 bp, unidentified
  source 1..1325: mol_type = unassigned DNA; note = element_137416e
  misc_feature 1: note = core
  misc_feature 2..67: note = LE
  misc_feature 68..1108: note = CDS
  misc_feature 1109..1325: note = RE
  misc_feature 1107..1313: note = bridgeRNA
ctatgtatggactcccccaacccagttgcctaggttggaggtcgaccaaaaccataggagtccatacatgtcgtattcaacaacagttggggtcgacttagcaaagaacgtcatccagatctcggtcgtgaatggccgaggcaaagagcttttaaatcgctcgctcactcgcaagaagtttgcagagtttctgggcaagcagaagccatcactcgttgccttcgagtcgtgcgccacagcgcactactggtcgcgtgccgcgaagcggcacgggcatgaagtgcgcattatcccggccaaggccgtggcgccgttccgccagggccacaagaccgacagcaacgacgcgctcgctgttgccgaggcagcccgacgtccgaacatcaaggaagcaccgatcaagtcggtggagcagcagggcctgcaggcgatacttcgcgcacgggatcgcctgattcaggagtgcatcgcacagtcgaaccacatgcgtggcatcctgctcgagttcggcatcgccatcccgctgggtttcgctgcactactgcgcacgctgcccgaggtgctcgaggatggcgataacgagctgccggacttctaccggccaacgctgcaccgtatgtatcaccgcatgcttgaacttcgagaggacatcgacgcgatgaccaaggaagtcggggagctggtgaagaaccacccggtgtgcagcaggctgaccgatatcgagggcatcggccctatcggcgcgatgtcactctacgccaccctcggttctggcgccgcgttcagtaagggccgagaggcatctgcgtatgtcgggttgacgccaaggcaatacagcagcggcggcaaagccaacatcgtgggactgagcaaatgcgttggcaaccgcaaattgcgttccgtcttgatccagggtgcgttagcctatgtgtatcgcatgaaggaaccgcgatcgacaaaggatcgctggttgagggaactcattgagcgagcgggaccgcgccgcgcggcggtcgcgctcgcgaacaagaatgtaagaacggcctgggcgctgattgcccagggaacggaataccaacgtcgaccgcaactggagatggctgcttagaacgtcctgcaaacagaaacctcgtatcagattaaagatatctgctccggcaaaacctacaccgctttgaggccctagagcccactgacccttagaggaaccggagtgcgcatacatagagggcccggagatagcgtctccaaacagaggccgaatatacaaacgcgtcttaactctggtcgaagaatctgtctgctagactgggggagtccatata

SEQ ID NO: 1064 - DNA, 1432 bp, unidentified
  source 1..1432: mol_type = unassigned DNA; note = element_137dcfd
  misc_feature 1: note = core
  misc_feature 2..62: note = LE
  misc_feature 63..1100: note = CDS
  misc_feature 1101..1432: note = RE
  misc_feature 1210..1426: note = bridgeRNA
tactggtatggtccgccgtctagacccctggagggtgtagaggtgtagacaggaggcgtcccatggagattcacacgatcggcattgatttagcaaagaccatttttcacctcgtaggtgttaacgcacgcggcgaagtcgtggtgcgcaagaagtgttcgcgcaaccagctgctgcgcttcacatcgaatctgcgcgtgtccctgatcggcatggaggcctgcggagggtcgcacttcctgggtcgggctttacgagaacaggggcatgatgtacgcctgatgccagcccagtatgtgaagccgtacgtgaagaccaacaagaacgactacatcgatgccgaagccattgctgaggcggttacgcgtcccagtatgcgtttcgtaccgatcaagacagatgatcaactggatctgcagtctcttcaccgggtacgcgagcggtgggtggggcgtcgtaccgcggtgatcaaccagattcgtggcatgctgctggagcgcggcatcaccgtgacgaagggacgccgccatatcgaagagtcgctgcccgggatcctggaggacggcgacaacaagctctcaggtgcgttgcgggtgctgcttaccgagttgcgactggagatgcagtatctcggccgacagatcgaggaatcggaccagctgattctgcgcatcgccagcgaacttgaaccctgccggcgactggtcgcgatccccggaattggacccgtgatcgccacggccacgattgcagcgatcggtaacggagcagcgttcaaaaaggggcgcggatttgccgcttggttgggagtagttccaggcgagcactctaccgggggcaagcaaacgctgactaagacgagcaggcgcggaaacaggtacttgcgcaaactcttcgtgcagggagcacatgccgtactgcaacagaggaggacacaatctaccggcctgagcacgtggctggcacaactcacaacccgtaagcgcattcaagtcgcggcagtagctttagccaataagctggcgcgcatggtctgggcggttttgtacaagggagaagcctatcgcccgccgctgttaccgcaacctgtcgtagcttgatggcctgcacatgacgcctggcaaaaaagccaggcttggaaatcgctgagcgattcccacatctgcagtccaacggcgacggctactgatttcagtctttgatttcctgccaggtttgctggcgaaccatgagatggcacaacggtcgatcccggcgctcccgaaacctgtaatacggaaaagcctaccaaggccgcgaaagtaactaggacgagggcgcagcgcattccattcaggccaggagacagctactccaacaaaggccggatacattcgcgcagaccaacacgccattcccatttttcgcttgcaatacggcggcggaccataca

SEQ ID NO: 1065 - DNA, 1284 bp, unidentified
  source 1..1284: mol_type = unassigned DNA; note = element_13862ac
  misc_feature 1..3: note = core
  misc_feature 4..216: note = LE
  misc_feature 217..1167: note = CDS
  misc_feature 1168..1284: note = RE
  misc_feature 15..199: note = bridgeRNA
gcttgtgtcttcaagggctcttaaactgagaagggtgagagcagtggatggcagactgaaagccagcggtgctttaagcacgagtgggagcctagtcgccatccacctctcactctgacccgaagcccgaacagttggatgagccgcaaaactcgaaatcacaagctagggataggtcagagtgctctcactccttgagtgtaagagggcttggcgatgatttcctactacgttggtcttgatgtttcgaaagcgactgtggatgtggggtttcttcctgcgactttcccgcagtttaagatcagtaacgaccctgatggcttcgcccagttgatcgcatgcctggacgaacttgaggtcgagcgggtcctgcttgaggccaccggcggttatgaaagggccttgttcaaaaccttgcaattaaggggattgaacgtaattcgcgttaatcccaagcgtgctcgcgattacatgagatccatgggcacgtatgccaagaccgacaggatcgacgctcagaagctggcgaagtttgctcgagatatcgaggacttgccgccggttgaacctaatcaggctcgggatgagctgggggagttgatcaagctgcgaggcaacctggtcaaggatcgagacagcaacaagcgcaggatgcagcagacgacttaccgcaaagccatatccgactacgccaatcacatcacttacctgaacaagaagatcaaggccttggaagcgtcgattgagaaggcctcgaacgcgctggatcaggagaaggccagtcggctgagatcggtgaaagggattggagccattacgtgcggcacgctcatggcatcgctacctgagcttgggcgcgtgacagggcgcaagatcgcggctctggcaggattggcaccgtacaacaatgacagcggcaagaagagcggccccaggtcgattgagggcgggcgccatgcagtgcgctgcgcgctctacatgtcgacctggtcggtggttcgacacgacccggaagtcaaagccgaatatgaggctctgcgagcacgaggcaagcttgccaaagtcgctgtggtggcatgtatgcgcaagctcttggtacgtcttaacgcaatgctgcgagatggctcgaagtggaaagaaccgaggtctcaggtacccgcaacctgatagcgcacgagggctgatttactgaaaagcgggcttcgccagcgacaccgctacgcggtatcgctggcgaagccatgcctgacgggatcgttttaaaaaaaatcctcacagacagtt

SEQ ID NO: 1066 - DNA, 1457 bp, unidentified
  source 1..1457: mol_type = unassigned DNA; note = element_1386a6f
  misc_feature 1..2: note = core
  misc_feature 3..123: note = LE
  misc_feature 124..1161: note = CDS
  misc_feature 1162..1457: note = RE
  misc_feature 1201..1405: note = bridgeRNA
agatgggatattcggcaggagcccacatctctggcggcagtgcgcggtaggtgctgcgcttctggctgatgttataacgtggtctgttgaaacagccacaagcatcagaggaggaagcgcagcatggaccactatgccggattggacgtttcggtgaaagagacgtcggtttgcatcatcaatgaagctggggcgatttgccgggaactgaaagttcccagccatcccaatgacttggtcggggccttgaaggatcctgcctggcgactggttcggatcgggctggaggcgggacccctgtcacaatggctgttccgtggattaactgacgctggattgcccgtgacctgtatcgagacccgccacacgaaggcgtttctgaaggcgcaaatcaacaagagcgaccgtaacgatgcgcggggcatcgcgcagatgatgcgggtcaatctgctccggcccgtccacgtgaaaacgctggcaagccagaaccatcgcgccctgcttaccgcccgcaagctgctgcaggagaaagccatcgccatcgagaacgatatccgcggtctattgcgcaatttcgggctcaaggtcggcaccgtcgggatggtgaagttcgaggagcggattcgtgaacttgtcgagagtctaccggaaatgggcgagatcatcgaagccttgctggcggcccggcagaaattgcacgaggaattcgcccggctccatcggaagctgctgatggtggtcagggatgacgcggtctgccggcgtctgatgacgattcccggtgtcggtccagtcgtctcgcttgctttcaccagtacgatcgacactccggcccggttccggaactcgaaggcccttggtcccgtgctgggattgacgccggtcctcaaacaatcgggggagagcaatcgtgtcggtcacatctcacgttgcggcgatgaaatgatgcgaacgctgctttatgagggcgcgcagaccttgttgacgcgagtcaagaagtggtcctggctgaaagcctgggcgatgaacatcgccagaagacgtggcgtacgaaaggcgatcgtcgcactcgcccgccgattggcggtgatcatgcatcggatgtgggtagacggcacggaatttcgctggacaagggagaacgcgccgctcgcagcctgacaaataaccgaaacgcaaagccaaacaggagcggccattcgagttccgccagccaaccggcggagagatgtccctcgcgggacgatggatgaggtgagttcgcgctggcctttgtatcgatcgtgacaccgcgtgcgatcagtacgcccattagattgttccgcctcgttctactgagcccattctgggagagccgaacggctgatcccgaagagaagcgcgggcccgcgggtgactctgaagatcaaagattgccgctatcagaatgcgcttgacagaaccttgccgaatagaga

SEQ ID NO: 1067 - DNA, 1612 bp, unidentified
  source 1..1612: mol_type = unassigned DNA; note = element_1388813
  misc_feature 1..3: note = core
  misc_feature 4..293: note = LE
  misc_feature 294..1469: note = CDS
  misc_feature 1470..1612: note = RE
  misc_feature 46..273: note = bridgeRNA
actcgtattataaagtagtagtgtttatagaccctctccaaggtcttaatactatttttatcatagtctctctctttaccttttctatgggtatgactatgatatataagatgctgtggactggtgtcacctcactaccacttgatggtttcagaaagtgtccagccacagtctctttgtttgattgttaatcagttagataccgcatgacggtttatttagaacgagtttacaactgcggagagcacctgtggttctaaaacagtgtcaaatatattcaaaggagatttgtcatgatttacattggtattgatgtcgcaaaagacaaacacgactgctttatcacaaattcagaaggtgaagcgcttttcaattcatttaccattccaaacagtgcagatggattcaatgacctctatcaaaaaatttcttccctgacaaatgatttttctaacgtaaaagtaggactggaagccaccggacactacaattacaatctgttaggatttctcattgataaaggtctccccacctttgtcatcaaccctttacataccaatctgttccgtaaaagcctcagccttagacagacgaaaacagataaagtggatgctcatacgattgctcttatgatgatgtctggagtaaacttacagtcctactcagacacatcttaccacaacgaggaacttaagtcattaaccagatacagatttgataaggtaaaggaacgagcgaagctgaaaacttctgtctctcgactcgttaacatccttttccctgaactggaaaaacttgtacctacactccatatggtttctgtctattcgctcctcgctgaacttccttcctcgtctcagattgcctcctgccatttaacacaccttactaagctgctggggactgcttctaaaggacgctacggcaaggaaaaagctatggaaatcagaactgccgccaggcaatccataggttcaaatatgcccgctaaatctcttgaattaaagcatacaattaagcttattcaggaactaagttcagagattgatgaaatagaaagctccatcaaatccattatggatgccattcactccccaatcctttctatccctggcatcaattaccggatgggctcaatgattatcgccgaaattggagacttcaaccgttttagttcccccgataaaatacttgcttatgcagggctttctccctctacctatcagtcagggcagcttgatagcagttattcccacatggaaaagcgtggttctcgttatcttcgttacgccctgtttaatgcaacaaaatttgtttgtatgtgggacaatacatttgccgcttatcttgccaaaaagcgctccgaaggaaaacattataatgttgccatatcccatgccgccaagaaactggtgcgggttatttaccagatggaaaaaacgggccagccttataagagagcggcgtaggctctaacctcatatctccttttttgagcaccggaaatgatgctctatttgtcatgcggttttcaaggtgctgatttatctgaagtgcattcctccaattcattcataaattttcattttaggccttgacttttaatagttag

SEQ ID NO: 1068 - DNA, 1392 bp, unidentified
  source 1..1392: mol_type = unassigned DNA; note = element_1389fac
  misc_feature 1..2: note = core
  misc_feature 3..86: note = LE
  misc_feature 87..1112: note = CDS
  misc_feature 1113..1392: note = RE
  misc_feature 1156..1379: note = bridgeRNA
tgatgtggtggacggcgcccgctcccggcatcgctgtgccatagggtgatcgttgttagacgaatcacatgaggggagccgtccacatgcaaattaccacgattggtttggatcttgccaagaacgtgttccaggtccacggcatcgacgcggccgaaaaagtcgtcgtcaggaagcaactgcggcggcgccagatgctggaattttttaaggcgctaccgccgtgcttgattggcatggaggcctgcgcgacctcgcactattgggcgcgggagctgacgaaactcggtcatgaagtgcgtctgatgccggcgaaagacgtgaaggcctacatcaagcgcaacaagaacgacgcagccgacgctgaggcgatctgtgaggcggtacgacgtccgaccatgcgtttcgtacaaatcaaatcggccgagcagcagggccagttgatgcagcaccgcgcgcgagatcttctgatgcggcaacgaactcaagtaatcaatgcaatgcgggcgcatttggccgaacttggcattccggcccggcaagggcgcgaagggctcaaggagctaatggccattgtggcggatgatgatgacacgcgcgtgccggtcaatgctcgtgcgagcctcatggttctggcggcgcagcttcaggccttgcagacgctgatcggatcaatcgagaagcggatcattaaacagcatcgcgtgaacgaggcaagccagcggctggagagcatcccgggaattggtgttatcggggccactgcgattgccgcgaccgtggcggatcccaaagtttttcgatcgggtcgtgactttgctgcgtggatcgggctggtgccacgagaagcctcaacaggcgggaagcagaagctcgggccaatctcgaaacaaggcgatcgctatttgcgacgcatcctggtggtcggagcctgcgcggtattgaaactggcgcggcagaagccggagaagtatccctggctcacacagcttctcgcccgacgaccgttcaaggttgttgcggtcgcgcttgccaacaagatggcgcgtatggcctgggcgctattggccaacggcggaacctatcgagcgcctcggatcgcggcggcataagaaggagctcgtcgatcggaggatgaagttgtccgtgtgcgttcatgaactgcaggggtgatgacgacattgatgcgaaacgatcgagaccgtcgatcgggaaaacccgggatgggccacgcgaggaaagaacgcgtgcttttgtttgggacccgatcagcggattacatcagggccagcagccaaagcggctgcattcaaaggccgaatacatggctgcacccgaacgtttcgctgaattgtccgatttttcccttgcaccgcgggcgccgtccataca

SEQ ID NO: 1069 - DNA, 1507 bp, unidentified
  source 1..1507: mol_type = unassigned DNA; note = element_139013d
  misc_feature 1..2: note = core
  misc_feature 3..186: note = LE
  misc_feature 187..1482: note = CDS
  misc_feature 1483..1507: note = RE
ctgatggctctaccctcccccctcgaggtcttccccggggaacgcttcagttgctcgtcccttgaggactgatgtgagatggcgtccccgggggacggcctcggaggtccgacgtccgcaagggtgtcgtcccacgaggactggtccatcagcacgacgccgtgcctccatcgagcggtcttccccatgaagaagggaggcgaagtgctcgggatcgggatcgactggtccgaggagttccacctcgtcgcgctgggccgccccggcgagggtgtgatcgaggtctcgcgcgtcgaacatcacccgaaggcggtcgacgcgttggtcgccaagatcgctgggctcgagcccgaccccggcgaggtccgggtggtgatcgagacccgccacgggctgctcgtggagcgcctggttgatgcggggtacgtcgtggtgccggtcaacccggacctcgtcgcgcgccggcgcggaccggccaagaagaaggatgacgccgaggacgcccggatcgcttgcctgatcgcgcttgaccgccacgagcggcttcgcccgctcatcccccacggaaagatcgccggggagcttcgcgcgatcgctcgggacgacgagcgcgcggcccgagacgagcgcaggctcctcaaccggttgcgccaggacctcatcgcgaccttccccgcggcgatcgcgatcgggggcgaagacctcggggctccgacgttcctggggctgctggaacgatggcccgcggcgaacgccctggcggaggcctcgaggagggagctggtggcgttcgcacgatcgtgccgccacgggtggccggagcgcttcgcggacagggtcgaggcctcgctcgtggccgagtacttcaggcccaaggactacctggtgcgggccaaggccgacacgatccggctcgtcgcgacccagctgctcgcgatcggtcatcagcgacgggcctgggagcgacgcatgggggagctgctgctcggtgcaccgcggcacggacgcgatcaccagcccaaaggagacgggctggggaagggctttcctggcggcgagatctacctgagctttccgggcctcggtgaccgcctcgccgccaggatcgccggtgagatcggcgatcatccccaacagttcgacacgccgaactcgctgcaatgctacgcgggcaaggccccggtcacccgccgctcgggcaagtccgagctcgtcgtggcgtgtcggctcgcgcacaaccgctacctcggggcggcggtgcagcagtgggcgttctgctcgctcaggcgctcggggtgggcgcgggagttctacgacgcgcagcgaaccagggggaaggggcatcatgccgcgctgcgagcgctcgggaatcgctggctcgagatcttgtggcactgcgtgtgcaaaggagtcgtctacggcgaagcggtccacgtggccaaccggaatcgagcccgcggcaggacggacgtggccgcctgagaaggcggtggttgacaaagggtgt

SEQ ID NO: 1070 - DNA, 1335 bp, unidentified
  source 1..1335: mol_type = unassigned DNA; note = element_1393442
  misc_feature 1..2: note = core
  misc_feature 3..300: note = LE
  misc_feature 301..1101: note = CDS
  misc_feature 1102..1335: note = RE
  misc_feature 1108..1322: note = bridgeRNA
gatgaggtggatggttcctgcaccacctgtatcgaacgtgcgaaagtacagttgtcactaactgccaggaaagaagccacccaatgacggtaaagactgtgggcctggatttggccaaggacgttttcaagtgcactgtgtttcggccatggggcgtcggatcatcaacaggaagatcaaacgcgcgaagctgatctcctttttcgagacattgccgcgctgtgtggttgggacagaggcttgcggttcatcccatcactggggggctagctgagcaagtttggccatgacgttcggctcatgccagcagcctatgtcaaaccctatttgaagcgcggcaagacagacgcagcggatgccgaggcgatttgtgaagcagtgcgtcgaccaaccatgcgctttttcgagatcaagtccgaagaccagcaggccgttcttgcaatacaccgcgcccgggatctggtcgttaggcagcgcacccaggtcgtcaatatgatccgcagcatcctccgggaatttcaacatattctgccaaccggtatcgaggctgtttctaaattcgctcgggaacacggcaccgaagcgcagttggaaatgcccgagatcgcggacgaaattcttggcgtgatgtgtcatcaactgaacggactcaatgcgcaggttgatgggcttaccaaactgatcgaacaacacgcatggtatgatcccgatgcacgacgtctgatgagaatgccggggatcggaccgatcaccgcttcggccgttgtcgccaccattgacgatgcaaaacagttcgagaccggactaaatttggcggcttggctggggctgacaccgctgaacaaatccagtggcggtcgagagcgcctcgggcggatcacaaagaagggtgaccgttacatccgaaaactgttgatcatcggaatgacgtcgcgtgcatttatggcgaagaacaaacctgagaaagcggatatttggaccgccaagctgttcgacgagaaacccttcaggctggcaacggtcgccatggcgaacaaatccgcccggatcatctgggcgccactaacgaaacaggaagaataccggcagccgatcgcttgatcctgccacgagatgcaagacgcttgatgtgatgatgcgaaacgaagtcaaccaagagtaacgaaagcccggcgaatgtcgtggcccctgaggtcgtttagccgataggaaccttgctcgcggaactcatcagggccagtggcaactgccaagcaaacaggccggacacaggactgaactgaaggaccatcgcaatcacagaaatctctggcaatgcaggagccatctacacaa

SEQ ID NO: 1071 - DNA, 1485 bp, unidentified
  source 1..1485: mol_type = unassigned DNA; note = element_1396495
  misc_feature 1..2: note = core
  misc_feature 3..244: note = LE
  misc_feature 245..1465: note = CDS
  misc_feature 1466..1485: note = RE
  misc_feature 6..245: note = bridgeRNA
ctaatgggagttaccgggtcacctgatcgggcagattcggtgcctggtagccgccggtgagtgagcacttccatcacccgggccgatgtttgagccctggggtcagaccgtgccctcaccggtggtcaggggtcttgatcgctgatgggatgtcgtgcccgccccagtggcgtgagcactggtccattaggccgccgaccggctcctgcgggctgctggagatgtcgtcgatcttggaggccggatgctgttcgtcggagatgactgggctgaagaccatcacgatatcgaggtccaagatgagcacgggcgggcggtcaaacggatccagctgagcgagggcatggccgggatggcccgcttccacgcgctggtggccgagttcctgcccgaggatgccgaaccggctgacgtgctggtgtgcatcgagaccgatcggggcccctgggtgcgggctttggtggcggccggttaccgcgttttcgcggtcaatcccaagcaggccgcccggcaccgggagatcatcagcaactcgggggccaagagtgacaagggcgacgcccatgggctggccgacatggtccgcacccgccgtcaccagttaccgcaggtcgcgggagactccgatgtggccgaggccgtcaaggtcgtcacccgggcgcatcagacgctgctgtgggagcgcacccggcacatgttgcggctgcgcagtgcgttgcgggattacttccccgctgcgctggaggcgttcaaacccctgggcctgacctcgccggccgtgctcaggctcctggccaaggccccgactgcggcgacggcggccaaactgaccgtcagccagatcagtgcggcgctcaaggggcaccggaacatcccaggcaaggccgctgcgatccagcaggcgctgcgtacccagcagctcggtcaggccgagcttgtcgctgccgcctacgcttcgacggttcgggccctggtcgcggtcatcaccacgctgaacaccgagatcaacaacttggagggtgaggtcgaggcgcattttggccggcacccggacgctgagatctacctcagccagcccggtcttggcgtcgtactcggcgcccgggtgctcgcagagttcggcgatgccaagaaccgctacgccagcgccaaggcacgcaagaattacgccggaaccagcccgatcacccgccagtccggcaagaccaagaccgtgcacgcgcgcttcgtccacaacgaccggctcgtcgacgccctccacctgcaagccagctgcgcgatcctgcacgactgcgaggtccgcgcctactacgacgaactccgcgcccgagatgtcggacacaacgccgctctccgccaggtcggtaaccgcctcgtgggcatcctgcacggctgcctcaaaaccggcacccactacgaccagacaaccgcttggcatcaccgtcacgacacccaagccgcttgacacccaagctccagggatgt

SEQ ID NO: 1072 - DNA, 1277 bp, unidentified
  source 1..1277: mol_type = unassigned DNA; note = element_13a040e
  misc_feature 1: note = core
  misc_feature 2..226: note = LE
  misc_feature 227..1012: note = CDS
  misc_feature 1013..1277: note = RE
  misc_feature 1038..1271: note = bridgeRNA
gaatgacatggattccccctaccgaggatctgccacacttatgtggtacttaattgcaccggaggcaccatgtctgatttttcttatttctgtggtatcgacctagctaaaaaccacttcagtcttcatgccatagaccaaaatagtaaggtcataagtcggtaactcgctctaaactactgactacaatagcaaatatgccactcatgcgtataggcgttgaagcgtgtggtggtgcacattattgggaaagaacgaccttaatgatgctgttgccatatgcgaagctgttcagcgtccatcaactcgctttgtacccgtaaaatcccccgagcaacaagccatcttatcggtacatagaatgagagagcattgggttcgtgagcgcaccgcgcttatgaatcgcatgcgcgccctactttctgagttcgggttgatcattcccgttggtcgctcttcatttatgaaacaggttcccttaatgcttgaaggcgcagaaaatgaacttccacacctcgcaagaacggtgattgccgatgcgtatcaccaccttggtgaattgaatcaacgtatcaccgatactgagcaagttttcgactcgtttgctaaggtcagcgctaatgttcagcgagtgatgaaggttcgaggtattgggccgcaaaccgctactgcgatacttgcttcgataggcaatggttcccaatttgataaaagccgtgatttctctgcttggctaggactcgtaccaaaacaatattcgacgggaggaaagccacgcttaggtcggataaccaaacacggcgataaatacttacgaacactattagttcacggagtaaggaccgtgattgccaaccttggcgacaagcaagataagctaagtcagtggtgtcgaggcgttctagaacggagaggaatgaaccgagcaatagtggcacttgctgcgaaaaacgcacgaattatatggtcgcttttacacaatcaaacagaatatgaaaactatgctacttaagtaaaaacctaagcaacataaagagttaaacccaccgggtcattgcagacgctaatgatggagataggttaagaccacttgcggagagcctgttaatgcggcggacacactagatgtcatctaacgaataaggcaccgcagtcgcgcaagtcatcagggccacgacgtatgcgaatcgtcgataagtaggccgaatgtagagcggcagtccaaaacccatcaacataagtttagcggatgtttgacaaccgggggaatccatgta

SEQ ID NO: 1073 - DNA, 1642 bp, unidentified
  source 1..1642: mol_type = unassigned DNA; note = element_13a5d49
  misc_feature 1: note = core
  misc_feature 2..309: note = LE
  misc_feature 310..1548: note = CDS
  misc_feature 1549..1642: note = RE
tatgaccattcctttccgctgcgctccaaggcaccaaaatggatgaaacacaagtgcctctaacacagcaagtcgaaatttgttagaatgggcttgaggaagcaggcacactacagagcacgtggaggtgagtaggctcaacctcgtattggactgaatggctatgtgtgccggatgctctttcaagcaccaataattagggtttagtaccctgtaaccttatctttggagagacggactacttcaatctttcagcgagcgtccagtccctgcctgttctcctcaaatcttattttgaggggatgtgctatgcttaaaatcgtttaccccatctgctgcgggatggatgtccacaagtcctttgttgttgcttgtattgccacaaccaatgaccacggagtgaccaactacaaaagcaagcggttctccacttttacgggagatttacgccggtgtgcagattggctttctgagaacaactgcaaagatgtgtgcatggaatccaccgggaagtattggattcccatttacaatattttggaacacacctgcaatatcgtcctcgctcaccccaaatatgtgaaagccattcggggaaagaaaaccgacaagcgagatgccaagtggattgccgacatcttcaagcacgaccttgtttccggtagctttatccctccagcagatatccgccagcttcgggatttggtacgctatcactggaaacttacaaacttcaatgttggtgaaaagaaccgtgctcagaactgccttactgtttccaacattaaactggacgacgtattttcggatgtctttggaaaagctgcatcggcaattactaccaggctgttagaaagcaatgaaccttttgacgtaaagccctatcttactaaaaacatcaagaagcccattgagcagattcaagccgccgtggatggagaaatgtgtgccgaacaagctgaaaagctccgcattatccgttcccacatggatagtcttgaattgtgcaaactcaacttggaatccctgattctgtctactgcggaaaaatacattcctcaactcaaccttgttatgacggcgccgggtatccaatcttttgccgctatcggcattatctctgaaattggagtggatatgtccgtgtttcccacctcgaagcatctttgctcctgggctggtcttacgccacagaacaacgagagtgccgggaagaagaaaactaccagaatcagccgtgccggggcttacatcaaaccgttgcttgtgcagtgcgctctttgtgcgattcgtaccaagcagtttccagaggtccgtaaccgctatttggccctaaagaaacgcaggggccacaagaaagcgattattgctattgcaagaatgttgttgactgccatctacaacattctcaaatggaatgaagtgtacaattctgaactctaccgtaaagctgaccgacctcccgcacaccgtgaggtttctgtggaagaagcagtgtttatcctccagcgtcagggatatttggtgacggctcctgccgttacgtaggatttaagcacagcttgaacttcgcccgcatttagggggctcggttttgtgcgccctttttcggaatggtacttaaattacaatgtttcaacct

SEQ ID NO: 1074 - DNA, 1358 bp, unidentified
  source 1..1358: mol_type = unassigned DNA; note = element_13a7449
  misc_feature 1: note = core
  misc_feature 2..75: note = LE
  misc_feature 76..1101: note = CDS
  misc_feature 1102..1358: note = RE
  misc_feature 1124..1355: note = bridgeRNA
taatgagatggtcacccccgacaccctgcgagggctaggctttcgcagggtgttttattttcggaggccatcttcatgagcgaattagtgctggtcggtatcgatctcggcaaacacagttttcacctgcacggccaggacaaatcggggcgagaggtgtttcgcaagaagatctcacggcagcagatgatgaggttcttcggcaatctccctgcatgcaccatagtgatggaggcctgtgctggtgcacatttcgtcgctcgcgaactgatgatcatggggcatcaagccaagctgatttcaccgcagttcgttaggcccttcgtcaaaggcaacaaaaacgatttcgtcgatgccgaggcgatttgtgaagccgcgtcgcgcccgtctatgcgctttgtctcgcccaaaaccgaggcccagcagacactttctgtattgcatcgtctgcgtgagtcgctggtgcgcgaccgcaccaaaacagccaaccagatgcacggcttcttgctggagtttggcatcagtctgccaagagggctggctatcatgaaacgcctgtccagtgtcctggccgaacatgaactccctgttcgattgacggcgctgttgcaacggcttcatgaccactttgtctatttggatggacagatcaaagagctggataaagaactggcagaccaactggccaacgatgatctgggtagccgtttgctgagcctgccgtgtgtcgggccgatcaccgccagcctgctggctgtggaaatgggtggcggccagcagtatggatgcagccgcgacttcgccgcgtctgttggcttggtgccccggcagtacagcacgggcggcaaggcgaatttgctgggaatcagcaagcgcggtgacaagaatctcagacgactgctggttcagtgcgcccgggtttacatgcagcggctgaaacaccagaaaggggctctggccgattgggtgcgctcgctattgatgcgacggcattccaatgtggtggcctgtgccttggccaacaagctggcgcgcatcgcctgggcgatagcgacccaccataccgagtttgaaacagggccaaacaccttgagtgcctgaccctgcggttgttgctgcaccacgatttacctttcaggttttgcgatagctgaataacggatgacgtgaacggcccaccggcctggcgaagaacctgatccataaaccggctatatgaagccgctggggtttttaggatcgtcaggcgcgactctcatcatggcgcggggcgtgccccatatagacgccggatagattaaagcaagccaaccacttcgcccgctaatcagtattgcaaaaacgggggtgaccataga

SEQ ID NO: 1075 - DNA, 1402 bp, unidentified
  source 1..1402: mol_type = unassigned DNA; note = element_13b77d2
  misc_feature 1: note = core
  misc_feature 2..319: note = LE
  misc_feature 320..1396: note = CDS
  misc_feature 1397..1402: note = RE
  misc_feature 13..312: note = bridgeRNA
ctgtgagtcttggtagtggctggcccggggctggctggcagggtcggtctggccggttctctgtcgtgttcgtgacccactcgtggcttgacctgtgggctgttgctggcggtgtccttgccgagacctgtccgaacgcggcggcgagccggccgggcgccccgcccacgtcgttggcctgatcagaagcctgtcccacgcgtgttcacgcacgtgtggtgacccatcacagtgatgccgcgtcgtgacttcacccggggcgtgccggccggctcagccggccatgacacccaccccgttgcagcaaggagcgcatctgatggccggcccacaacccatcgtggcagacgtctacacctacgtcgtgggcgtggacacccacgccgcgacccaccactacgcgatcatcgaggcccgcaccggagggctgatcgatcacgccgagttccccacccacaccgccgggctgctgcgcgcagccgactggatcgcccgccgcaccgcagaagcgactgccggcgaggtcgaccgggtgttggtcagcattgagggcacccgcagctacggcgcccagctcaccgctgtgctgtcccagaccggctaccgcgtcgtcgacgccccgacccccaagcgcgagcgtggcagcggcaagaacgaccagatcgatgcggtcgtggccgcccgcggcagcctgcacaagcacctcgaccagctcgccgatgcccgcagcggtgagacctcagcgacgctgcaggtgctgctgagcgcccgcaactccatcaccggcgaacgcacccgcgcgatcaacgcgctgaccgcgctgctgcgcgtgcacgacctcggcgtcgacgcccgccgcaaacccacccgtcagaccatccgcagcatcgccgcctggcgtacccgacgaggcgacacccccacccaggccgtcgcacgccgcgaggcaatccgtctggccacccggatcctggccctggacgctgaggccaccagcaacgacaagcagctgcacgacatcgtcgccgcgaccgccccgaccctgctcgacctacccggcgtcggacccgtcaacgccgccaccgtcctaaccgcctggtcccaccccggacgcgtccgcaacgaagccagcttcgccaagatcgccggagtctgcccactcgaggtctcctccggacgccgccacgaacaccgcctcaaccgcaccggcgatcgacagctgaaccgcgccctgcactccatcgccagcaaccggatgaagtaccacccagccacccgcgactacgtcgcacgccgcaccgccgagtccctcaccaaaccccgcatccgccgctgcctcaagcgctacatcgcacgcgagatctaccgacacctcgcagcccttgacacgctatagaagcgt

SEQ ID NO: 1076 - DNA, 1581 bp, unidentified
  source 1..1581: mol_type = unassigned DNA; note = element_13bc6ef
  misc_feature 1..2: note = core
  misc_feature 3..246: note = LE
  misc_feature 247..1236: note = CDS
  misc_feature 1237..1581: note = RE
  misc_feature 5..224: note = bridgeRNA
tcgtattatatagtcatacccattctttacctgttctaaggtatagggtatgctgttgaagatgctgtggattggtctttgcctcctaccgcatagacggttacagaaaggctccaaccacagcctctttgtcaaagtgttaatcagttagataccgcatgacggtttatgtagaacgaggttacatcggcagagagccctgtggatccaatacagcgtcaaatacttttaaggaggatcatgtggatgatctatgttggtatcgatgttgcaaaggataaacacgattgctgcatcttgggatcagaagccgataagctctttccggtatttactattccgaataacaaggcgggctttgatgagctgtatgagaagatgttctctgtgactgatgataagaccaaaataaaagtaggtcttgaagctaccggtcactactcactcaatcttctcggatcgctcattgataaaggtctacccacctgtgttatcaacccgttacataccaatctttacagaaaaggtctaagccttagaaagacgaaaacggataaagtcgatgcccgttcgattgctatgatgttaatgactaataagactctcaagccctactcagacatatcatatcataacgaagaacttaagtcattaactcgttatcgtttcgacaaggttcaggagcgggcaaaactcaaatcttccgtagctcgtcttgtaaacatcctttttccggcgctggaaaaactcgtccccagccttcatatggcttcggtgtattccttgctgtccaaacttcccggagcctcttacattaccgaatgtcatcttacccatctcaaaaatctcctagaaacagcctctaaaggccattacggacgagatatggcgattactttaagaaacaccgccagggactctatcggctctgtgataccggcaaaatcaatggaactaaagcacaccatccatttgattaaggtgatgacggaagagattgatgaaattgaagattccatcaaatccatcatggacacttgtaactctccgattatgacaatccctgggattagctatcgtatgggagctatgatccttgcagagattggtgacttcactcgattcaactatgctgatcagatactggcattgcagggttgtcaccttctacctaccaatcaggtcaactggattctagctattctcatatggagaaacgaggttctcgttatctaagatatgctttgttcaatgccgcgaaatttgtctgcaagtgggatgagaatttcggagcttacctctcaaagaagataggcgaaggcaagcactataatgttgctatcggtcatgcaacgaaaaaactggtacgcaccatataccgaatggaacttacaggcgaagcctaccgaagataattcattaacttcacatccttttctgagagcacctgtttagatgttctatttgtcatgcgattttcaaggtactgattgaggcttaagcctgcctccgggctatctaaaacatctggtgatgtcttattcaaaaaatcttattttccaattgacttttaatagttag

SEQ ID NO: 1077 - DNA, 1313 bp, unidentified
  source 1..1313: mol_type = unassigned DNA; note = element_13be86d
  misc_feature 1: note = core
  misc_feature 2..67: note = LE
  misc_feature 68..1084: note = CDS
  misc_feature 1085..1313: note = RE
  misc_feature 1086..1306: note = bridgeRNA
taattagatggtacgctccacccattagctaaactcatagagttggctattacaggaggaaaccatcatgtcatttgcaaaagtcataggtattgatttaggtaaatcaacttttcatttaattggtcacgattatgctggccgtgaagtctttcgtcataaatattccagagcaaagttagtcgattttctatctgtccaagaatcaacaaccattgcgatggaggcttgttgtggtgctcactggctagcaaggaaatgcaaacaatttggtcatgaggtcaaactaataccagctcaatacgtaaagccttatgttaagtcccataagaatgattacattgatgctgacgcaattgcagaagctgcgacaaggcctaacatgcgatttgtttcagtcaaaacagaagaagctcaactaggtatagttattagacgtgttcgctctggctatattaaagaaagaaccgcctgtatgaaccgaattggctcgatactattggagtttggccttagctttccaagaggccatcatcaaatgaaaaacttgttccaatggatagcagaccaaaatgaagtgttaccaccgctattgattgcagagctaaccactcaatatgaatattacaatcagctaaacgtgtggattaaagcacaagaggaaaagttattagcattaaataaagaaaactatgtagctcagttattacaaacaattccaggtgttggacctatgactgcatcgtgctgtatctcagcagttggcagtccacaggatttcgacaatggtcgtaattttgcagcatggtttgggttagtgccatttcaatattcaacgggagggaagcccagaatgctaggtatttctaagcgagggaataaggagcttagagagttatttattcacgcagctcgtgccgttatgtggcgagataaaacagcagaaaagttctttggaacatggttgatagatttaaaatgtcgaaagccgtttaatgtggcgcttgtagctttagcaaataaaatagcaagaatagcttggtctgtaatgaccacgaagaagccttttgaaattagagtttaagtcagtttgcatatgataattaatgatgacaaaacggttagaccaccagattgaagaccttgtggacagttcagcaagaaaaatgctttctcgtttttgaggacaatctggcgcagatctcatcgtagagctgggactaatgttagtctctaatagactctgaatacattagcgcaaaccatctccgttattttagttattaacttgcaaaacggggcgtaccatacat

SEQ ID NO: 1078 - DNA, 1342 bp, unidentified
  source 1..1342: mol_type = unassigned DNA; note = element_13c4e78
  misc_feature 1..2: note = core
  misc_feature 3: note = LE
  misc_feature 4..1104: note = CDS
  misc_feature 1105..1342: note = RE
  misc_feature 1107..1339: note = bridgeRNA
ttaatgagatggtcagcccggtacgagaaccccggtaaatctaaagttatcggggttctcacttacttgaggagacctctcatggacaccttggaactgcttggcctggatattggaaaaagcacttttcatctcatcgggcacgatggcaaaggccatgaagtactacgcaagaaattcaatcgcaatcgcttgcttgagttcgctgcaaaactaaagccttgcaccatcgtgatggagtcctgcggcggttcgcactggcttgccaggaaactcatatctttcgggcatcaagtgaagttgatcgcgccgcaacatgtaaaaccttacgttaccggcaataaaaacgactacatcgatgctgctgccatctgtgaagccgcgtcccgccccagaacgcgctacgtcgcgatcaagacagtggagcagcaagtgctttcgacccagcaccgccttcgagaggcgctggtaggtcatcgaactcaaaccataaatcgcattcatgggttcttgcttgagtttggaattgcgttgcctgcgacaaaagcggcgatgaatcagattcaccaaattctggacgatcctgtcgcagagctgcctcaacagctgaagtgcgatattgaatatctgctggaagagatcaaacggctcaccggagaaataaaggcaattgaccgaagtatcaaagagcaagtggcagctgatgatgcgggaacacgcttaatgagcatccccggcatcggcccgatcatcgctagcgcgctgctggccgacatcggggacgcttccaattttcattcggctcgagactttgccgcttcgctaggactggtgccgaggcaatactcaacaggcgaccaaaccgtccttttgaacatcagcaaacgtggtgataagtatcttcgaaagcttctggtccaaggctcgcgggcagtgttggtgcggatcgacaaacgcaacgatgctcttggaaggtggtgcagagacctccttgcacggaagcacccaaacaaggttgcctgcgccttagccaataaactggcaagaatcgtatgggccgttttagctcgtggaggcagctacaacgcgcagttggtgacttgagcgaaacactaccggcttttgcgacgacaacgatgatgacgataaacagctcagatcctgcttgaaaacctggtaagcaaaacagctttcgaagctgaagcgtttttcaaggacaggcgggagcgactattcatcaagggccgagcggtgaaactgccaactatgagcccggatacattagcgcaagcatgctttaccgctcatcgcctgtggttgcaggaggtgggctgaccataca

SEQ ID NO: 1079 - DNA, 1176 bp, unidentified
  source 1..1176: mol_type = unassigned DNA; note = element_13d4cbe
  misc_feature 1..2: note = core
  misc_feature 3..232: note = LE
  misc_feature 233..1162: note = CDS
  misc_feature 1163..1176: note = RE
  misc_feature 27..227: note = bridgeRNA
cttgtatcttctttaacgggatcctgatttggggcaaaagggaggcaggtgtgagatccacgatgcagctgcttttgatcgagagattacgagcgccggttagtttgatccgcgcctgcccttgggcgtgtgaaataaactcgaacagttactggagcgaccaagccggccgaccccaggggcaggaccggcctggccagctcgcattttacaagcaggagttatctatcacgtgaaagaggaagttgtctacttaggagtggatgtggccaaggcctacttggacgcagcgatgggaagtgagaagcgtcgtttggctaacgatggaacgggccatcggcagttaatcaactggatcaagcaaatggaaacaaacgtgcaggtgatttgtgaacccagcggcggctacgagcggatgttgatccaggcgctggttggtgcacaagtcaaagtcagtctggtccaagccaaccgggtccggcagtttgctcgcgcggctggtattttggccaagaccgattcaatcgatgccgaggtgctatgcgcctttggacaagccatgcggccgcaaaccctcagcgcatcgaagctgcaacaggagcacttacgcgaactggagagtcagcgccggcatttaagtcgcttgctggtgatggagcaaaatcgaggggcccgtttgggtgactcttcggtgcggacattaaatcgcagtttgaccaaacagatccaaaagcagatcgagcgaatcgatctgctcattaccgagcacatcgcagggtcgcaagagctctcggccaaagcgcacaaactgacggcaattagcggagtgggtccgcacacggcggcattgctcctggcccagatgccggaactgggccaactcaaccgacgtgaggtagcagccttggttggagttgctccgtttaatcgcgacagcggcaaatggcgcggcaaacgtacgatctttggcggccgccgccacgtccgtcacggtctttacatggcagctttagtcgccgctcgacacaacccaatcttacgcgctttttaccagcgattgcgcgccgccggcaaaccagccaaacttgccctaaccgccacgatgcgaaaactcctgatcgtccttaacagcgtcctcaaacccgatccaatctatgcttgaaatcaagacagtta

SEQ ID NO: 1080 - DNA, 1493 bp, unidentified
  source 1..1493: mol_type = unassigned DNA; note = element_13db70e
  misc_feature 1..2: note = core
  misc_feature 3..246: note = LE
  misc_feature 247..1473: note = CDS
  misc_feature 1474..1493: note = RE
  misc_feature 13..246: note = bridgeRNA
ctaatgagttctgggagtgagccatccggcagactcctgatggatagatggccgccggcgggtgagcactcgttgatcctggacgttgagtcctgcagaaagatcgtgccgctgccggtcggtggggagagttgatcgctgatgggatgtcgtgcccgccgggttgcggcgtgagcactgcttcattaggtcgctgatggttctcccgctggctgtcgaggatcggagtcgaggacgggagatggggtgctgttcgttggcgacgactgggccgaggaccatcacgacgttgagctgatggacacctccggacgcacgctggtcaaggcgaggctgcccgagggtgtcgcggggatcgcgcggctgcacgcgatgatcggcgcggagctcggcgaggacgtgccggacgccgctgggcaggtcacgatcggcatcgagaccgatcggggtccgtgggtgcgggcattgatcgcggccgggtacacggtgttcgcggtcaacccgttgcaggccgcccgctaccgcgagcgtctcggggtgtcgggggccaagagcgacgccgccgatgcgcacatgctcgccgacatggtccgtaccgacgcccaccaactgcgcccggtcgccggtgacagcgtgcaggccgaggcggtcaaggtcgtcagccgaatgcacaagacgctgatctgggaacgcacccgcgccacgcagcggctgcgccacgcgctgcgcgagtacttcccggcggcgctgaccgcgttcgccgatctcgacgccgtggacaccttggagttgctgggcagagcgccggacccggcaagcgcagcccggttgagcatcagccagatcagcgcggcgctcaaacaggcccgccgccgcgacgtcgcggcgaaggccgcgacgattcaggccgtactgcgcggcgagcagcttgggcagcccgccgtggtcaccgccgcctacgccgccacggtgcgggcgctggtggcggtgctgggcaccctcaacgagcaggtcaaggccatgcaagggcaggtcgaggcccattttggccagcacccggacgctgagatcatcctgtcccagcccggactgggtgccatactcggcgcccgggtgctcgcagagttcggcgacgcacgtacccgctatgtctcggccaaggcccgcaagaactacgccggcaccagcccgatcacccgcgcgtccggcaagaagcgaaccgtcgctgcccggttcgtgcacaacgaccggctcatcgacgcgctgataacccaggcgttcgcgtcgctgcacgcctcgcccggcgcccgcgcctactacgaccggcaacgcgcccgcggagccacctacaacgccgcgctgcgccagctcgccaaccgcctcgtcggcatcctgcacggatgcctcaagaccggcaccccctacaacgagacgaccgcatggtcgcatcacctcggtggggctgttgcttgacattcaagctcctgggatgt

SEQ ID NO: 1081 - DNA, 1536 bp, unidentified
  source 1..1536: mol_type = unassigned DNA; note = element_13e1b9f
  misc_feature 1..2: note = core
  misc_feature 3..242: note = LE
  misc_feature 243..1421: note = CDS
  misc_feature 1422..1536: note = RE
  misc_feature 3..219: note = bridgeRNA
cttgtattatagagtagtagtttttaaagcccctctccaagggctgtgctacactgtaagggatgctgtggattggtgtagtcctcctaccacaagatggtttttgaaaggttccaaccacagccctttacaggtttgttaatcagttaaataccgccagacggtttatgtggaacaaggctacaaaggtaaagtgttctgtggaagacagcatcacaaattcaccattggaggtattcactatgacagttgttattggaattgatgttgctaaggataaacacgattgcttcattttgaacagcatgggagtcatcttggaggatgtattcacaattccaaatactctggagggtttcaatctcatgctctccaagatccgtacccacacaacaccgcaggataaaataaaagtagggcttgaggccaccggacactatagctacaatctgcttggatttcttctgaacaacggtctgaccacctatgttctgaatcctctgcaaacaaacctctaccgaaagagcctcaccctgagaaagacgaagaccgatcgtgtggacgctcgaatgattgcatctatgctgttatccgatgtgggcctcaaaccctacacggatacagcatatcacaatgaggagctaaagtcactaaccagataccggcttgacaaggttcaggaccgggccaagctgaaaagctccgtgtccagattggtctgtattctctttcctgagctggaaaagttggtttcaactcttcatatggcatctatttacgcacttctggaagagtttcctggtgcaaaacagattgcaaatgccaatctgacgcacctgaaaaatcttctggccaccgcttccaaaggccgttatggacgagagaaggccgttgagattagggacacagccagagcatccattgggtctcatatgcctgccaagagtctggaactgaggcatacaattcacttgatccgagaactggacagagaaatcaatgacattgaagcggagatccagaaaatcatggatgaactggattctcccattaccacgatccccggcgttggacttcagatgggcgctatgattctggccgaggttggggacttctacaactttgattctccggataaagtccttgcctatgcagggctgtctccgtctacttaccagtctggacaactcaaaaactgctatccgcacatggagaagcgtggttcccgatatctccgatacgcccttttcaacgctgccaaatacgtttgcatctggaaccccactttcgctgcttaccttgcgaagaagcgaagtgagggcaagcattactttgtagccgtttcccacgctgccaagaaactggttcgcctgatcttcgctttggaaagatctgggcagtcctaccgacaagcagcctgattcaatctgttagccgaatgaggcccttaagagcctctgctttgctataccctttttagaccatctggtgaaaaacacttccactcattttaggggttgacttttaatagttaat

SEQ ID NO: 1082 - DNA, 1357 bp, unidentified
  source 1..1357: mol_type = unassigned DNA; note = element_13e1e2d
  misc_feature 1..2: note = core
  misc_feature 3..45: note = LE
  misc_feature 46..1107: note = CDS
  misc_feature 1108..1357: note = RE
  misc_feature 1125..1344: note = bridgeRNA
tgatgtggtggacggcctccgctcccggcatcgcaatgtgccaaagtgtggctgtcgaagtcacataagggagagccgtccacggagaagattaccacaattggtttggatatcgccaagcatgtatttcaggttcacgggatcaatggtgccggcgcgacggtgagccgccgccggctgcgccgcgacgatgtcgttgggttcttcaaggcattgccgccatgcctgatcggaatcgacgcatgcgcgactggacaccactgggctcgggttcttatggcgctgggtcacgaggttcggctgatgccggcgtcttacgtcaagccatacgtgaagcggcagaagaacgacgcgacagatgccgaggcgatttgcgaggcggtgacgcggccgacgatgcgcttcgttccagtgaagagcgaggagcaacagggtgtgctgatgctgcatcgggtccgcgagcttttgatccggcagcggacaatgctggtgaacgccttgcgtggccacttggcggagttcggcatcgtaacgcgacagggcatcgccggcgtcggaatgctgatcgcgttggtcgacgacgatgatcacgatctcatcccgccgcttgcgcggtccgcgcttcttccgctgatcgggcagttgcgggagctgcacgagaagatcagcgagctggatcgccaaattcatgcttggcatcgctcgaacgaactgagccgccgccttgagacgatccctggaattggcccgatcactgccagcgcaattgccgcgacggtgaccgacgcgtcgctcttcaaatccggccgacaattggcggcatggataggcctggtgccgcggcagaactcatcgggtggcaaggaccgcctcggaaggatcagcaaacaaggcgatccctatctccgccggcttctcgttgtgggcgcgcacgcggtgcttcgtttcagcggcaaggctaaagttgcaccgacgcgttgggccgccgaacttctggtgaagaagccgtgcaacgtcgtcgctgttgctttggccaacaagatggcgcggatcgtctgggcgttgatgacgacgggcaggcgctttgaggcgaccgccgccctttgaatgctcacagagaatgcagaaattggtgaggtgctgatggcgtgatggcgaacggtcgagccgggatcggacaaacccgatcagtgggtgccgcttgaaagcgcgttgacctgtctgggatccgatcagcggactacatcagggccagcggcatgaacgcgccgcaatcaaaggccgtatacatgcctgcacccgaccaatctgccggaaacaccaaactgccccttgccacgcggaggccgtccataca

SEQ ID NO: 1083 - DNA, 1581 bp, unidentified
  source 1..1581: mol_type = unassigned DNA; note = element_13e7327
  misc_feature 1: note = core
  misc_feature 2..526: note = LE
  misc_feature 527..1459: note = CDS
  misc_feature 1460..1581: note = RE
tcacgtataatccaattatcttagatggtaattggatttttcctttctcccagttaacactgggtatttatttccatctctgatatattttgaaaaggcactgtggatctgtatctataacttttacagctttgactggtatgaggtgactcagaccacagcttttcgtctattactgttaatcagtttgttaacgcatcgacgtttttatttacgtgattacacagccgaattctctgtggaagacagcagtgctcaaaatatttatcaggaggtataaacctatgtcaatgtacttattggaattgatatttccaagtacaaacatgattgctgcatcatttctgcagctaatcaaaaagtagtttctaaagtcataatcaaaaacaataaagccggctttaatgaactgcttacaatcattcattctcttgcaaatcctgcggacataagaatagggtttgaatcaactgcccattatgctctcaatcttgaactcttccttgaaaattctctcctaaccttcatggaagtaaatcctgttctcatcagtgaatacaagaaatccaaaacacttaggcgtacaaaaaccgactctgttgactgtgaatcaatagctcgttggttaatgactgttgaatacaaaccccattcaaaaggattttaccatgcttactctttaaagtcattaactcgtttacgcgataaacttatccgacagcgttctttctatcttgttaaaataacaaatgtgttagatcatacattccctgagtttaaaccattctttaatgaacgcttatccaaaaccgctctctatctgcttgagaactatggttctgctgaaaagatggctcgtatgaactcagcctcttatgaaaagctacgttccgtatcccgagggaagttttcaccacagcaattcctacgactaaaagaacttgctgtcaatactgttggtgtaaataactctatttttgatgtagagctgaacagtcttttatctttatacaaatcccttgtaaaagagattgataccattaaaaaagaaatcaaccaactaattgaagaagtacatcctcactatatgtcagttcctgggatcggaccattatcagcagctgtaatctattctgaatacggcgatatatctaacttcactaatccaggacaaatgcttgcatttgctggaatagaaccgggaatcaacgaatctggtactgaatctcacggaggcaagatggttaaacgtggatcatcccagctccgctacacacttatcaattgttgtctaccattaatccgctttgacatgacatttgcaacttactatgccaaggaacgcggagaaggcaaaccgcatcgagtagccattactcatgtagctaaaaagcttattagagtcatctacgcattggagagccaagatatcgactttaatgctcaggaacttcgttaatctctagtggattaatactaatttctcccatctgaaatacgatgtattcagatggcttattaaagttacccctttttacaattcaaaaaaatttcaaaattctcttgactgtttatagtttg

SEQ ID NO: 1084 - DNA, 1166 bp, unidentified
  source 1..1166: mol_type = unassigned DNA; note = element_13f04ea
  misc_feature 1..2: note = core
  misc_feature 3..197: note = LE
  misc_feature 198..1160: note = CDS
  misc_feature 1161..1166: note = RE
  misc_feature 37..212: note = bridgeRNA
cttgtcttatgaaggaagtgtccattggcattagcctaaggatgccagccgggcttgatcaagcccggctggcggaatgggacggatcgttgatttgcgggcctttgcagggccgagctagagtttgatcgcccatttcttttccatcggcctgaacggatacctgggggcgagccccgcatgacaagcaaaggacaatggtcaagatgagacagtatataccaactttcgccggaatcgatgtgtcgaaagcgcacctcgatgtttatcttcatcccaacggatcggatcgtcgtctcagcaacgataaaacggggtggcgagcgctccgtgattggttgagcgaagctgatctgcaaggcgtggtgtacgaagctacgggaagctatcacaaaggcgtcgagcgatacctcggcatgcacggctttcccatcgcccggcttgatgcccgtcgcgcccggcgctttgccgaggcgctcggcgtgaacgccaagaccgatccggtcgatgcacgcatcctggcgcaattcggtgcttttctcaaaccggcgacaaaacccttgcccgacccgacccttgaacacctcaaggaactggtcgcggcgcgccgtggcctagtgaaacagggtacgcgcgtcgccaacaaaagcaaaaccgtcacgtccccattactcaagcgccagctccggcaatcggcaaaacaggcaaaacggcagatcaagcagatcgacgcccaatgccatgagatcgtcatgtcggaccctgcatcggcgcaacaccttgcaatcctgatgagcatccccgccatcggcgaggtaaccgcaatgaccttgctcgccgaaatgcccgaactcggaaatctcagcgacaagcaggcggcaagcttgatgggtgttgcccccatggcccgcgatagcggggcgttccggggtaagcgccacatccggggtggacgagcgcaggttcgccaagccgtctatatggccgctctcgtcgccacgcggttcaacgccgatatgaaacgaaaatacgagacgctcgtcaaaaacggaaagccgcccaaggtcgccctgaccgccgtcatgcggaagctcatcatcctcgcaaacgcgctcattagggataaccggacttggaccgaaatgaagccttgcttataacggata

SEQ ID NO: 1085 - DNA, 1627 bp, unidentified
  source 1..1627: mol_type = unassigned DNA; note = element_13f6c22
  misc_feature 1..2: note = core
  misc_feature 3..283: note = LE
  misc_feature 284..1504: note = CDS
  misc_feature 1505..1627: note = RE
  misc_feature 13..309: note = bridgeRNA
ctactacaatagatttatggttaatatcccttacagccagtaaggaattatccatcttgttgcttaagctgttagaatgttaagagcaatcggtatagcgaatttaccccttgggctttgcgcccgttgtaaagcttgctaaccggctctacattcgcagcattcgttttatgcaggttgagccgccttttgggtgcgttcgtgtcacaccacagtagattgaatgggcaatgagaaaaaccggtattaaccaattgcaatctattatgaggagtgattttttatgaatttgaatgcggtcggtattgatgtttccaaaagaaaaagcacggtgtctgttcttcgtcccggtggcgatgtccttatgaaaccttttgatatttcccatagaaccgcagattttcaaactctggcggacaaactgaaagctttggatggcgaaactcgcgttgtcatggagtgcaccggccactactatgaacctgttgcccgtgaattatcgcaggcaggccttttcgtaagtgctgtgaatcctcagatcatcaacaagtttcaggggcagggcaaccctctgcgtaaagtgaaaaccgataaggcggattctgtaaaaattgcacgctatactcttgacaactgggcaaatttgaaacagtatactcttatggatgaattacgttcccaactcaaaaatatgaaccgtcaatttgacttctacatgaagcataaaaccgccatgaagaacaatctgattgcgctcatagaccaaacctatccgggtgccaacacctactttaacagcctcgcccgtgaagacggcagtcagaaatgggtggattttcttgatacttattggcatgtggattgtgttcgcaagatgtccttgcaagcctttacagaacattatcaaaaatggtgcagccgcaaaaagtacagcttccgcaaatcaaaagcggaagaaatctacggaatagcaaaggaactggttcccgtgcttccaaaggacaattttaccaaatgtatcatcaaacaggccgtcgcacaggtaaacgctgcttcacagactgtagaacagttgcgttcccttatgaacgaaacagcctccaaactgcctgaatatccggttgttatggcaatgaaaggcgtaggtccatcgctagggcctcagcttatggccgaaatcggtgatgttacacgctttacccataaaggtgcagttaccgcctttgccggtgtcgatcccggcgtaaacgcctcgggagattactcgcagaaaagtgtacacgcttccaaacacggctcaccgatgctgcggaagactttatttcagattatggatgtcctgatcaaaacaaaaccggatgatgcagtctatttgtttatggacaaaaagcgtgccgaaggcaagccatattatgtctacatgaccgccggtgccaataaatttttacgtgtgtactacggaagggtaaaagaatatctctccgcacttcaagaatcgtattaacaatacctcatatcatttttttcagaccgacatactttggcggtcttgttgtgatgtatatttttcaatctatgtaaaatttccagcttttttaaaattttttcttgattttttatttgcagg

SEQ ID NO: 1086 - DNA, 1502 bp, unidentified
  source 1..1502: mol_type = unassigned DNA; note = element_13fff77
  misc_feature 1: note = core
  misc_feature 2..177: note = LE
  misc_feature 178..1482: note = CDS
  misc_feature 1483..1502: note = RE
  misc_feature 2..197: note = bridgeRNA
ctaatagaacccgagagcgctgcggtttgccgtagcgttcgggaggcccggcgggctggctcccgaaccgcctgccggtcacgctggtgacctggctttataacgaggtgcccagcctgccgggccgtgtcgcggcgtggctcgaaagaggcgcgagcgccagccctggtattaggcatgcccgccgcggccttccggttcggtgagacatggttgggagtgctgatggcgaacgtgatgatcggggttgacccgcataagggctcgcacaccgcggtggcgatcggcgcaggcgaggagccgctgggcgagctgcgggtggacgcctgcccgtcccaggcggaacagctgcgggcgtgggcggtggcgtggccgcagcgggcctgggcgatcgagggcgcggccgggctggggaatctgctggcgcagcagctggtcgccgccggtgagcgggtgctggatgtgccgccgaagctggccgcccgggtgcggctgttgcaggccggggacacgaacaagaacgacccgaatgacgcctactcggtggcggtggccgcgctgcggtccaagctggcgcgcccggtgctcgccgacggtcacgctgtcgtgctgaaggtctgggcgaaacggcaccgggacctggcccgcttgcgcaaccaggcctgctgccggctgcacgcggtgctgtgcgacctggtgcccggcggggtgcgccgggagatcagcgccggccgagccgcccgcctcctcgagcaggtcaggccagcggatgcggtcaccacggcgcgctgcgagctggccggcgagttcctcgccgacatccgccgcctcgatgcccagctgcgcgagtgccacaacaagctcgccgccgccgtccgggcctcaggcaccagcctgaccggcctgttcggcgtcggcccggtgatcgccggcaccgtgatcggcgacgtccgccacgtgttccggttccctcgccgggaccacttcgcctcctggaacggcaccgccccggtcgaggtctcctcgggggaccggaggaaggtctaccggctgtcgctgcgcggcaaccggcgggtcaaccacgcgatccacatggccgcgatcagccagatccggcacaagcacagcgacggccgggccttctatgagaagaaactggccgagggcaagacacacaaggaggcactgcgggcgctcaagcgccggatcagcgacgcgatctacgccgccctggccgccgacgcccggcgcgcggcaagcgcatgctccaagagcccgggagggcaaccgggggaccactctgcatccagggcggccggctcacaccccgcacaccggcacttcgggcaagccactcccgggcctgcccccacgatacggcccggcgctaactcaagtcgcgccccgactcagccgaaccgagcccgccgccgagctgcgcactctccggcaagttcgaagaaaccccctgcaactacttgacaccggcagcaaagaggact

SEQ ID NO: 1087 - DNA, 1168 bp, unidentified
  source 1..1168: mol_type = unassigned DNA; note = element_1403abf
  misc_feature 1..2: note = core
  misc_feature 3..208: note = LE
  misc_feature 209..1156: note = CDS
  misc_feature 1157..1168: note = RE
  misc_feature 13..214: note = bridgeRNA
cttgtcttatgactttccgtcgtttcgaggccaaagtgggttgccgcctgcgggccttcaccacccgcaggcggcgggaggggtgggatcgatgaaccgccggtcgtgatggaccgagctagagtatgatcgcccctctcttttccatgaggcctgaacggatagccgggtttctagacccggatgacaagcacgggacacggaaaagatgaccgcaaccatagcactaacgctcggaatcgacatctcgaaagatcgcctcgacgttcatctgctgccggaaggtacggaggggcaatacgccaacgacgccaacggtctacgcgaactgatccgctggctggcgcctcttgcgcctgcccgcatcgtctacgaggcgacgggcgcctaccatcggttgctcgaacgcacgttgggtgccaagggcctgccgctggtcaagatgaacccacagcgcacgcgtgccttcgcaaaggccgccggccgcttgtccaagaccgatcggatcgatgccgccatgctcgcccacttcggcgcgctgatggcgccgcagatccggccgatccgcagcgatgcccttgatgcgctttgcgaactggtcgccgcccgacgagcgctgatcaaggaccgcaccgccacattgaaccggcagaagtctttgaccatcccgctgttgaagcgccaggccgagcaacggttgaaacaaatcgctgcccagatcacagcgatcgacaccgaatgccgaacccatatcaccagcgaacccggtctcagacgccgcttcgatattctcaccagcattccggggcttggagaggcgagcgccttcgccatcgtcgctgacatgcccgaactgggtgcactcgaaaacaagcaagctgcaagcttggccggccttgcccccgtcgaccgtcaatccggccagtggaagggcaagagcttcatccagggcggccggcaaatgctcaggcaggcactctacatgcccgccctcgtcgccatccgattcaatcagcctcttaaggcaaaatacgaaagcctccgagcaggtggaaaacctgcaaaagtcgccataaccgcaatcatgcgaaagcttgtcgtcctcgcaaacgtgctcatcagggacgaccgaaaatgggctccagacattccttgaccaagacggata

SEQ ID NO: 1088 - DNA, 1177 bp, unidentified
  source 1..1177: mol_type = unassigned DNA; note = element_140ee8b
  misc_feature 1..2: note = core
  misc_feature 3..210: note = LE
  misc_feature 211..1152: note = CDS
  misc_feature 1153..1177: note = RE
  misc_feature 3..185: note = bridgeRNA
cttgtatggtaggactcgaaggggtgggtgggacctaaagccggcttctgactgttcgcagcagtacagaccgtgggagaaatcgtcctcaccccttccaccaaagcgccgataaagaatgcttcgttctcttcaacgacgatagaaacaagcctgcgcctcttggtgaaacccttcgagtcgaaaaaccatacagcgggagtgcaaaccatggcaatggaaacgagcgatttcatcatcggtattgatgttgctaaagccgagctggtcgttcattttcaaagccacggcacgcagatgtcgctgagcaataccaagcctgaaatcaagagatggctcaagcaacaacctgccaacactgccctgtgcgtcgaagcaacgaacgtctaccacctggacgttgtggagatggcacatgaaaagggcttcaaggtctatgttgttgacggatttcaacttagtaactaccgaaaaggcattggcggccgatccaaaaccgatgccagtgatgccgctttgcttgcccgttatctggaacgagaaagccgggagctgcgcccttgggcgccaccgccagccgtttatggcaagcttcagagccttctacgccgcagggctgctctggtcacaatgcgcaccgccctgagccagagttggggtaatgagcagctgctcaaagcggcgttcaagagctttacccagcaaatggacaagttggatctgctggtccaaaagaagctcaaggagttactcaaggaggctggtttactggagcaagttgctcgttgtcaggccatcgagggcatcggttttctgacagctaccgcattggttatggcgtttatccgcggcgagttcaaaaacagcgatgccttcattgccttccttggcatggacttgagagtctccgattccgggcagaagacgggactacgtcgtttaacgaagcgaggttgcccggaaattcgccgattgctgcataacgcctcaatgtcagccagccgctcggcggcctggaaagagacgtacgaacactatcgaaacaagggcaaggccacgactgaagcgctggtgatcttgtcgcgcaagctcgcccgggttgcatttgccctgatgaagaacaaggaggaatacgtaagcagaacagcctaaagaccgttgtttacaaccatagaat

SEQ ID NO: 1089 - DNA, 1559 bp, unidentified
  source 1..1559: mol_type = unassigned DNA; note = element_1414e0c
  misc_feature 1..2: note = core
  misc_feature 3..248: note = LE
  misc_feature 249..1424: note = CDS
  misc_feature 1425..1559: note = RE
  misc_feature 3..227: note = bridgeRNA
ctcgtattatatagtagtagtgtttatagtccctctccaaggactatatgctatacttttggagatactgtggattggttctaacctcctaccacccgatggttatagaaaggctccaaccactgtctctttgtatatttgttaatcagttagataccgcatgacggtttatttagaacgaggttacaatcgcaaagagtacctgtgggttccaaacagtatcaattttatttcaaaggagtattgctatgatttacgcaggaattgatgttgccaaggataagcatgattgctttatcactaactccaatggagaagtgctctttaaagcctttaccattcctaacaacagacatggctttgatgaactctatcagaaaattgaatccattaccgatgatttaaccaatgtaaaagtagggcttgaagccactggacactacagctataacatcttgggatatcttcttgataaaggtctctctacctttgttatcaatccgttacataccaatctttacagaaaaagtctaagccttagaaagacgaaaacggataaagttgatgcccatacgattgctaccatgctcatgtctgatgtgaacttaaagtcctactcagacacatcttatcacaatgaagaattgaagtcactaacccgttatcgttttgataaagttaaggagcgggcaaaacttaaatcctctgtttcacgtctcgtgacaatcctttttccagaattagagaagttggttccgacactccatatggcttctccctacatgcttctttccgaatttccaagtgcatcagctattgctacttcacatcttacccgactgaccaatctcttatctattgcttccaaagggcactatggaaaggataccgcgattctttttcgtgaagctgcaagaacctcgatcggatcacatatgccagctaaatctctggaactaaagcacaccatcaagctgattgaagaattaactgccgagatcgaggaaatcgaacatgaaataaacaccattatggacaacatcaattcacctatcttaagcattcctggcatcagctatcgcatgggagccatgatcattgccgaaatcggtgatttcagcagatttgactctcccgacaagatacttgcctatgctgggatgtcgccatccacttatcaatcaggacagctggaatcttcgtattcacatatggaaaaacgaggttctcgttatcttcgctatgcactttataatgcgactaaatacgtctgccattgggatccggcctttgctgcctatttggaaaagaagcgaaccgaaggaaagcattacaatgttgccatatcacacgcagccaagaaacttgtgcgagtgatttatcaactcgagaaatcaaagcaactttacattaaagctacttagctttctaaatacaaatatctcctttttgagcaccagtgatgatgctctatttgtcatgcgattttcaatgtactaatattccgaaagactatcccttaaaaattttattttagggcttgacatctaatagttagt

SEQ ID NO: 1090 - DNA, 1490 bp, unidentified
  source 1..1490: mol_type = unassigned DNA; note = element_14158f2
  misc_feature 1..2: note = core
  misc_feature 3..242: note = LE
  misc_feature 243..1469: note = CDS
  misc_feature 1470..1490: note = RE
  misc_feature 7..240: note = bridgeRNA
ctaatgggggtccatcgtgatctccctttggggtgggagtctggtggccgagccgccggccggtgagtactgctgtcaaccctggagcgtggactcctagggctagatcgtgccccggccgggtggtgaggactgcctgtagcgctaatggggtggcgtgccatcgagcactgatccattaggtcgccgccgggtcgtcttcgggctcgcgcaattccatcgtgttgtccaggaggtgggtggtggcgattctggttggtgatgattgggccgaggaccatcacgacgtgtatgtgatggacgagaccggttcccggttggcgagccgacggctgcccgagggcctggagggtatccggggtttccatgagctggtcgctgatctggtcaatgatccgagtgaggtggtggtggggatcgagactgaccggggtctttgggtgcaggccctgaccgctgccggctaccaggtgtatgccatcaacccgatggccgtctcccggtaccgggatcgccataacctggcgggagcgaagtcggatgccggtgatgccaaggtgctggcggatctggtacgcaccgaccggcacaaccatcggccgatcgccggggactcccctgacgcggaggcgttgaaagtgttggctcgagcccatcagaacctggtctgggctcggaaccggcacaccaaccagttgcgtaacgctctccgcgagtactacccggcagcgttggcagccttcactgatctggcggaccgtgacactctggcagttctggatcgggcgccgacaccggaggtgggcgctcgcctctcgatcgctcagatccgtgcggtgttgaaacggggaggtcggcaacgcaacctcgaccggcgggctaccgagatccaacaggctctccgcgccagccaactcaccgcccctcaaccggtggtggccgcctttgctgccaccaccaaagccgcggtggggatcatcgtcgagttgaaccgtcagatcggagagctcgagacagtccaagctgaccgttttgaacagcacccggacgccgacatctacctctccctgccaggactcggtggtgtgctcggcgcccgggtgctcggcgagttcggggacgaccccgaccgttacgccaaccccaagtctcgcaagaactacgccgggacatcacccatcaccatcgcctcaggcaggaagaaagccgtgctcgcccgccacgtccgcaaccgacgcctctaccacgccatcgaccagtgggcgttctgctccctcactaccagcccaggatgcagggccttctacgaccaacaccgagccgccggcgaactccaccaccaggccctcagagcactcgccaaccgcctcgtcggcaacctccacggctgcctcaaacaccgcaccacctacaacgaacacaccgcctggggacaccgccaaccgaccctcaacgacgccgccgcttgacaagatgcagacctggggtgt

SEQ ID NO: 1091 - DNA, 1403 bp, unidentified
  source 1..1403: mol_type = unassigned DNA; note = element_141727f
  misc_feature 1: note = core
  misc_feature 2..90: note = LE
  misc_feature 91..1119: note = CDS
  misc_feature 1120..1403: note = RE
  misc_feature 1171..1395: note = bridgeRNA
caatgggatggacgcccccacccgtaacggcatcaaatgtgccaaagtggaggtgttatgcaaccacttgaaccgagaggagcgtccaccatgaagattacaactataggcatcgatctggcaaagaacgtgtttcaagttcacggcgttgatgcgcacggtaagacggttatcaagaaacagcttaagcgtgaccaggtagcactgttttttgccaacttacccacgtgcctggttggcatggaagcatgcggcagtgctcaccactgggcccgcaagctacaagccctgggccatacggtgcgcttgatagccccacagttcgtcaagccttacgtcaagaccaacaagaacgatgccgccgacgctcaggcgatctgtgaagcggtggcgcggcccaccatgcgatttgtggcgatcaagacgatcgatcagcagtcagtgctcgcgttgcatcgggcgcgtcaagcgtttgttaaggcgcgtacagctcaagccaatcagattcgcggtctgttggccgagtacggtctggcgttgcccttgggtattcaccacatcccccagcgtgtgccagaactgattgaagatgggggaatcgaattgccgggtcaatttcgcctgttgattgagcggttggtggagcactttaaggaactgaatcagcaagtgatcgaactggaggctcagatcaaggcctggcaccgggccaatccggctagcagcaggctagagaagattcccggtatcgggccgattacggccagtgcgctggtcgcttcgattggcgatgcccggcactttatcaatggtcggcaggtggccgcgtggctgggattagtgcctcgtcagcattcgacaggcggcaaagcggtgttgttaggcatgagcaaacgcggcgatacgtacctgcgcacgctgctgattcatggggctcgatcagtcttgtctcacgcttggcgtcgggcggatcagagccgttggctgcatcggttggtgcagcggcgcaacgccaatgtagcggcggtggccttggccaacaagaatgcccggatcatctgggcgttactggcccacgaccgagagttccgagccgattacgtgtctgtcgcctcgtaatcgacccggctggtgtctacagcgttcgcaatagcaatgcagtaccaatctaccgattgctcaggcgatcatgcagtgatggcaaaacaggtcagaccgtggttggtcaaacccgcttccttcgcagcacctcgagtgcgtgtaggcgattagggcaccagccagcagaacccatcagggacagcagcattgaatgccgccctcaaagtccggatgtacgggtgcaatcttcacctgctaaccaccatgaattgaaaacttggcaaaccgggggcgtccatgta

SEQ ID NO: 1092 - DNA, 1132 bp, unidentified
  source 1..1132: mol_type = unassigned DNA; note = element_1418c57
  misc_feature 1..3: note = core
  misc_feature 4..204: note = LE
  misc_feature 205..1071: note = CDS
  misc_feature 1072..1132: note = RE
  misc_feature 16..185: note = bridgeRNA
gcttgtgtcttcgtgcgggggtaggcttgaggtgagagcggagtgcggcaagccgtttagcggcagtgctgcgagcacgtgtaggagcaagggctgccgcactccctccgtcaagcccgaacagttgctcgagtcctacctcgaattcacaagccagggctggcagaggtgctctcgctcccgatcctactccggagtgacgccatgaacatgtatgtcggtatcgatgtcggcaaggccatgctcgacgtggcttggtaccccaccaagcgccacgaacgcttcgagaacaacgccaggggccacaaggccttgctcaaagcgttatcccgcgatgccgtcgagcacatcgccatcgaggcgaccggcggttatgagcgcaccattctcgatgccctggcgacggccgggtatccggtgacgcgcttggcctcgcaccgttcgcgcgcctacgccatgggcatgggcaagatcgccaagaacgatcggctcgatgcccacgtgctggcccggatggcggccacgatcacgccgcaaccctacgtcccggcgtcgcgcgagcgcgtggatctggccgacctggtgcgctgccgccagcagctcgtgtcccagcgcgacgataaccgtcgccggctggcacaggccaccttgcccgcggcccggcgagccctgcaggcgatgatcgacgcggcggacaagcagatcgccgccatcggcgcgccgttggacgcggctgtgcgtgctgtggacccgaactcgcgcctgcacggcgtaccgggcattgggccggtcacggcggcgacgctgatagcctacctgccggagcttggccaactggatcgaaagaagatcgcggccttggtcggcgtcgcaccctacgtcgaccaaagtggccggcgcgacgggccacgccgcgtacggggcgggcgctggatcgtccggcgaaccctctacatggcgacctgggccgccatccgcaccaagggaagcgcgctccgggcgcgctaccaagcgctacgagccgcggcaaactggcgaaagtggccctggttgcctgcatgcgcagcctaattacggccatcaatgcgatggttcgtgaccaggctgagtggagccactgaaaaagacagtt

SEQ ID NO: 1093 - DNA, 1241 bp, unidentified
  source 1..1241: mol_type = unassigned DNA; note = element_142a225
  misc_feature 1: note = core
  misc_feature 2..204: note = LE
  misc_feature 205..1230: note = CDS
  misc_feature 1231..1241: note = RE
  misc_feature 43..199: note = bridgeRNA
accttagatttgcagcatcaaaatatttatctttgaattgatattgaaaggaaagcaaaaggaaaaccatcagcggcaatagaagtcaagtctaagtccctattcggtccttttgctccttccttgaactcaaacccatataagaatttcagtaaacctgtttaagattattaggtcaagttcaggtcctttcttttttgtttaatgttcaaaaacaaaagtatgaaagttttttatttaggagttgatgtgagtaagaaaaaattggatttatgtttaaggagtaacggtaaggacatcctttatgatgttattcctaatgatctatcctctattaaatcttggttaacaagaacgtttgagaaatttttcctctctgaggacagtttggttgtctgtgcggaacatacagggcaatatacctatcctttggtctgtgcaacaaaaagtataggagtctacttatgtttggaagatgcagctaaaataaaatattgtcatggaatacctcgtggcaaaaatgataaaatagatgcctgccgaatagcaatgtatgcagaaagatataatgattgcctacaaccgtataccgcatcagagcttataatacaaaaactcaaaaacttatcaacagaacgcagtatgcttgttgcagatagggctaaatatcaatcccagctaaaagatcaggtagactatatggaacactcaatatatattgctaaatgcaatagagttgaagggattatcaatacatttacggattacatagcacaaatagaccttgaaataaaagaacttataaatcaagcacctgtcattgctcatcaaatggatttactcatgtctgtggatggagttggggaacgtattgcactgaagatgatcatggaaacagatgctttcacttcttttactgatcccaggaagttttgctgtcatgcaggagttgttccgttcgtctatgtgtcaggaagtagccaacgttctaaaaatagagtatctaatagggctgacaagagcatcaagcatttgctacatatggcggcactatctgtttcacaagtgaaaaatagtccattgaagaaatattatgacagaaaggtcgaagagggaaaaaataagatgtcggttctgaatgcagttagagcgaaattagttacgattatgttcgctgtaattaggacggatgcttttttttcgagaaattatcaaaattcgcttgcgtaatccataagaat

SEQ ID NO: 1094 - DNA, 1385 bp, unidentified
  source 1..1385: mol_type = unassigned DNA; note = element_144030e
  misc_feature 1..2: note = core
  misc_feature 3..83: note = LE
  misc_feature 84..1109: note = CDS
  misc_feature 1110..1385: note = RE
  misc_feature 1117..1366: note = bridgeRNA
tgatgaggtggacggccccttccttgcggcatcgaagtgccataggggttgagtagtttaaccactacgcgaaggagccatccatgaaggagattagcataattggggtcgacctggcaaaacgggtttttcaggttcacgggattgatgccgagcataaaacggttgtgcagaaaaagctgccgcgatccgaagtgttgaagtggtttgcagaacaggggccttgcctggttggcatggaagcctgtgccacggcgcattactgggctcgagagatcagcaagcttgggcacgaagtgcggattattcccccgtcttacgtaaaaccatatgtgcggcgacaaaagaataaccgagccgatgccgctgcgatttgtgaggcagttagccgccccgagatgcgcttcacgacgattaaaacgattgagcagcaagcggtgcaaacccttcaccgcagccgcgagcttctggtccggcaatacacgcaaacgggcaatgccgtgcgtgcccatctgagcgagttcggctggatctttccgcaaggtaatgaaggattgagtcaggccatcgcaattgttcaaacgacgacagacgctgatttaccggaactggtacgaactgtcttaggttcgctcgttgcacagcttacgtatcttaaacaggcgatcggtcggctcgataaacagatggtcgcgtggcataaatctcaagtcgaaaacctgcgattagcgacgattcctggtatcggccctgtgacggcatcagccattctctctgctattggtgacggcaaacagtttaaatcaggccgtgagtttgctgcgtgggttggcctcgttccgcggcagaactcgagcggtgggaaagaatctctcgggcatatcaccaagcgcgggaatatgtatatccgccgccttctggtatcaggtgcgacaacacagctgcgtggcaagcggcagcaaaatgctcccggtggtcaatggtttgaagatttgctgcggcgcaagccggcacgcgtggcaactgtggctttggccaacaagctggcccgtatcacttgggctgtcttaacgaaaggcgagcgttatcgggcgcctggcgccctttaaagttttgtctgacgctttttagcagacagcaggcgtgcgaaggagatgatgacagaaagctgaacggagtgttaccgcagatcgagagaagccgttagaacgctcgcatgaaccgatgcgctaaaatgattggcactcgatacgcggatctcatcagggccagttgccaggtcagctcgtctggtcaagcaacacaaacaggccggacacatggccgcgacacctgcttttagcttaacgtcgttattgccttgacacacgggggccgtccacaca

SEQ ID NO: 1095 - DNA, 1481 bp, unidentified
  source 1..1481: mol_type = unassigned DNA; note = element_1442ef9
  misc_feature 1: note = core
  misc_feature 2..263: note = LE
  misc_feature 264..1466: note = CDS
  misc_feature 1467..1481: note = RE
  misc_feature 9..237: note = bridgeRNA
cgttatcttcttcgcggtcctgcaaggggaccgctggcctccgggcccggcatgactgttcccccctgtcgaaccgatgacctggggggtggtgtcaccgggcccgagaggcgccgttggagacgctgatgagaggtctgactaccgcctggcctggcgcaatgcccggccgcttgcgggcggcaggtctgtataacgtggatgcgcgcatacgacgccaacgccctggccagcaccacacgaacccggttcgggaggataagttggacgacatcgacgacgtgggcgtcttcctcggcctggacgtcggcaagagcgcccatcacgggcacggccttaccccggccggcaagaaggtcttcgacaagcagctgcccaacagcgagccgaaactgcgggccgtcttcgacaagctggccgcgaagttcggcaccgtgctggtgatcgtggaccagcccgcctcgatcggcgccctcccactgacagtcgcacgggacaccggctgcaaggtcgcctacctgcccggactcgcgatgcgccggatcgccgacctgtatccgggcgaggcgaagaccgacgcgaaggacgccgcagtgatcgcggacgcagcccggacgatgccgcacaccctgcgctcgctggaactgaccgacgagatcaccgccgagctgaccgtgctggtcggcttcgaccaggacctggcggccgaggccacccgcacctccaaccggatacgcggcctgctcacccagttccaccccagcctggagcgcgtcctcgggccgcgcctggaccaccaggccgtgacctggctgctggaacgctacggttccccggccagcttgcgaagggccggtcgtcgcaggctcgttgaggtgatcaggcccaaagccccgcgcatggccgcccggctgatcgacgaggtcttcgacgccctcgacgagcagaccgtcgtggtcccgggcaccggcaccctggacgtcgtgatcccgtccctggcccgctcgctcgcggccgtccacgaacagcgacgagccctggaagcgcagatcggacagctgctggaggctcaccctctttccgcggtcctgacctcgattccgggggtcgcggtcaggaccgccgccaccttgctggtcaccgtcggcgacggcaccagcttccccaccgccgcccacctggcctcctacgccggcctcgccccgacgacgaagtcgtcggggacctccatccacggcgaacacgcaccacgaggcggtaaccgacagctcaaacgcgcgatgttcctgtccgcgttcgccgccctgcacgatcccgcctcccgcacctattacgaccgctgccgggcccgcgggaagacccacacgcaggctctgctccgcctggcccggcaccgcatcagcgtgctgttcgcaatgctccgcgacggcaccttctacgaacccagaaccccacgcctcgcttgacgaaagacatagagg

SEQ ID NO: 1096 - DNA, 1425 bp, unidentified
  source 1..1425: mol_type = unassigned DNA; note = element_14454ab
  misc_feature 1: note = core
  misc_feature 2..219: note = LE
  misc_feature 220..1242: note = CDS
  misc_feature 1243..1425: note = RE
  misc_feature 15..238: note = bridgeRNA
ctgattgagactggtggcagacgttgcagtcagttcgtagcgttcagaggacctgatggggttgctcattatgtgcctgccggcggctgttgtcgtctggcttgcgaacgaagagctccccgccaggaccttgccgtgagtggctcgaaagaggaacatgcaccacgatccgcatcaggagtgccctcacggttccaccaacgaaccaggaggtagggcatgaccatcatcatcggtattgatccccacaaggcaacccacactgcggttgccatcgggtctgacgagtccgagctcgccaccgtcaccatccgggctacacgacaacagaccgacaagttgctgtcgtgggcagagcccttcgaagagcgcacctgggctatcgaatcggccggtggcctcggatacctgttggcccaacaactggtcgaggccagcgaacaggtcctcgacgtgcccgccaccctggcgtcgagagtccgggtcttggggtccggtcgatcgaacaagaacgaccccaacgatgcccgctcagtggccatcgccgcgctccggtcacccggcctgcgtgccgtctctatcgccgaccacgccgaggtgttgcggctcttggccaagcgaaatggtgacatcggggaccaccgcacccaggtggtgtgccggctccacgccctgatcgccgccctggaagcaggcggaattgccaaggaactcaacgcttctgacgccaatgggctgctcgggaccttcgagccatcgtctcccgctgagcgcacccgccaccagttggccctcgagctcttggccgacgtccgccatctcgacggccagctggctgagtccaaacaacgcatcaaggtggccgtctccgcctcgggcacctcgctcaccgaggtgttcgggatcggcccggtaatcgcctgttcgctgatcgggtacaccggtgacgtctcccggttcgccagccgggaccagttcgccgcctacaacggcactgctcccatcgaggtgtcctcgggaggtcgggtggcccaccggctgtcacgccgagggaaccgcaatctcaaccacgccatccatatggtggccatctgccagatccgccacacccactcggaggggcgcgcctacttcgatcgcaaggtggccgagggcaagaccaagcgggaggcgatccggtcgctgaagcggcagatctccaacaccgtctaccgccacctggtgctcgacgcagcgaagtagggcccggggggacagacgggaacgactcattgcctgcgcgaccggctctgcaccctgacggctggctcttcggcgaagtcactcccggacccaccaaatcttagacagtcgcgcccctcgaccgcgggctgatctgtcgcgcccggacgccctcgaaattacccccttgactcaaagaggatt

SEQ ID NO: 1097 - DNA, 1598 bp, unidentified
  source 1..1598: mol_type = unassigned DNA; note = element_1454c47
  misc_feature 1..2: note = core
  misc_feature 3..251: note = LE
  misc_feature 252..1460: note = CDS
  misc_feature 1461..1598: note = RE
  misc_feature 1..221: note = bridgeRNA
ccgttaccttggagctatccccgataatggggatagtcgctgggcccggtatggcttacttgccctgtagtttccatgatccggggggtgttgccgccgggactccaggacatgcgttgactgctgatagggacacggccagaacttcgttccaggtctctttgtaacgtgggtgccagcatcggatgtcgagacaccagcgacgaggtttaaccctgtcactgttgcttcgacgcacaaggaggccggacatgaccaccggcaccaccatcgacgtcaccatcggactcgacgtcggcaaaaccgcccaccacgcctgcgccatgctcgcctcaggcgacatcatctacgacaaacctcttccccaggaagaaacgcaattacgggaagtctttacggatctccagcaacacggcaccgtcctggtcgtggtcgatcaacccaacaccatcggcgcactcccgatcgccgtggcccgggatgccggatgtgtggtcggctacctgcccggcctggcgatgcgtaaagccgcggacctgtatccgggacggtcgaagaccgaccgtagggacgcgttcatcatcgccgatacggcgcgcaccatgccgcacacgttgcgggccgtggaccgggacaacgaggtcctgtcggcgttgaagatgctctccgggttcgatgacgacatcgccaaagacgccacccgcacgatcaaccggctgcgtagcgtgttgacccagatctatccgagcttcgaacgagccttggccggcgatgtcatcaccaggccgctgattctggagatgttgatccactacggcgggccgacgaagttgaaaaaggctggctaccaccgtgtcctgaactggatgagcaaacgatcgacgaaggaccccaccgtggtggtggatgcgatctttgccgggctcaaggcccagaccgtcaccgttccgggcaccgccgccgctgaggtggtgattccgcaactggccgccaacatcaaatccctgctgaaccagcgaaaaaccatcgccgagcaagttgaggaactactggctgatttccctctttccgaggtcttgatgtccatgccgggagtcggcatcaagaccgccgcgaacattctcctggccgtgggtgactgttcggacttccggtccgccgggcacctggcagcctatgccgggatcgccccggtaacccgaagatcgggcacgtcgatccggggcgagttccccgccagatcaggaaacaaacggttgaaaaatgcattgttctactcggcgttcgcatccctgaggtcccacccggcgtccaaggcgtactacgagaaaaagcgcgctgaaggaaagcggcacaacgcggcggtgatgtgtctggccagacggcggtgcaacgtcatctacgcgatgttgacccggggtgagttctttagggaggtgccggccagaacagccgcgtagtccctcgtcggcacgatcagctgatcagcgatgcaccgtcgatcagctgatcggccgcgcccactgtaagaatagatagctacccccgaaactcttcgaggagtacatcgtctgtcccttgacaaaaacatagggaca

SEQ ID NO: 1098 - DNA, 1359 bp, unidentified
  source 1..1359: mol_type = unassigned DNA; note = element_145b206
  misc_feature 1..2: note = core
  misc_feature 3..80: note = LE
  misc_feature 81..1112: note = CDS
  misc_feature 1113..1359: note = RE
  misc_feature 1129..1353: note = bridgeRNA
tgatgggatggacgccccctatcgcggcgtcagatgcgccagaatggagatgttgaacctccagacaaaaggggacgtccatgacggagattacgacaattgggttggacttggcaaagacgatttttcaggttcacggtgccgaccaggacggcaggccggttatgcgcaagaagctgcgccggggacaggtgcgcgggttcttcgccgggctgtcaccgtgtctgattggattggaggcctgtgccagtgcgcacttttgggcgcgcgagctgcaggcgcttggccatgcggtgcggttgatcccgccgcaatatgtgaagccgtttgtgaagacgaacaagaacgatgcttcggatgcagaggcgatctgcgaggcgctgatgcgtccgacgatgcggtttgctccactcaagagcgccgagcagcaatcggttctgatgctgcaccgggcacgcgaactcctggtgcgccaaagaaccatgctgatcaatgcgctgcggggtcattgtggtgagttcggcattgtcgttgcgcaaggcgcgtccaaggtagcggcactgatcgcgatgatcgaagatcgccaggacgagcgtcttcctgcactggcgcgccaggcccttgggtcactcgtcggtcagttgagaatggttcaggcacaggttcttgaccttgagaagaaactgatggcctggcatcgcgccaatgaagcaagccgccggcttgcgacgatccccggtgtcggggtgatcacggccacggctcttgtcgcgacgatcggcgatgcatcgcagttccactccggccgtcaactggcagcctggcttgggttggttccaagacagcactccagcggcggcaaggaccggctcgggcggatatcgaagcgcggagacggctatctgaggaagcttctggtccacggtgcgcgaaccgttctgctgtggtccaggcgcaagaaagaggggcgtacggcatggcaggaagccctgctggcgcgccggccgaccaacgtcgttgtggtggcgatggccaacaagacggcgcgtgtcgtgtgggcgatgctcagccggggtgaaacattccgagccgaaacccgggcgaccgcataacgggcagcggaatgaaccttattgcgagggtgatgatgatgtgatggcaaaacagggtgaccgggatcggccaaacccgaggcgttgtcagagcctcgagctcgctaatgtgatggggcgtcgatcctcggattccatcagggcccgcagcaaagacgacgctgcatcgagaggccggatagatgactgcaaacccagcctgcttctaatcatcaaaaccacttgcaatcacgggggcgtccataga

SEQ ID NO: 1099 - DNA, 1524 bp, unidentified
  source 1..1524: mol_type = unassigned DNA; note = element_14676d6
  misc_feature 1..3: note = core
  misc_feature 4..240: note = LE
  misc_feature 241..1407: note = CDS
  misc_feature 1408..1524: note = RE
  misc_feature 8..222: note = bridgeRNA
tttcgtattatcaggtcagccagaatttctggttggccatttttcatggtcgggttacgatggcggtagccgggagaacgtggtggcatttggggagtttacctcggagcaaaaactgttctcccactgcccccaatgaccatgtttgagctggttgaggcatgagacctcgaatcacaagcgaagctgtgggattggaaccatcgtgggagtgccggctattatttaggaggagatgacatgggaccggttgttggattggatgtatcaaaagggacaagcatactccaagcgtttacggatcggaataatccgtatggcaagatcattagcatcgagcatacgcagaaagggtttgagcagctaggagacttgctggaggaattaatacaagctacggggcttgagcctgctgtggtgttagaagcaacaggacattatcatcgcagtttggtcgcctatttggagcgtgaaggatatcgacactacatcgtgaatcccttgcaatccaaacgtgcaagaggcacgcaattgcgaaaggtgaagacggacgcggtggacgcatggcatctggcagaaatgttttaccgcggggatgtccggcctcaccgaacatgggcggaggagatgaccgaactgcagcatctaacgcgtcagcatgagtttgtgacctctatgctcgtccaggccaaactgaatgccaggaccttactggatcaagtgtgtcctgcatatgagaacgtgttctccaatttgttttccacgacatccttgcaggtattgcgccacatgctcagtggcggcaccgtcacgcaagaaacgatccgggaaacggcaggctcgtcacacggtaaggcgtggatccaggcaaaagctgagcggattcgagcgttaccgcctctaagccactcaagtaaagcgcagcagacggccttgctatgcatggtagaaatggcccttactgcccaacaacagctttgccagcttgaaatttcaattgaggagacggcacagtcgctgccggaagttggactgctcaagacgattcccggagtaggggacaagcttgctgcggctttggtggcagagattggagatgcgacgcaatttgaggatccaaaaaagcttgtggcctatgcaggactggatccaggtgtgcatagctcggggaagtttacggccagtagtagccgcatctcgaaaagaggttccaaacgtttgcgcagagctttgtacgttgccgtccaatgcggactcaggaaaggtgtcaacgagcggttacaagcttattacgataaaaaaaggaaagagggcaagccatacaaggtagtcgtgattgcttgcgccaacaagctgctacatcacgtccatgccatccttgtgaaaggcgagccctacaaaacgtaaattccatatttacccagaagcgtccgcgccaacggaggcttcttcgtgttgttcgtaaatagtatatcagtatctgtgacgtaatccaactacttgggcttgacaaacattagctgg

SEQ ID NO: 1100 - DNA, 1271 bp, unidentified
  source 1..1271: mol_type = unassigned DNA; note = element_146f219
  misc_feature 1: note = core
  misc_feature 2..213: note = LE
  misc_feature 214..1188: note = CDS
  misc_feature 1189..1271: note = RE
  misc_feature 5..218: note = bridgeRNA
actcagtctaagatcgcttctgaacgtcggaacgatctgacccgtgctgggattggccaatctgcctttgagttgacctgtcgatcggattccggcgttccccgagcgttgccgggctcaccgtctgtgacctgataggagctttgttttgcgccgtgagtgtcctgtcctgcgagtggggttggcgatgcgcccactacgatggatatacgcatggaacaaaacgaagtgatcctgggtgttgacacgcatctggatacgcatgtcggggccgtgatcagcgatatgggcaggcttctcggaacgttatcagtatcgaccgacacggcaggctatttcgagttgctgacgtgggcaaactcgtttggtcaactccagcgcgccggagttgaaggtaccggcacatatggagccggattggcccgcgtgctgcgcgatcatgaaattgaggtgtttgaagtcaatcgtcccgatcgcgcgacgcgtcgctccaaaggaaagtccgatcccacggacgccgaaaacgctgcacgtgccgtgctctccggaaaagctaccgatgttcccaaggaacagtcgggtgcggcagaagcgatgcgcgccgtctccgttgtcagacgcagcgcagtcaaggccaggacacaagcgattaaccagttacgagctttgctcgtgagcgcgccccaggaaatccgcgatcgccttctgaaaacgaagactgcggaatgtgtcgagggttgcgcgcgtcttcgctcgctgggcaaaaccccaatgttgcagactctcacggccacgcagcggttgctggcgaagcgttggctgacgctagcagaggagctcaaagcactcgacaccatgcttgacgacctgaccaaccagcatgccaggcggattcgtgagcgattcggcgtcggcccccagactgctgcggtattggtcgctgttgcaggcgacaatcccgagcgcctgaaaagcgaagctgcgctcgcggcactttgcggtacaagtccgttgcaggcatcgtccggcaagacgatccggcatcgtttgaaccggggcggtgaccgaactgccaacaacgctctgtggaccatcgctatggttcggatgcgcagcgacccacgtacacaggcctatgtcgatcgacggacgaaggcatgtcgaacaaggaaatccaccgctgcctgaaacgctatatcgtccgggagttgtacccgctcattctggccgatcttgccgattcgacggccgccgcttgacataggagcgtc

SEQ ID NO: 1101 - DNA, 1407 bp, unidentified
  source 1..1407: mol_type = unassigned DNA; note = element_14718f1
  misc_feature 1..2: note = core
  misc_feature 3..216: note = LE
  misc_feature 217..1386: note = CDS
  misc_feature 1387..1407: note = RE
  misc_feature 7..215: note = bridgeRNA
ctaatggcttccgagcagcccacagacgagactgctctccgagccaccggcgggtgagcaccgaagtctccagggcctgcgagccctagggttagatcgtgcccccgccgggcggtgaggagccgacggctgatgggatgtcgtgccatccgagcactggtccattagggcgccgcgtactcctccaggctcgaggccgagacgagaggagggtgcgtgatcttcgtcgggatcgactggtcggaatcgcatcacgacgtgtgcgtgatggacgccgatgggaaggtgctcgccaaagatcggatccccgaaggggtccaaggggtggcccagctgcacgagatggtggccgtgcacgctgaggaaccctcagacgtggtggtcggcatcgagctggaccgaggactgttggtgggtgctctccttgcggcgggctacgcggtgcacgcgatcaacccgctctcggttgaccgctaccgggaccgccaccgcacctcgggagcgaagtccgatccgggcgacgcgaaggtgcttgccgatctcgtgcgcaccgaccggcacctgcaccgggaggtcgccggggactccgagctcgccgaagccgtgaaggtgctcgctcgggcccaccagggcctgatctggtcccgccagcgtcagctgaaccagcttcgcaacgcgcttcgggagttctacccggcggcgctggaggccttcgggaccgatctggcctcgccagaggccctggccgtgctcgaggtgacacccacaccggcagaggggcgctcactgtccaccaccaagatcgccgctgccttgaaacgagcaggacgtcgccggcgcatcaccgaacgagccgaggagatcaagcaggcgcttgcaacctcacagctcgaagcgccggcggtgctcgctcgagcctacggcgacgtcgtgcgctccacggttcggatcgtggcggagatgaccgcccagatcgatgcgctcgcggcagagctcgaagcgagttttgaggaacacccggacgccgagatccttcgcagtctgcctggactcggtgtggtcctcggcgtccgggtcctcgcggagttcggggatgaccctgaccgctacgccgatactaaggcccgcaagaactacgcggggacctccccgatcacgaaggcctctggccgatcgaaggtcgccctggctcggttcgctcgcaaccgtcgcctcgccgacgcgctgcagatgtgggcgttctgctcgctctcgtgctcaccgggtgcacgccgcattcggtccctcgccaaccggtgggtgggcatcctgcacgggtgcctatggcgtcgcgagcgctactcggaggagcgggcgtggccaaccctcacggaagccgcggcttgacacttacggcccgtgggatgt

SEQ ID NO: 1102 - DNA, 1281 bp, unidentified
  source 1..1281: mol_type = unassigned DNA; note = element_1477aec
  misc_feature 1..2: note = core
  misc_feature 3..195: note = LE
  misc_feature 196..1176: note = CDS
  misc_feature 1177..1281: note = RE
  misc_feature 17..202: note = bridgeRNA
cttgtattatcctctctgtgcagagagggccggccagttctccctgccatgccgtccgcatgccgtatccggccttaggttaacaacctgtattgtagatttatgcagcggactgccgttctccacaagtgacaaaccggacagtatcatggaccggttttcccggtaatccgcattcacaaggttggtctcactatggaacaggaacttcattttatcggtattgacgtctctaaagccaagctggatgtcgatgtgctgcgtcccgatggccgtcaccgcagtaaaaaatttgcgaacaccctgaagggccacaatgaactcctccactggctcaacagccataacgtggcgccggcgcatatctgtatggaagccaccagtacgtatatggaagacgtggccgcccatctcagtgatgccggattcaccgtctccatcatcaatcctgccctcggcaaagccttcgcacagagcgaggggctgcgcaggaaaaccgatgccgttgatgcccgcatgctggcagagttttgccgtcagaagcgcccggcagtctgggaagctccgcatccggttgaacgggcgttacgggcactggtgctgcgccatcagtcactgacggatatgcgtacgcaggaactgaatcgcctggagacagcacgtgaggtacagcgtccgagtatcgacgctcatctgctgtggcttcatgccgaaattaaacgcatcgaaaagcagataaaggacctgacggatgacgacccggacatgaaacaccgcaggaagctgctggaaagtatcccgggtatcggggaaaagacgtcggcggtgctgctggcttatgtgggactgaaggacaggttcagccaggcgagacagttcgccgcctttgccggtctgacaccgcgccagcatgaatcaggcagcagcgtgaggggaatgagccggatgagtaaaagcggccatgtatccctgcgcagggctctgtacatgccagcgatggtggcaataagtaaaacggaatgggggcgggcgttccgcgaccgtctggcaggaaacggtaaaaaagggaaagtgataataggcgcaatgatgcgcaagctggcgcatgtgtcttacggggtactgaaatcaggtgagccgttcgatgcgtcgagacatggggtgataacagcctgaagggaagatgaatcaggaaaaaacagcgcctgacggcgctgtgactggtcgtgcctgctatccgtaaccgcggaacctgaaaaggcttgcaggcgataacagtat

SEQ ID NO: 1103 - DNA, 1497 bp, unidentified
  source 1..1497: mol_type = unassigned DNA; note = element_1478591
  misc_feature 1: note = core
  misc_feature 2..275: note = LE
  misc_feature 276..1478: note = CDS
  misc_feature 1479..1497: note = RE
  misc_feature 43..219: note = bridgeRNA
cgttacctttttcccagctcttccgtccagcaggatggaggggtgttggccggccggtcctgggcatgatcgtttgcccccagtcgtcgatgatccggggggtgttgtcaccgaggatcggtcaggtggtcgcggatcgctgatagaggcgggatctcctgtggaggacctttgtaacgtggatgccgagcgtgaccacctcccggccggccagcacgagcagatgccagtacgagagaagggatgggtccatctcggagcgagcacgcccggcggtgttcgtcggcctcgacgtcggcaagtccgaccaccacgccgtggccgtgacggcggccgggaagacggtttacgacaaggccctgcccaacgacgaggcccggttgcgcgcgatcctcgaggagctggccaccgcgcacgggccggtgctgatggtggtggatcagccggccacgatcggggcgctggcggtggccgtggcccaggcgatggagtctgtcaccgtggcttacctgccaggactggccatgcgccggatcgcggagctgcacccgggtacggccaagaccgacgcccgtgacgcactgatcatcgccgaggccgcccggaccatgccgcacaccctgcgcgacatccgcgtcgatgaggcccagatcgctgagctggccgtgctggccggcttcgacgacgacctcgccgcccagatcaccgccacctcgaatcgattacgcgggatgctcacccagatccaccccgccctggaacgggtcctggggccgcgggtgggccacccggcggtggccggcctgctcacccgctacccgaccccggcgaagctcgctgccgccggacgaggtcaggtgagggcgcggctgcgcaagcacgcacccaggttggccgagaccctcaccgaggagatcttcaccgcgttgggacagcagaccgtggtggtggccggcaccgaggccgccgccaccgtcgtaccgatcctggccgggcagctggccgcgctgacgacccatcgggtacaggtggcgagccaggtcgaggtcctggtggaggcccaccctctttccgaggtcctgacctcgatgcccggcatcggcgtcaggaccgcagcacggatcctcaccgaagtcgtgggcaaggacttcgccgatgccgggcacctgacctcctacgccggaatcgccccggtcacccggcggccggggacctcgaaccgcggcgagcacgccccccgcggtgggaacaagaggctcaaacgggcgctgttcctctcggccttcgcctccttgcaccacgccccgtcgcgggcctactacgaccggaaacgcgcccagggcaaacgccacaaccaggcgatcatcgccctggcccgccggcggaccgacgtcctgttcgcgatgctgcgtgacggcaccctctaccaagaccccaccgaccctcagaccgcgtcatcaatggccctggctgcttgacgaaaaccatagaggcacc

SEQ ID NO: 1104 - DNA, 1404 bp, unidentified
  source 1..1404: mol_type = unassigned DNA; note = element_147c029
  misc_feature 1: note = core
  misc_feature 2..87: note = LE
  misc_feature 88..1122: note = CDS
  misc_feature 1123..1404: note = RE
  misc_feature 1165..1399: note = bridgeRNA
taatggaatggacgcccacttccccaaacggcatcgtagtgccaaagtgtagttgtatagaccacacaacggagagaagcgtccgagatgaagattacgcccattggcatcgatttggcaaaggaagtttttcagatccacggcgtggatgagcggggcaaagttgtggttcgcaagcagttgaagcgaaacgagatggcgaaatactttgcgagcctggaatcctgcctgattggcatggaagcgtgtggcagtgcgcatcactgggccaggaagcttggcggctatgggcacacggtcaaactgatggcgccgcaatttgtgaagccgtacgtcaagacaaacaaaaatgacatggccgatgcggaagcgatctgcgaagcagtgcgccggccgaacatgcgctacgttccgcagaaaatgatcgaacagcaggcgattctctcggtacaccaggcaaggcaggggttcgtaaaggccagaacggcacagggcaaccagatcaggggcctgctatcggaattcggtattgtgataccaaaaagtatcgatgcccttgccaaacgcgtgccggagatactggaagatgccgagaacggcttgccgggcgtgatgcggcggttgcttgaacgcttgaccgacaatctgaaagagatgaatcgtcatgtgaatgaactggagaaacaaatccagttgtggcatcgggagaatgaagcaagccggaaactgacggagataccagggctagggccgatcacggcgagtgcaattattgctacggtaggcgatgcacgagaattcaagaacggtcgccagttggctgcctggctggggctagtaccccgacagcattccagcgggggcaagcaaacgctgcttggcatcagcaagcgtggcgatacgtacttgcgtaccttgctgattcacggggcaagggcagtaatcaggtatgcacagaacaaggccgagcccgatagttggctcagaaagctaatggcaaggcgcaacaagaacgtagctgccgttgtgctggcgaataagaatgcccgcatcatttgggcgctgctcaccaaggacagcctgttccgggccgattacacctcggcagtagcagtggcgtaatcgagttgattgagaaaaccatttattaacgagttgaaggagtcgttccaccgattgcacaggcaatcatgaagtgatggcgagacaggtcagaccgtggcagggtaaatccgtcgtttacactgatccttaagagatcgcttttgtgttgggagaccggttagcggattccatcagggacagaagccacaggcttcacttaaagtccggatgtatggctgcaatctttacctactcaaaatcatctattgaaagcttggcaaaaaagtgggcgtccatgta

SEQ ID NO: 1105 - DNA, 1534 bp, unidentified
  source 1..1534: mol_type = unassigned DNA; note = element_147f2c4
  misc_feature 1..3: note = core
  misc_feature 4..239: note = LE
  misc_feature 240..1418: note = CDS
  misc_feature 1419..1534: note = RE
  misc_feature 8..221: note = bridgeRNA
tttcgtattatcaggttagccagttattactggttggcctttttttatggtcggtatacgatggcggtagccgggagaacgtgcgtcttttaggggtcagaccccgtcacaaaaactgttctcccactacccccaatgaccatgtttgagctggtagaggcaacgacctcgcatcacaagcgaagctatgggtttggaaccatcgtgggagtgccggcaattttattagggaggttgttatgcagccagtcgtaggtgtggatgtagcgaaaggatctagcgtagtacaagcttttacaaggaggaacgaaccgtacgggaagttggagagcatctctcacggggatagcggattcgagcggctaggggagctcttagcggagttacaggcgaggatggcaattgcccctgtagttattcttgaagcgacaggacattatcatcgggggcttgtagcttatctcgaacgtagtggatggacgcatttcatcgttaatccgttacagtctaagcgtgcgaaaggaactcaacttaggaaggtaaaaacagatgctgcggatgcttggcatctagccgatatgtactaccgcggggacgttttaccgcatcgtacatgggacgaaacgtttacagagctgcagcatgtgaccaggcagcatgagtttgtgacgggaatgttcgtccaagcgaagttaaacgcgagagcattgctcgaacaggtctttccggcttatgaggagatcttttatgccctgttctctgtcacgtcgctaagcgtgttggagcgttgtttagagggcgatgatggggatcttgttgaaactattcaggcatgcgctggaaaatcccgttcgagacgttgggttgatgagaaagcaagacgacttcgagagatcttgttagattggagagcacagcctagaagccaatctcagaccgtagccttaagtggtatggtttccttgttgctttcgttcacggagcaattaagtgatcttgagaaacagatgaatgaactcgcatttgatttacctgaggtagaactggtgaaaagcatacctgggatcggggataaattagctgcagcaattgttgcggaggttggagatgtaggacaatttgaaggcgctaaacagcttgtggcgtatgcgggattagaccctggaatctttagttccgggaaatttaccgccacaagttcacgaattactaagcggggttcaaagagacttcgccgatcgttgtatttagctgtgcaatgcgggatccggggaagcaccaacaagaggattagagaatattacgacaagaaaagaaaagagggcaagccatacaaggtggtcgtgatcgcttgcgccaacaagcttctccatcacgtgtacgccatccttagtaaagagcagccctacagaaactaaaaaccaaatttacccataaccttcacgccaatgaaggttatttgtcgtgcctagaaatcagtataccaattaaactgccccactccaatactaaatgcttgacaagtattagctgg

SEQ ID NO: 1106 - DNA, 1341 bp, unidentified
  source 1..1341: mol_type = unassigned DNA; note = element_147f618
  misc_feature 1: note = core
  misc_feature 2..80: note = LE
  misc_feature 81..1103: note = CDS
  misc_feature 1104..1341: note = RE
  misc_feature 1106..1338: note = bridgeRNA
taatgagatggtcagcccggcacgggcccccggtaaatctagacttaccggaaggcccactttcgctaaggagaccgctcatgaacagcttggcattacttggtcttgatattggaaaaagcacctttcacctcgtagggcacgacgtacgcggccatgaggtgctgcgcaagcagttcaatcgaaatcgactgcttcagttcctggcaaagcttgagccctgcacgatagtaatggagtcctgcggcggctcacattggctcgccaggaagcttatttccttcggccaccaggtgaaacttatagctccgcagcatgtgaaaccgtacgtcaccggcaataaaaatgactacatagatgccgaggcaatttgcgaggcggcgtcccgtcccaaggcacgctatgttgcgatcaagacggtggaacagcaggtgctctcgacccagcaccgcctccgagaggcattggtatgccaaagaactcaaaccatcaatcgtatccacggattcttgctggaatttggaattgcgctaccggcgaccaaagccgccatgaaccaaattcatcaaatactggatgaccctgccgctgagttgcctcaacagttgacgcagtttatcgagcatctgttggaagacatcaaacggcttacggtagagattaagtccatcgaccacagcatcaaggaacaggtggcagttgatgacgcgggaacacgcctaatgagcatccccggtatcggccccatcatcgctagcgcgctgctggccgacgtcggggacgcttccaattttcactcagcgcgagacttcgctgcttcgctggggctggtgccaaggcagtactcaacaggtggccaaaccgtccttttgaacatcagcaaacgtggtgataaataccttcgaaagctcttggttcaaggctcgcgggcagttttggtgcgcatagataaacgcaacgacgccttgggggcttggtgccgagacctgctgacgcgaaagcacccaaacaaggttgcctgcgccctggccaataaactagcaagaatcgtatgggccgttttagctcgcggaggtagctacaacgcgcagttgatgacttgatcgaaacactaccggcttttgcgacgacaacgatgatgacgataaacagctcaaatctcgcctgagaacctggtaagcaaaacagcttttgaagctgaagcccttttcaaggacaggcgggagcgactattcatcaagggccaagcggtgaaactgccgactatgagcccggatacattagcgcaagcatgctttaccgctcatcgtctgtggttgcagggggtgggctgaccataca

SEQ ID NO: 1107 - DNA, 1328 bp, unidentified
  source 1..1328: mol_type = unassigned DNA; note = element_14a67f6
  misc_feature 1..2: note = core
  misc_feature 3..68: note = LE
  misc_feature 69..1106: note = CDS
  misc_feature 1107..1328: note = RE
  misc_feature 1095..1326: note = bridgeRNA
ttaatgagatggtcactccctccttcccggtactatgctgaggataggctttcattcggagaactatcatggaaaacattgcgctcattggtatcgatctgggtaaaaactctttccatattcattgccaagatcgtcgcggcaaggctgtttaccgtaaaaaatttacacggccaaagttaatcgaatttttggcgacatgccccgctacaaccatcgcaatggaagcctgtggtggctctcactttatggcacgcaagttggaagagttggggcattttcctaagctgatatcaccacaatttgtccgtccattcgttaaaagtaacaaaaacgactttgtcgacgccgaagctatttgtgaagctgcatcgcgtccgtctatgcgttttgtacagcccagaactgaatctcagcaggcaatgcgtgcgctgcatcgtgtccgtgaatccctggttcaggataaggtaaaaacaaccaatcagatgcatgcttttctgctggaatttggcatcagcgttccacgaggagctgccgttattagccgactgagtacccttcttgaggacaatagtttgcctctatacctcagccagttattgctgaaattacaacagcattatcactatcttgttgagcagattaaagatttggaatcccagttgaaacgaaagttggacgaagatgagattggacagcgcttgctgagcattccctgcgtcggaacactgacagcgagtactatttcaactgagattggcgacgggaagcagtacgccagcagtcgtgactttgcggcggcaacagggctggtaccccgacagtacagcacgggaggtcggacgacattgctgggaattagtaagcgaggtaacaaaaagatccgaactttgttggttcaatgtgccagggtattcatacaaaaactggaacaccagtctggcaaattggccgattgggtcagggatctactgtgtaggaaaagcaactttgtcgtcacttgtgctctggcaaacaagctggccagaatagcctgggcccgaacggcacgacagcaaacttatgtagcaggacggcagaaatacaccggtttaaagaatcactgatctggttttgcgaatactgatattgatgatactaacggcccaccggcctgttgaggaacctgtaaaacggaaaggctcattgaagccgtatattttctggaggttcatcaggcgcggaactcatcgaggcgcgggaataaaatcccattcagacgccggatagattcaagcaagccaatttatcgtcaaaatcggtgttgcaaaaacgggagtgaccataga

SEQ ID NO: 1108 - DNA, 1155 bp, unidentified
  source 1..1155: mol_type = unassigned DNA; note = element_14a9e9d
  misc_feature 1..2: note = core
  misc_feature 3..191: note = LE
  misc_feature 192..1139: note = CDS
  misc_feature 1140..1155: note = RE
  misc_feature 22..190: note = bridgeRNA
cttgtatcttgcgccgagggcggcaatgataccgcacatcatcaaccggggcctgacagaccgatcaagccgaggtcgtcacagaccgtgcgacagcgcgggtcgtcaggcccctctctggaccgagcccgaacagttgcgtgggccgctgagcccgtatcatgcaaggccgggccaccaaggaggatgtgatgccacacacgcaggtctttgtcggaattgatgtctcgaaagcgcagttggacgcggccgtccgaccggcggggcgcttcgccgccccgaacgatgaggccggggtggcgcaggtgctcgcacgtctgcgggccgtgccgccgacgctggtggtggtggaggccacgggcgggctggagatcccgctggtgggggcgttggccacggccggcgtgccggtggtcgtggtcaatccccggcaggtgcgcgacttcgccaaagccacggggaaactggccaaaaccgatgccgtggatgcccaggtgctggcgcacttcgccgaggtgatgcggccggagccacggcccctgccggatgagcagacgcaggctctggcggccctcgtggcccggcggcggcaactggtcgagatgctgacggccgagcagaaccggctggccagtgcccgggggccggtgcgccagaatctgcgggcccacattgcgtggttggtccgtgcgctaggccacgccgatgccgatctcgcccaggcgattcggaacagtccggtgtggcgggagaaggaggcgctcctgcggagcacgcccggcgtggggcccgtgctgacgacgacgctgctggcgaatctgcccgaactgggcaccgtgaccggcaaacagatcgccgccctcgtgggggtggcgccgttcaatcgcgacagcggcacgtggcgcggcaagcggaccgtctggggcggccgggcgcagattcgggcggtgctctatatgggggccctcgtcgccgcgcgctttaatcccgtcatccgggccttctatctccgcttgtgtgccgccgggaaagcgaagaaggtggccctgacagcgtgtatgcggaaactgttgctcattctcaatgcgatgctcaaacagcggaccccgtggcgcacggaaccggtgccgtgtgcttgacagctcaagacagttg

SEQ ID NO: 1109 - DNA, 1523 bp, unidentified
  source 1..1523: mol_type = unassigned DNA; note = element_14afd79
  misc_feature 1..2: note = core
  misc_feature 3..239: note = LE
  misc_feature 240..1433: note = CDS
  misc_feature 1434..1523: note = RE
  misc_feature 9..259: note = bridgeRNA
ttcgtactatataagagtagagattaatacctctattcttatttttttgttatgatgagtttgattggctgacgtaatttctaattgggacaccacgcccgtagctaaacttgtcagccagctctcatcttcctgtattcgattcagcaagttgggacatagctcccgagtaactaacgaacatgaatggactttgagatgttgggaccaatcataatagaaccaaaggaggaaatactatgatagctgtaggtattgatgtatcaaaatccaaaagtacagtagccattctttcatctagtggcgaaatacttgccaaaccatttgacattcagcatatagaatccgagctgaatagttttatatcttatcttacttcattagacgaagatgtaaaaatcgtcatggaagcaaccggtcattatcaccttcccatcctaaagcagttattggctgcaaatctttttgtatgtgttatgaatccatatcttatgaaaaaatatggagacaatgaaattcgaaagggtaaaaccgacaaaaaagacgctatgagaatggcggtctatgcattagaaaaatcttacgcccttactccatactcgattgtagatcagcgttatgccgatttaaaattcctttcaaggcaatataatcaacgcgtagctactaaagtaaaatgcaacgtttacctcttaaaccttctcgacgaagttatgccagggatagataaaatccttatgtctaaatcccagaatcccgaaaacaatatcttatattgctttattgaaaaatacaaaaatttcgaaaatattaaaacaatggggcaaaaacgttttcttaatagctatataaaacttgcggagaaagtggggtctcgcacctatcaagcaaagggtctacaaatctatgaattagccaaaaacagcatcactacacgaggaaccgacccttatactgaactggcattaacgcaatgtgtaaaaatgcaaaagcttgcggaaaaggatgctaaggacttaatggttcagatgcaatccatcgccatattacttcctgaatatcctattgttcgcgctatgggtggtgtaggcgaccgtttagcccctcggttaatcgcagaaattggcgatgtgcggcgttttaaaagtggtaaagcattaaacgcatttgccggaaacgatgctccaccataccagtctggtcaatttgatagttcaaacagacacatttctaagcgtggagctccagcacttcgaaaggcttgctatgaagttatgcagtgtcttaaaatgcataagccaacagatgacccagtatatcagttcatgataaaaaaagaacttgaagggaaaccgctcaacgttgccaaaatggctgcaataaacaaatttttaagaatctattatgctcgcgtaatggaaatttataagtaacaaatttctcatattattatgaggtttattaaattcgcccttttttaaaacaatttttttcaaaaaacatcttgacaattattagcaagg

SEQ ID NO: 1110 - DNA, 1281 bp, unidentified
  source 1..1281: mol_type = unassigned DNA; note = element_14b89d6
  misc_feature 1..2: note = core
  misc_feature 3..195: note = LE
  misc_feature 196..1176: note = CDS
  misc_feature 1177..1281: note = RE
  misc_feature 17..201: note = bridgeRNA
cttgtattatccttcccgtgcagagagagccggccagctctctctgtcatgcagtccgcatgccgtatcatgccttaggttttcaacctgtgtcgtagatttatgcagcggactgccattctcccaaagtgataaaccggacagtatcatggaccggttttcccggtaatccgcattcacaaggttggtctcactatggaacagaaacttcattacattggtatcgacgtctccagagcaaagctggatgtcgatgtgctgcgccctgatggccgtcaccgctgcaaaaagtttgaaaacaccccgaaaggacacgatgcgctggtcagctggctgaacgggcaccaggtggctcccgcccatgtctgtatggaagccaccagcacgtacatggaagatgcagcaacatgtctcagcgatgccgggtttatcgtttccatcattaatcctgctctgagcaaagcctttgcgaagagtgaaggtctgcgcagtaaaacggatgccgtcgatgcccggatgctggcggagttctgccgtcagaagcgccccgccgcatgggaagcgcctcatccgcttgaacgcagactgcgggcgctggtgctgcgccaccaggcactgacagacatgcatacacaggagctgaaccgtctggagacagcccgggacgtacagatgccgagcatcaatgcccatcttcagtggcttgaggcagaactgaaacgtcttgagaagcagataaaagacctgacagatgatgatccggatatgaaacaccgcagaaaactgctggaaagtatcccgggtatcggagagaaaacatctgcggtattactggcttatattggtctgaagaaccgcttcgcccatgccagacagttagctgcttttgcgggtctgacaccacggatttatgagttgggcagcagtgtgagaggggcgagccggatgagtaaggccggacatgtgtcgcttcgcagggcgctgtatatgccggcaatggtagccaccagcaagacagagtggggacgagcgttccgcgaccgtctggcggctaatggcaagaaaggaaaagtgattctcggcgcgatgatgcgcaagctggcccaggtggcgtatggagtgctgaagccaggcgtaccgttcgatgcgtcacggcataatccggtagaggcgtaaaaatcgcggaagggatgaaaaaaacagcgcctgacggcgctgtgtctggcatgcctgcaatcagggaaaccggaccaggaaaaaacttgcaggccataacagtat

SEQ ID NO: 1111 - DNA, 1169 bp, unidentified
  source 1..1169: mol_type = unassigned DNA; note = element_14bd26d
  misc_feature 1..2: note = core
  misc_feature 3..215: note = LE
  misc_feature 216..1166: note = CDS
  misc_feature 1167..1169: note = RE
  misc_feature 16..191: note = bridgeRNA
cttgtatggcgttagggtaggaacctgtcgggggtggagggacaaaatccgcttctgcaagccagacggtaggagacttcccccgcccacgcactcacgacaagcgccaataaggaatccatcggatcgagtggccgctcaacccgacaatactggcaagcctgcgccattgtgagtcccgacaggttttcccatcttcatcgtcggagcgcgtaatgacaagccaaatacctgttattggaatcgatgttgccaaggagtcgctgagcctttgcgatacgcagtctggcgaagtattcgagttggccaatgaccgtcgcacgatcaaggcctggctcaagaccttgccagcctgttgcgccatcgcgatagaagccaccgggatctaccacatggagattgcgaccctggcttatacgacggggcatcggatctacatcatcaacggtttccgtctgagtaactaccgcaaggggatcggcagaagaaacaaggacgaccgaagtgacgctcagctattggcccgatacctgtctcatgagcaagcacatttggagccatggcaaccaccgagtaaggtatacagccgcctgcagacattactgcatcgtcgggctgttctcgttcgcagtgcgacgtctctgcgccagagcttctctcaagaccgagcgctgacaagcgctctgcaaccagttctaaaacgcatggctgctctggagcagcgcttggaaaagatgatccaggcgacactggacgaagccggactcaaggagcagagcaagcgttgccaggctatcgagggcattgggccgctgacagcagcggcattgaacttggcatttctacggggatacttccgcaacagcgacgcctttattgcgttcctagggctggatgtgcggctcaaggagtccggtcgttatagcggtagacgaaagctgaccaagcaaggtgacccagaaattcaccggttgctacacaacgccgccatggcagcagcacgcaccgaacgctggaaggcgatctatcagggctatctggcacgcggcctgaagaaaactgaagccttgaccatcctggcgcgcaagctagcccgaatcgcctttgctctgatgcagacaaaggcagcctaccaaccccccggaggccacgatgtcttgacatagaat

SEQ ID NO: 1112 - DNA, 1529 bp, unidentified
  source 1..1529: mol_type = unassigned DNA; note = element_14c1328
  misc_feature 1..2: note = core
  misc_feature 3..238: note = LE
  misc_feature 239..1414: note = CDS
  misc_feature 1415..1529: note = RE
  misc_feature 3..214: note = bridgeRNA
ctcgtattattgtgtcatagccttttcataagatttaggctatgctgttttggatactgtggattggtgttgccctcctaccacttgatggtttgaataaggctccaaccacagtctctttgttaacttgttgatcagttagataccgcacgacggtttatgtagaacgaggttacaactgcaaagagccctgtgggtcctaacagtatcgaaatctattattgaaaggagtgacgctatgatccttgtaggaatcgatgtcgccaaagataagcatgactgctatatctcaaactctgacggtgaagtgctgttcgacgtcttcaccatccccaacacaatggatggcttctcagagctttatgagaaaatctcatctgtagctgaagatctttccaaagtaaaagtaggtctcgaagcgaccggccattacagctacaacatcctgggattcgttcttaataaaggtctgaccacctatgttattaatccgttacatacaaatcttttcagaaaaggtcaaagccttagaaagacaaaaacggatagaatcgacgcccgttccattgcgcttatgttgttgaccgattcgagcatagagccctactcgctcacatcataccacaatgaggaactcaagtcattgacgcgttatcgcttcacaaaagttcaggagcgagctaagtacaagacttcagttgctcgtctcgtaagcatcctctttccagagctggaaaagcttgttccgacgcttcacatgaaatccgtctatgctatgctttccgagttccccggagcctcgcatattgcctcggcccatctgacccgtttgactcacttgctgtatgtcgagtccaaaggtcattatggcaaagacaaggccattgagatccgtgaagctgcaagagcatccatcggatccgttatgccagcaaagtctctggagctcagtcacaccatcagcctcataaacatcttaagcaatgagatcgatgagatcgaagcggagatcaaacgcatcatggatgagatcaactctccaatcctgagtgttcctggtattagctaccgcatgggtgccatgatccttgcagagataggcgattttgatcgcttctcttctccggatcagatacttgcctatgcaggtatgtcgccatcgacttaccagtcaggccaacttacatcctcttacgctcacatggagaagcgtggatctaaatatcttcgctatgcgctgttcaatgcaacgatatatgtttgcaaatggaacccgacattctcagcctatcttgctaaaaaacgagccgaaggcaaacattactatgtcgccattactcacgcagcaaagaagcttgttcgcttgatctatgctctggaaacaagtggagagcgctacagaatagctgcatgatccttccaatatgttctgcctggcgtctttgacgccttctttgtcgtgcagttttcaaggtgctgatctatctaaatggattcctccaatttagtcttgattcttaatagttagt

SEQ ID NO: 1113 - DNA, 1357 bp, unidentified
  source 1..1357: mol_type = unassigned DNA; note = element_14c1c55
  misc_feature 1..2: note = core
  misc_feature 3..65: note = LE
  misc_feature 66..1100: note = CDS
  misc_feature 1101..1357: note = RE
  misc_feature 1105..1346: note = bridgeRNA
ttatggaatggcccgcccctcacttaccggcatcatgatggtgtcggatctggaggagaggaccaatgaccaagacacccattgccgtgctcgggatcgatctcggcaagaacagctgcagccttgccggtctggacgcggccggagcggtggtgatgcggcggaagatgacccgcgagggcgtaatggcgttcacagcggccttgccggcctgcgtcgtcgccatggaggcgtgctgcggagcgcatttcttggggcgcgtcatcgccgaccaggggcacacggtaaggctgatgtcgccggagtacgttcagccctacgtgaaggcgcaaaagaccgacgatcgggacgccgaggcgatcgcagaggccgcaactcggccgacgatgcggttcgtgacgctgaagagcgaggctcagctcgacttgcagtccctgcaccgggcccgagagcggctggtcctggctcgaaccgccctgatcaaccaacttcccgccgtgctgctggagcgtggaatcacgctggccaaaggtcgcgccgtcctcatgcgtcggcttgaagaggttggctctgaaggcttggcggtcagcgaccgcacccgcaggcttgtggaggacctgctcgaggagtgcgacggcctgagtaggcgaatcaaagcctatgatgacgaactcgccgcagttgtccgcagcgacgaacaggcgcgtcggctttccagcatcccttgggtgggcgtgatcaacgccaccgctttgctcgccgccgtgggcgatggcagcgccttcgccaaagcccgcgatctggcgtcttggctcggccttacgccccgccagcactccaccggaggcaggacccggatgctcggcatccgcaagcggggaaatcgatatctgcgaaagcagctgatcgatggcgccagggcgacgctgccgcatcttgccgccaaacctaacgcgatgggcgcctggctgcagcagctgctggcgagatcgcaccccaacgtcgtggtcgtggctctggccgccaagctggcgcgcatcgtctgggcggtgttacgacgaaaggcgctcttcgaccacggcaccgtcgcggcagcctgatcaacacaactgcggcggcgctccacgccaccgctcccgaagtctgcgtgaggtgaaagcacagatggcataacggtcaaaccggcggactggagatcctgatcctaaatgcggcgctggtcaccgaggcttttatgaggacccgggacgcgcggatatccatcttggccagggctcgaccctgagaccggatacgttgttgcagaccgctgacgccatctagcgaacaccccttgcggacggggcgggccatacgt

SEQ ID NO: 1114 - DNA, 1447 bp, unidentified
  source 1..1447: mol_type = unassigned DNA; note = element_14c8d28
  misc_feature 1..2: note = core
  misc_feature 3..159: note = LE
  misc_feature 160..1194: note = CDS
  misc_feature 1195..1447: note = RE
  misc_feature 1211..1442: note = bridgeRNA
agatggggtaacgggccggccgaagcagccgctcgctcgctacggcgcgatttgaaagcgcgctcgcgagcggcttccgctaaaggcggtcgtccctcaaactgatggtgttcaaccggagtcgggcgagcccgctccaagcatcatagagggacgaccatgaaccattatgccggaattgacgtgtccttggaaagctcgacgatttgcgttgtcgacggcgcgggcaagattttgcgggaggcgaaggttgcaagcgaaccggaggcgctgatcgcctggttccgcttgcttggcattccgctcgatcggatcgggctggaggccggtccgttgtcgcaatggctgtacgcggcgctgcgcgaggcgaagtttgcggtcgagcttttggagacgcggcacgtccgcgacgccttcaagtcgatgccggtgaagtcggatcgcaacgatgcccgcgggattgcccaactgatgcggcttggctggttccggccggtgcactgcaagtcgatcgaagcgcaggagacgcgggcggtgttgacggcgcgcaagctgctgcagtcgaagctgcgcgatatcgagaacagcctgcgtggcgtgctccggggctttggactgaaggtcggcgagaccaccgagcgtacctttgcgggacggatcaaggagctggtcgccggccatcccgggcttgagatcgttgcacaggccctgctcgaagcgcatgcggtgctgcagcgcgagttcggcggcctggacaagcggacgcagaagctggccagattgcatccacaggccaagcttctgatgacgaccccggccgttggtccgatcgtggcgctgacctatgcctcggcaatcgacgatccggcccggttccgatcatcgaaagcgaccggtgcgcattttggcctcactccgaagaagtaccagtcgggacaaaccgattacactggccgcatcagcaagatcggcgacgcttccgtgcgtgaggcgctttatcaggcggctcacgtcatgctgaccaaaccggtcaaaaactgctcggcgctgaagggctgggccatgcggatcgcccggcgtgcgggcatgcgcaaggccaaggtggcgttggcgcgcaagctcgccgttatcctgcatcgcatgctcgctgatgcaacaccgttcaaccccacggccaaggccgcggcaacctaagcaaggagtatcaatcggttctgggcgggccacgacaccaggctctccccgagcgaagtcccctcgccgggacgatggatccggtcaggccgccatccgggaagtcggctcacaaccacgcttccgtagattggccggccggctcctcatgcaccccctaaggtgacggccaccgcgccgatcccgtacagaagcaagtgcccggcaagtggacaacgcaaaaagggattgactaaccaaggcccgttacaga

SEQ ID NO: 1115 - DNA, 1465 bp, unidentified
  source 1..1465: mol_type = unassigned DNA; note = element_14c9055
  misc_feature 1..4: note = core
  misc_feature 5..251: note = LE
  misc_feature 252..1448: note = CDS
  misc_feature 1449..1465: note = RE
  misc_feature 1..252: note = bridgeRNA
ccccgttacctttttggtgggccttgaatcgaggctcctggtcgccgggcccggcatgacttacttcccctgtcgtagacatgatccggggggtgttgtcaccgggttctggtggcgtgggttgatcgctgatagggacacggccgtccgctcggcaagtggctgggtgggtaggtctcttcgtaacgtgggtgcgacctccttcgcctgatcttctcgaccagctggcatcgaatgactagaggctggtgatgacgattaccgagtacgccgtgttcctgggactggacgtcggcaaagaagaacaccacgcgtgcgggttggacccgggcgggaaccgggtacacgacaaggcgctgccccaggacgaggcgaaactgcgcgagctttacgcaatgcttgctcgtcgcgggccggtgttggtcgtggtggaccagcccgccaatatcggtgcgctgccggtcgctgtggcccgcgacgaaggcgtgcaggtggcctacctgcccgggctggcgatgcgccggatcgcggacctgcacccgggcaacgccaagactgatgcgcgcgatgcgtacatcatcgctgaggcagccagatcgatgccgcacgcgctacgccgggtcgacgtgcaggatgagaccttggccgacctggacgtcatcgtcggttacgacgacgacctggccggggaagtcaccgccgccgcgaacaggatcagaggccttctgacacaagcgcacccggccttggagcgggtcctagggccacgggtcgcccaccctgcggtgttggagttgttgacccggttcggtggcccgaccgggctccgcgcagccggtaagcggcggttgctggcggtcgctaaacccagagcgccgcgctcctaccagcgcctggtcgatgacatcgtggacgcgttggatcagcaaacggtgaccgtgcccggcacccgcgccaccgagctcgtgctcaccaaacgggccaccgcgttagccgcgctgatcacagaccgggcccaggtcgccgctcaactggaggacatgctcgatgctcaccctcttgcccaggtcctgacctcgatgcctggcatcggcgtcaggaccggcgcccgcatcctgctcgaagtcggcgatggcaccgggttcgcgacccctggccacctcgctgcgtacgccggcctggccccggtgacacgccggtcgggcagctccatccgtggggaacaccccagcagaagcggcaacaaacaactcaaacgagcgatgttcctggccgcgttcgctgccctgcacgatccgacctcccgggcctactacgaccgcaaacgcgccgaaggcaaacggcacaacgccgccctgatctgtctcgcacgacgccgctgcgacgtcctgttcgccatgctccgcgacggcaccacctaccagacccgaccccgctcggccgcttgacgaagaccatagggaca

SEQ ID NO: 1116 - DNA, 1366 bp, unidentified
  source 1..1366: mol_type = unassigned DNA; note = element_14ce709
  misc_feature 1: note = core
  misc_feature 2..311: note = LE
  misc_feature 312..1109: note = CDS
  misc_feature 1110..1366: note = RE
  misc_feature 1143..1360: note = bridgeRNA
tactgagatggtccgccgcttaaacctcaatctggcgatgaggatcttataggcagattgaaggaggatcatcgacatggagattcgttccgtaggcattgaccttggcaagacgacctttcacccggtggctcttggcgataactgcaaggtgctgctgaagaagaagtttacccagaagcagttgattgccttcaccgcgaacctgcagacctctttgattgggatggaggcctgttccggggcgcacttcctgggccgtacttttacgggaacaaggccacgatgtgaagctgatcccggcccagttcgtgaagccattcgtgaagtcgaacaagaacgacttcctggatgcggaagccattgctgaggctgtggatcgggagaacatgcgatttgttccgatcaagacggacgaccagctggatctgcaggcattgcatcgtgtgcgcgatcgtttgatcgcgcgaagaacctcagtcatcaaccagctgcgggccttcctgctggagcggggtctggtatttgcaaagagcccggccaggctgcgcgagcgcatgcccgagatcctcgagaacgccgaggaagatctcactccgcgtatgcggaacctgctggctcaactttggaacgagtggaaggatcttgaacagcgggtggtcgatctgaaccaggaagtggagctgattgcctcaagtgatgcggcatgcacgcggctcaggcagatccccggcgttggcccgctggtcgcaaccgcgatcgtagccgcgatcggtaacggcgcagccttccataaggggcgtgagttttcttcctggcttgggcttgtgccacgacagcactcgaccggtggtaaggcccgcctcttcggtatcagcaagcgcggtaacaactacctgcgcaagatcttcatccatggagcccgcgcagtcgtattgcgatcgaagcgagaccgcgtcgccatgggcgcgtggatgaccgctcttgaagccagagcgccacgcaacgtgctcatcgtcgccacggcaaacaaactggcaaggatcgcttgggccgtgctgtcaagcggccaggactatcgggcagttcaagagccagtcgcggcctagctaagcgtagctatcaagatcaagttctcccaccgaggtctgcaccggataagtaaagatgaaagaacagtcaaacggcgtacctgaaacctgattgctcaataggctcttccacagccgaggggttttgtaggacaggtacgcggcgtatctcatcatggccaggagactgatctccaccaaaaggccggatacattgacgcagacattccttcatccataaacttttcccttgcattcagacggcggaccataca

SEQ ID NO: 1117 - DNA, 1382 bp, unidentified
  source 1..1382: mol_type = unassigned DNA; note = element_14d2386
  misc_feature 1: note = core
  misc_feature 2..69: note = LE
  misc_feature 70..1101: note = CDS
  misc_feature 1102..1382: note = RE
  misc_feature 1142..1377: note = bridgeRNA
caatggtatggaccccgccctcccggcgaggtggaatctcgaacgtcaactgcgatgaaggaggatgtcatgcaggtcgttcggataggtctggatttggcgaaatatgtttttgcggttcacggcgtcgacagccacgggaaagtcatagtgcgaaagacgttgcgtcgtgatgcggtggcccgtttctttgccaatttgccaccgtgtctggtcgggatggaagcttcgaatggagcgcactattgggcaggagtgctcaccgatctcggtcacgaggtacggctgattagccctcagtttgtgacgccgtatgtgaaatccaacaaaaatgaccggaatgatgcggaagccatctgcgaagcggtcggccggccgtcaatgcgcttcgtgccgccgaaatccgtcgatcagctggcggtgcaggcggtccatcgcattcgtcggcgcttggtcgctgatcgggtcaggctcgtcaatcaggttcgcggtcttctttcggagcatgggatcgtcattgctcgtgacatcacacaactgcgacgcggcctcgccgaaattgtcggggacagcgctgatggcctcagcgagctggttcggtcgttgatgagggagttgcaggtggaaatggccgagctcgatcatcgcattgcaagctatgaccggcggatactggacatcttccgccgcagcgagcagtgccaacgcctcggcaagatcgaaggcatcggcccagtgacagcgacagccttgatcgccgccgtgggcgatagaacctgcttcaagaacggtcgccagttcgcggcttggctggggctcgtgccgaagcagcgatcgagtggcggacgggcccgattgttcggcatcagcaaacgcggcgaccgatatttgcgcacgctaatgatccatggcgctcgcgccgctctggggcgtgctggcggcaagcaggatccacggagcctgtggctcggcaaattacggcaacggcgacatcccaacgtcgcggccgtcgcgcttgccaacaagaacgcacggatcgtgtgggccatgctctccggtgacacattctacgaacgcgggttgtcggtgaaagcggcctgaggtcaagactgcgcagaaggaaagaaggaggatctcccccgacaattgcaacaaatggcaggagatggcgaaacggtcaccccgtcgcttcccgaacctggtgtgtggaccggcatggcttcgaccaatgtctgggggccgttgaggtggaagcgagcgaatacccatcggggctcgcggcgaagagtatcgagccgcatcaggaagccggatatacgtcagcagttgtgaccgttgatcctaattccgccggcctgttgcaatcgggcggggtccatata

SEQ ID NO: 1118 - DNA, 1271 bp, unidentified
  source 1..1271: mol_type = unassigned DNA; note = element_14d2615
  misc_feature 1..2: note = core
  misc_feature 3..221: note = LE
  misc_feature 222..1256: note = CDS
  misc_feature 1257..1271: note = RE
  misc_feature 8..207: note = bridgeRNA
ggcgtatgaaatcccccggtgggttccctcttagggcgagagtgtcccggaaccggccggaggtgactccgaagccgcaagtcgcggccaacggttgtgccgctgacctctgacctgaccgtccctccggccgggaccgggcggcggaagtgacttgatagaaggctggatcgaacccaacgcctgcttgtcctcccgccagccaccggaaggaggccagcgtggaggtggcgatcggggttgatccgcacaagggctcgctcgccgtggcggcggtggatcccctgggcaaggtgatcgacgcacgggagttctcgaacgacccaccggggcatggggctctcctcggatgggtccgcgaacgcagtccggaccgggtgatcgggatcgagtgttcgctcagctacggtgcgtccctctctaggcttctcctgggtgccggggaggacgtccgggaggtgccgaccacgctgactcaccgggagcgacgccgccgacgctcccacgggaagtcggacctggtcgactccgtggccatcgctcggatcgtggccagcggggaggtcctcccttcggcccaccgggtggaggtgctctctgacctcagggccctggtcgactaccgcgaccagctagttcgtgccaggacccaggtggcgaacagggcccacgccgatcttctgaacatccgaccggggtacgggcgggcggtccccaacctccgggccaaggtgcaccgggccaaggcgaggtccctgctgagaggagaccggtcggtgcgggcggagctccttcgcaggcggctcggtgagctgtcccggctggatggggagatcgccgccatggaccggcgcatcgaagccacggtccgggagaccgggacgagcctcaccgacatccccggggtcgggccgttcgtcgccgccaagatcctgggggaggtggggaacccctcgagggttcggtccaaggccgccttcgccgtactctcggggaccgccccactggctgcatcttcgggccagacccaccggcaccgcctgaaccgcggtgggaaccgtcagctgaactgggccctgcactacatcgccctggtgcagtgccggatctcgtcggaggctcaggcgtacatggcccggcagcgggaggcggggaagtcccacaaggaggccatgcggtgtttcaagcgacagctctcgaacgtcgtctaccggcacctcctggccgacgcgaggggggctgagctggccgcttgacaacatagaaggtct

SEQ ID NO: 1119 - DNA, 1527 bp, unidentified
  source 1..1527: mol_type = unassigned DNA; note = element_14d7e78
  misc_feature 1: note = core
  misc_feature 2..97: note = LE
  misc_feature 98..1231: note = CDS
  misc_feature 1232..1527: note = RE
  misc_feature 1258..1475: note = bridgeRNA
agtcagaatggagtgaccggctccatcgcagatcgtagattacgctgcgatggggtccaccgtagcgcagagctacatgcgaaaggagccggtcaccatgaagaatacacgattcgtcggactcgatgttcatgccgcaacgatcgcagtggccgtggcagaggccggaggcgaggtcggatcgttgggaaccattccgaatgagccggacgcggtgcggcgcttgatgaagcgcctggggccggccgagcagctgcgcgtgtgttacgaggcgggcccgtgcggctacacgctctactggcatctcgtccggctcggcgtggcctgccaggtgatagcgccgaccctggtgccggtgaaggcgggcgaccgcgtcaagacggatcgccgcgacgccgaacggctggcccgcggcctgcgtagtggagatctcacgcccgtctgggtgccggatgcggcccatgaggcgctgcgggacctggtgcgggcgcgcgaagcggccaagaaggatcagctccgcgcccggcaccggctgcagaagttcctcctccgtcacgggcagcgcccgccggctggtaccacggcgtggaccgacacgtatcatcggtggatcactaccctgcgcttcgagcagcccgcgcaggacgccacgcgcctggactatctcaccgaggtcgaccatgcccaggcgcggatcgtccggctcgaccaggcgctcgccgaggccgtccagaccgcgcccgcgtccatgcgggcggtcatcgccgccctccagaccctgcgcgggattgcccaggtcgcggccgccacgatcgtggccgaagtcggccgcgtggcgcggttcgcgcgagcccgtcagctcatgggctatagcggcgccgtggcgagcgagcactcgagcgggtcgcagattcggcgcggccacatcaccaagacgggcaacggacacttgcgccgcatcgtggtggaagccgcctgggcctatcgccatcggcccgccatcggcaagaagctgcggcagcgccaggccgggcagagcgaggccatcaaggccatcgcgtggaaggcccaacaccggttgcaccagcgctaccgccgtctcacgggccgcggcaagcccccgcagcaggtcgtcaccgcggtcgctcgggaactgctcggcttcatttgggccatcggcgtggcggtcgagcgacagcaggctgaggccgggcgaccggcggtcgcataggccgcgagggggagagagggagcgtacgcatggcgtccggtgggcagcggtcgaggcgcacacggaaaggagagccctcgcgaagctctatgcgacaggcccctggcccaactcgcgcgactagtccgaggcagctcccgacggatcacgactatgacggcgagctccgcgctcgatccgcgaatatcagagtgatcaaccgtcgcacgcgctgcctcgaccgccgcccactcggcgtcctgcaaatgctcgaaacgacgagcatcgaaaaaccgcttgacaggtcactccatatc

SEQ ID NO: 1120 - DNA, 1516 bp, unidentified
  source 1..1516: mol_type = unassigned DNA; note = element_14d9e61
  misc_feature 1..2: note = core
  misc_feature 3..250: note = LE
  misc_feature 251..1495: note = CDS
  misc_feature 1496..1516: note = RE
  misc_feature 11..247: note = bridgeRNA
ctaatgaggggtaacgggtcggctgcgttagggcaggctcgggttctggtagctgctggcgggtgagcactcgcgggcccgggctcggttgaagccctattgggagaccgtgcccccgccggtggccgggagagcagatcgctgctgggatgtcgtgcccgccgcaggctggcgtgagcactgttcattaggtcgctgatagttctcccgcaggctgccgatgtagtcagggctactgggaggagcacagatgacggttctgttcgtgggtgatgactgggccgccgatcatcatgatgtcgagctgatggaccaggccgggcggacgctggcgcgggcccggctgagcgagggcgcggcgggcatggccaagctgcatgcgctgatcggggagcacgccgacgtcgcggacggcgaggacgatctcgaggtccggatcgggatcgagactgatcatggcccgtgggtgacggcgctggcggcggccgggtacgtggtgttcgcggtgaatcccttgcaggcagcccggtaccgggaacggcatgtcgtgtcgggggccaagagcgacaccggcgatgggcacatcctggcggacatggtccggaccgacgcgcaccagttgcggccggtcgcggatgacactgacgaggcgcaggcggtcaagatagtagcccgcgcgcataagacgctgatctgggagcggaaccggcaggccgcccggctgcgctatcagctgcgggacttcttcccgggcgcgctggacgcttatggtggcctgggcctggactccgccgatgtgctggagctgctgggaaaggccccggatccggccgctgcggcgaagctgaccaccgcacaggtcagcgccgcgctgaagcgagctcaccgccgccacgtggccggcaagacgaccatgatccgggccgcgctgcgcgccccccagctgacgcagcccgcccaggtcaccggagcctccgctgcggtcgtgcgggcgctggccgcggtcatcgtcaccttgaaccagcagatcaccgtgctgcaggggcaggtggaggcgtattttctcgcgcacccggacgctgagatcgtgttgtcccagcccgggctgggccagatcctcggcgcccgggtgctcggcgagttcggcgacgacccggcccggtatgccagcgccaaggcccgcaagaactacgcggccaccagcccgatcacccgccagtccggcaagaggaaaaccgtcatggcccggtacgtgcataacgaccggctccgcgacgccctcggacgccaggcctactcagccctgaccgcatcgccgggagcacgcgcctactacgaccagctccgcgcccgcgggatagagcacgaccccgcgctacgccagctcgccaaccgcctcgtcggcatcctgcacggctgcctcaaaacccggaccctctacgacgaggcaaccgcctggccccaaaacgacaggcaatatccctcagtggcttgacatccctaacccctgggatgt

SEQ ID NO: 1121 - DNA, 1371 bp, unidentified
  source 1..1371: mol_type = unassigned DNA; note = element_14e832f
  misc_feature 1..3: note = core
  misc_feature 4..84: note = LE
  misc_feature 85..1119: note = CDS
  misc_feature 1120..1371: note = RE
  misc_feature 1127..1327: note = bridgeRNA
agcatgcgtaattgggctaccctctattctgaggtcgagctcccgataggatcacaggatatctgtgaacaagggagatagaagatggaatattttgccggaatagacgtatcgctgcgatcctgtgcgctttgcattgttgatggcaagggaaacgtgctgcttgaacgagagctgccttgtgaggtcagcgacatcgctgaatgccttcgcgcatttccctatccgattgaacgggttggttttgaggctggtacgatgagtcagcatctgttctttggcctgaccaaagtagggtttgacgtcgtttgtatggaggcgcgtcaggtcaatgccgcgctttcagcaatgcgcaacaagacagacaagaatgacgcacgcggcattgctcaagtcctacgcaccggctggttcagccctgttcacatgaagagccgcgaagcgcatggcgtccgtgccttgctgagcacccgcaaagcgcttctgaagaagacgatggatcttgccaatgaggttcgtgggctgttgaaggtttttggtattcgcctcccaatgaccgtgaagcacggcagcttcgacggtgtcgtgcgaccgttgatcgagatggacgaggttttggtccatgctttggtgccgctgttggatgcacgcgtcgccctgtacgaacactttttggagctagatcgcagggtcaaacgcgccgccagccaagatgaggtttgcatgcggatgatgacggtgccaggcgtcggaccaattgcatctctcaccttcaaagcggctgtcgatgatccgacgcgcttcaaacggtcacggactgttggtgcgcattttggtctgacaccgcgacgctaccagtctggtgaacatgacaatcctggccgcatatcgaaagctggggatcgagatgtacgcgcaactttgtacgctgcagccaacgctttgcttatgcgtacgatggcggggtcccagatcaagtcatggggcatgcgtctggtgcgcaccaaagggcgtcgtcgcgctgttgttgccgtcgcccgcaaactcgccgtcttgctccacaggatgtggacggatggcaccgaattccgtcaggagaacgtaggaggcatggcatgatctgaacagccgggccccaatcctgacggggtcgtccctcaccggacgaggttcgtggaagaagccgaaaatgtctgctgcgcatcttgaagcgcgtctcaaagcaaggctctccgcgtccgatccgacatatgcgtgcagcggtgccaacacggcatcaaccagactgcgaagagaagcgtgacccggatgagtgacaatgacccgaaagaaagaaggaaaatgagcttgacccaaacacccaattagaga

SEQ ID NO: 1122 - DNA, 1409 bp, unidentified
  source 1..1409: mol_type = unassigned DNA; note = element_14f2639
  misc_feature 1: note = core
  misc_feature 2..92: note = LE
  misc_feature 93..1130: note = CDS
  misc_feature 1131..1409: note = RE
  misc_feature 1177..1401: note = bridgeRNA
caatgggatggacgcccccactctctttcggcatcgatgtgccaaagtggaagtgtcaaagcaaccacttaacgagaatggaggcatccacaatgaatattacgaccgtcggcatcgatttggcgaagaatgtcctgcaagtgcatgcggttgatgcgcggggcaaggcagtgctgcgtaagcagttcaagcgcatcgaggtcagcgcgttttttgccaatctggccccctgcttgattggcatggaggcctgtggcggcgcgcattattggggtcggaccctggagcagtttgggcacacggtccgactgataccaccacagttcgtgaagccatacgtgaagtcgaacaagaacgatgtggcagatgcggaggccatctgcgaggcggtagcgcggccgcatatgcgttttgtaccaatgaagagcgtcgagcagcaatcggtgatcgcactgcaccgggtgaggcagggctttgtcagggcacgcaccaagcaggccaaccagatccgaggccttctcggtgagatgggactaattatccctcagggcatttggcgaatagcgccgcgagtgccggcgctgctggaagcgagaagcgatctgcccgcggtctttaagaacctcatcgagcgcttgaccgagcacttgaagttcctcgaccgccaggtcgacgatatccatcggcaaattgttgcttggggccgcagctgcgagctgagccagaagctacaaaaagtgcctggcgtcggccctttaacggcaacggcattgatagcgaccgttgcagatgctcgcaccttcaagaacggccggcagatggccgcctggctgggtctcgtaccacggcagcactcgagcggcgggaaggctaagctgctaggaatcagtaagcgaggtgataagtacctacgcactctgttggttcacggggcgcgctctgtgatattggccgcgaagctcaagagagcaaagagtcacttcccgtggctggcacagttgctcgatcgacgacatatcaacatcgctaccgtggcattggccaacaaaaatgcgcgcattatgtgggcgctaatggcgcacggcagggagttcgatcctgcctttgtggtggcgccggccgcggcgtagcggcactgctctgcaggagaggttaggactttgagacagatcccaccaaggttgctcaggtaatcacgcagtgacggcaaataggtcagaccgtggatggcaaaccccgacgttcccgcagcacctcgagtgcgtgtctagcggtagggcgccgtccagcagaacccatcatggaccgcgacagacaggtcgcagcaatagtccgaatgtacgggtgcaatctaaacctatgagctatgcaatgagtgagggcctggacaaagtgggggcgtccatgta

SEQ ID NO: 1123 - DNA, 1468 bp, unidentified
  source 1..1468: mol_type = unassigned DNA; note = element_14f443c
  misc_feature 1: note = core
  misc_feature 2..242: note = LE
  misc_feature 243..1451: note = CDS
  misc_feature 1452..1468: note = RE
  misc_feature 43..235: note = bridgeRNA
ccgttaccttggtggtggtcgcagggaggagtcttgcggctgggccagcggtggtcggcatgatgtcttgcctctgtctatcgaatgatccggggggtgttgtcaccggccgtcgcgaggcgaactggtgaccgctgataaggggaacgacccgccgctgctggtgaggtctaacgcatacgtgggtgcggaaccgctcgccgagggctggccccgcacgcgccgaacgagaggagcctgtcatgcaggtggacgacatcgacgtcttcatcggtatcgatgttggcaagagcgagcactgggcgaccgccctgaccacggcgggcgagtgcctgcacgacaggcctttgcccaatgacgaggcccgcctgcgcgaggtctacgagcatctcggcgagcacggccggctgctggtggtcgtcgaccagcccgccactatcggggccctggcagtggcggtggcccaggacatgggcatcactgtgggctacctgcctggcctgtcgatgaggcgcatcgccgacctgtcgcccgggtctgccaagacggaccgacgcgacgcagccgtgatcgctagcgcggcccgcaccatgccgcacacgctgaggtcgattacgtacagcgacgaggacgccgccgcgctgagcatgctcaccggcttcgatctggacctggcccgccaggtcaaccaggtctccaaccgcatccgcggcctgtacacccaaatccatcccgccctcgaaggagtgctggggccttggttggagcacgacagcgtgctggaggtgatcgccacctggcccaccccggcggcgttgaggaaggcaggtagagcccggatcgatgccaaactcaaggccaacgggtgccggcgccacgccgcctgggcccaggccatcgtcgaagccctgagcaagcagaccgtcaccgtcgcggggaccgacgcggccggtgtcgtcctgccgcacctggcgcgccagctcatcgccctgcacacccaaagagcggatatcgccgcccaggtcgaggctctggtggaggcccaccctctttacccggtcctgacctccatgcccggggtcggggtcaggaccgccgccgtcttcctggccgggactctgggcaagaccttcaccacgggcgcacacctggcctcctacgccggcctggcacccgtcacgagacgctcggggtcctccatccgcggtgagcacgtctctcatggtggcaacaagcgcctcaaacaggccatgttcctctcagctttcgcttccctgcgcaccgacccggtctccaggacctactacgagcgcaaaagagcccagggcaaacgccacaaccaagccatcctcgccctggcccaccgccgcatcctcaccctgcacgccatgatccgcaacaacaccctctacaacccccaaccagcccaaccactaaccaccaccgcttgacacaccacataggagca

SEQ ID NO: 1124 - DNA, 1500 bp, unidentified
  source 1..1500: mol_type = unassigned DNA; note = element_14f74b2
  misc_feature 1..2: note = core
  misc_feature 3..249: note = LE
  misc_feature 250..1479: note = CDS
  misc_feature 1480..1500: note = RE
  misc_feature 7..244: note = bridgeRNA
ctaataggggttatcgggttcgtcgatgatgcggcagactcggtgtctggtagccgccggcaggtgagcactgtgcgccgccgggccgttgagccctgggcctagatcgtgcccttgccggtgaccgggagagttgatcgctgctgggatgtcgtgcctgcccttggggcgtgagcactgttcttattagcctgtgatggttctcccgctggctgccgcggatttccgattctgctgatgggagtgctggtgcggctgttcgtgggtgacgactgggctgaggaccaccatgacgtggaggtgatggacgaggccgggagggtgctggcgaaaaggcggctgccggagggcgcggtgggcatggcgctgctgcacggcctcgtcggcggctgcctggacgcagacgaggatcctgacgaggcgcaggtgctggtcggaatcgagactgaccgcggtccctgggttgcggcactggtggcggcgggttacctggtcttcccggtgaacccgctgcagtcggcccggttccgggcccggcaccaggtctcgggggccaagagcgatgccggcgacgcgcacgtgctggctgacatggtccgcactgatgcccaccagctgcgcccggcggccggggacagccccggggcggcggggatcaaggtccttgcgcgcacccacaagacgctgatctgggagcggtcccggcaggtccagcggctgcggcaccagctgcgggagtacttcccggctgccctggaggccttcggggacgacctggacgccagcgaggcgctggagctgatcgcgaagttccccgagccggccagggccgcgaagctcacccgggcacaggtctcggccgcgctcaagcgcgccggccgccgcgacatcaccggccgggcgaccgcgatcctggccgcgctgcgcagcgggcaactgggccagccgccggtcctcaccctggcctacgcggccaccgtccgttccctgatcgctgtcatcactaccgtgaacgagcaggtcaagatcctgcagggtgaggtggaggcccattttggccggcacccggacgctgagatcatcttgtcccagccgggactgggacctgttctcggcgcccgggtgctcgcagagttcggcgacgaccctgcccgctgcgccgacgggaaagcgcgccgcaactacgcgggaaccagcccgctaacgcgggcatcgggcaagaagaagaccgtcaccgcccggttcgtgcacaacgaccgcctcgtcgacgccctcaacgcccaggccttctccgccctgagcgcctcacccggcgcccgcgccttctacgaccagcagcgcgccaacgggcacacgcacaacgacgccctgcgacgcctcgccaaccgcctcgtcggcatcctgcacggctgcctcaaaacccgcacccgctacaacgaagacaccgcctgggcccaccgccaccagcaagccgcttgacacgctaagcccctgggatgt

SEQ ID NO: 1125 - DNA, 1206 bp, unidentified
  source 1..1206: mol_type = unassigned DNA; note = element_14f7b59
  misc_feature 1: note = core
  misc_feature 2..214: note = LE
  misc_feature 215..1180: note = CDS
  misc_feature 1181..1206: note = RE
  misc_feature 35..200: note = bridgeRNA
tcttaagtttgtaattcactaaatttaaatattaattagaaagaacaaaagagagcattaaggttactatacacggtgaagctttagacttcgacaacattgataatccgctctcttttactacttaaacttcgttcagttctgtgagacctagatctcgttttcaagttgttgaaatgtgagtagcatttgttctttccaaaattcagttcttatgactaaagatagaaaaatttatggtatcgacattagcaaatctgtatttgatatatacagtaaagcaaaaggtcacgttcaattaaaaaatgatgaatctggatttaaaaagcttttaacaagcttaccaaaagaagcattggtaattatggaagcaacaggctattatcattacagattagcacagtttttaaataaaaatggagtattagtttctgtagtaaatcctttatcagtaaaacgctttatccaaatgaaattagctaaagtaaagacagataaaagcgatgcaaaagcaatatgtgagtatggtacatttaataatgtacccttatataatgcattaagtgatgttcaggcagaatgcttacaactgtttagattactggatagttacgtaaaaaagagcaccgcaactaaaaataaaatacacggagaagatgttttaggcactccatcaaaaacagtttatcgttctttaaaaagaaacttaagtcatttaaaaaaagagataaaactcttagaagatagattgttagaattggtgaaacaagaccaacaacaccaattgactttattacaaagtataccaggaataggtatgaaaacagctttatttttaatagtagtaaccgatggatttaaaaagtttgaaagcgcatcacagctttgtagttatgtaggtattacacctacgattcgggaatcaggaagtagtgtgcgaggacggagtcgcataagtaaagtgggtaataaaaaacttagaaatttattgtttttagcagccttttcagcctataaatacaacaaatcttgtaaagcattatttgacagaatagtagccaaaggaaagagtaaaaaactagcgttaatagctgtagcaaataagctattaaaacaagcctttgctattgcaaaaagtgggttgccttacgatgaaaactttgtttcaaaattagcttaaaattgcttgttttttaactcagttct

SEQ ID NO: 1126 - DNA, 1404 bp, unidentified
  source 1..1404: mol_type = unassigned DNA; note = element_14f8b13
  misc_feature 1..2: note = core
  misc_feature 3..117: note = LE
  misc_feature 118..1149: note = CDS
  misc_feature 1150..1404: note = RE
  misc_feature 1160..1399: note = bridgeRNA
agatgccgtaatgggccggctgcctggcgctaggcggagaggtggctgtcccgcagagtgatggtgtgttgaacgaggtccgaatggttcggccccaagcatcatcgggggacagccgtggagcattatgccgggatcgacgtttcgctgaaagagagcagcgtgtgcgtggttgacgccaatgggaagattgtccgtgaggcgaaggtcgcgagcgagcccgaagcgctttgtgacctgattgccgagcttggtttttccgtgagccggatcgggatggaagcaggcccgctatcgcaatggctgcgggaagggcttgcggatgccggcttcgaggtggtgctgctcgagacgcggcatgtgaaggcggcgctgtcggcgatgacggtgaagacggatcggaaggatgcgcggggcatcgcgcagctgctgcgcatggggtggtatcgaccggtgcatgccaagtcagcggcctgtcaggaggtccgggccctgcttgtcggccgcaagctgctgcaggccaagctgctggatgtcgagctcagcatccgaggcatcctgagaggttttggtctcaaggtcggggaagtcagccgcgggcgcttcgaggcccgggttcgcgaactcgccgatgggcatgcgatgctcgagacagtgatcggcgccatgctgcaggcgagagccgcgttatggaacgagttcatccgcctgcatcgcgagatgctgaagatcgcgcgaacggaccacgtctgccggaggctgatgagtgcgcccggcgtcggagctcttgtcgcgatcacctatcgttcggcggtcgatgaccccgaacgcttcaccaggtcgaaaacggtcggcgcgtatttcggcctgacaccgaagaagtaccaatctggcgagaccgacatcgatggcgggatcagccgtgttggcgacgctatggtgcgaacggcgctgttcgaggcggcacatatcatgctcacgagagcgatgcggttctccgccctgaagcgctgggcattgggagtggccaagcggcgcggcatgaagcgggcaaaggtcgcgctcgcccgcaagctcgccgtggtgctgcaccggatgtgggttgacgcaacggaattccgctggagcaaagacgcctcggcggcataggagaaggaggttttcgagtagcggcccgaagaccggcgccgcttcttgcgaggtcccgtcgccgggacgcgggtcgggcaaggtcgagtgtagtgctgtgggcgcctcggcaaaccacgctttcctagattgacctgccggatccggatctgatggcatgatgtggcagtcctgcgtgctgaccacggacagaagcatgatcctggcgacgagatgatcactcgcgggacttgacaccgaaaggcccattacaga

SEQ ID NO: 1127 - DNA, 1397 bp, unidentified
  source 1..1397: mol_type = unassigned DNA; note = element_14f8d4c
  misc_feature 1: note = core
  misc_feature 2..89: note = LE
  misc_feature 90..1127: note = CDS
  misc_feature 1128..1397: note = RE
  misc_feature 1168..1392: note = bridgeRNA
taatgggatggacgcccccttcctaaaccggcaccttaagtgccaaagtggaaacgctagtcaaccactaaatgaagggagcgtccgaaatgaagattgcaacgattgggctggatttggcaaagaacgtaattcaggtgcacgggatcgatgagcgaggcaaggcggtgctaaaaaaacagttgaagcgcggtcaggtattggcgttctttgtcaaactggagccgtgtctgatcggcatggaagcgtgtgctagcgctcattactgggcaaggaaactgacggcgttcggacacacggtgaagctgatggcgccgcaattcgtgaaaccctatgtcaagaccaacaagaacgatgcggccgacgcagaggcgatctgcgaagcggtgcgccggccgaatatgcgcttcgtgccagtaaagaattccgagcaacaggcgatcctgtcgctgcaccgggcacggcaaggatttgtaaaggcacgaacggcccaggcaaatcagatccgcggcttgctgttggagttcggcatcgtgatcccgcaaggcatcgggcatatcgccacgcgcctgccggaaatactggaggatggggagaacgatttacctgggcggtttcgccagttactgcggcggctcggggagcacctgaaggatatggatcggcaggtagcggaactggagcgggagattaccttgtggcaccgagagaacgaagccagtcgcaagcttgcacaaatgccaggcatcgggccgatcacggcgagtgcgctgtccgcctcggtgggcgatgccaagtgcttcaagaatggtcgtcagatggccgcatggctcgggctggtgcccaggcatcaatcaacaggcggcaaaacgatgctgctcgggatcagcaaacgcggagacagctatctgcgcatgttgctcgtccacggagcgagatcaatgattcgccacgtggaaggcaagaccgaccagaccagcacctggatggcgcggctgcttgctcggcgcaacaagaacattactgccgtcgccattgcgaacaaaaacgcacggatcgcgtgggcgctgttggcacatgatcgtgagttccggactgattatgcgccggctggcgctgtagtctgatcgttcctttataacagaccggaggcataacgcaggaatctcaccgattgctcaagtaatcatgacgtgatggaaagacaggtcagaccgcggctggttaaaccttgctgtcagcaggagcttatagctcgcagcagtgattaggaaccagccggcaaatcccatcagggtcagcggtagtaaccgcgtgaaaaggccggatgtatgcatgcaatctttaccttctcgccgtcatcgaatgagtgcttggcaaaagggggcgtccatgta

SEQ ID NO: 1128 - DNA, 1423 bp, unidentified
  source 1..1423: mol_type = unassigned DNA; note = element_14fccc0
  misc_feature 1: note = core
  misc_feature 2..125: note = LE
  misc_feature 126..1145: note = CDS
  misc_feature 1146..1423: note = RE
  misc_feature 1184..1423: note = bridgeRNA
gaatgatatgaacggccccggccttcttgaaggcgtgcgtggggtggatcctcacgggccgacggcatcagagtgcccagattggaagatcatgagatcttcacaggcaacccggaggatccaaagtgaactatacgaccgtcggcgtggacatcgccaagaacgtgatgcagatgcattggatcgatcccgacaccggtgaggttgtcaacagatcgatcaagcgcacagcgtttctcgagcatttcgcgaaccgcacaccctgcctgatcgggatggaggcatgtggcggcgctcaacactgggctcgcgctctcactaaaatggggcaccaagtcaaactgatgcccgcaaagttcgtcaaggcattcaacatcggtaacaagaacgatcccgcagatgcgcgagcgatctggatggcagcgcagatgccgcgtaaatccgtagccgtcaaaactgagggccagcaagcggtcctcgccatgcatcgcatgcggcagcaactggtgaaattccgaacgatgcagataaacagcctgcgtggactcctaaccgaatatggcgaagtgatgggcaaggctcgcagcgcgctgaacaaggcaataccggatgttttggccaggttgtcggagcggctgccggctatgctgatcgatacgctccgcgaacagtggaaaggcctaaccaagctcgacgagcagatcgttgaaatcgaacgacggctgcagacttggatgaaggaagacaaggcatcccgggcgatagctcaaatacccagcgttggtctgttgagcgcgaccgcagttgtcgcaacgatgggtgatcccgggtcgttcaagtcgggccgtgagtttgccgcgtggctcggtctggtacccggacaaacaggaaccggcggaaaagttcagctgctgggtataagcaagcgtggcgacacctatttgagaacgttgctgatccatggtgcgcgtagcgttctatgcaataccaaacagcctggaatatggctcgagcagctgaagaagcggcggccactgaaggtcgcggcagtcgcactcgccaacaagatggcacgaatcatctgggccatacttgcgcacgatcgaccttacagcaaagatcacgtgagcattaagccggcttgaggcttcgttgtctttaacaaactctctgatacaggatagcccccgtcaaaagttgcgttggcaatcaagtgtaatgactgaacaggtaagaccgggactcgtgaaacctggaaattccaacgagcttcgagctcttccctggaatgaggcacgagtcagcggatttcatggggacccgcagcggcggtatgggctgcaacaaggtcgcatatagagctgcaacctatcctgctcgtcaaaacatgagaaaacctggcgcaaaaggggccgttcatata

SEQ ID NO: 1129 - DNA, 1191 bp, unidentified
  source 1..1191: mol_type = unassigned DNA; note = element_14fefed
  misc_feature 1..2: note = core
  misc_feature 3..219: note = LE
  misc_feature 220..1176: note = CDS
  misc_feature 1177..1191: note = RE
  misc_feature 28..198: note = bridgeRNA
cttgtatggtgtgggtgcgccttccactgtgggagggtgctggggtagggacgtcctcatccatcagccggtagcgcccggactgccagaacgagagcatcccaccccgcctcacagcgtcgataaggaatctagcggccaggaccgccgattgatcgcaaggtaacgcccgaggcgaggccaccccagcggactaaacgtatcgcagggagagccatcatgcaaatatctggctgctttattggggtcgatgtcgggaagttcgagttgcaggttgccgatcacgagggcgccattgtgtccgggagcttggccaatagtcgatcgagcatcgtcggttggctcaagcggttgccgacgggcagcgcaattgcgatggaggcgaccgggggttatcaggaattgttggcgcgcctggcccatgagcgggggtttgcggtgtatgtcttgaacccgacgcacgtgcatcactacgcgatctcgctgggcaaccgaggcaagacagatcgcctggacgccgaagtcattgctcagtacatcgcgcagcgccacaccaagttgcatcgctacgagccggtctcggcggaactgcagcaagtgcgctcgctgcagtcgctcagggcagcggtagtgcgggtcggtgcgtccttgaggctgtcctcgcagcgccatggctgcgccagcggccatcaggagaaggcgttggccagcttgcgcgcctgggccgatgcgctcgagcgcgagctgatcgccaaggtcaaggcgcatagtgagtgggccaagacgtacgggctgctgaccggcatctgtgggatcgggccgatcaatggcgcggccctgaccacgctgttcagccgcgtaccctttgccagcagcgatgcggcggtggcgttctgcgggctggatccgcgccccaaggagtcgggcaggaaagtcggtcggcggcgcctgagcaaacagggcgacaaggcggccaggacactgttgtacaacgcggcaagctcggccgctcgtacggctcacttcaaggactactacgccacgctcagggctcggggtttgccctcgacggctgcgctggtggtgatcgcgcgcaagctgttgcgtatcgcctacggtgtctggcgcaccggccaggccttcgatccggcgaagttgaacttcaaaaaaacttgacccacaccatagaat

SEQ ID NO: 1130 - DNA, 1389 bp, unidentified
  source 1..1389: mol_type = unassigned DNA; note = element_150d1f4
  misc_feature 1: note = core
  misc_feature 2..90: note = LE
  misc_feature 91..1128: note = CDS
  misc_feature 1129..1389: note = RE
  misc_feature 1158..1381: note = bridgeRNA
taatggaatggacgcccccgtccgaaacggcatcgatgtgccaaagtggtagtgcgtcgaagcacgaccatcatcggaggaggcgtcatcatgaacgttactacagtcggcattgaccttgccaagaatgtcttccaggtccacggcgtcaacgagcacggcaagccggtattgacgaagcaactgaagcgacaccagatggccaccttctttgcgaaccttccggcgtgcctcgtcggtatggaggcttgtgccagcgctcacttctgggcgcggaaactgcaagccttcgggcacacggtgcggcttatggctccccagttcgttaagccctacgtgaagacgaacaagaatgacgttgccgacgctgaagctatctgcgaggccgtagctcggccgaatatgcgattcgtgcctgtcaagaacatggatcaacaggtggttctggcattgcaccgtgcccgccagggctttgtgcgcgcgcgtactgctcaggctaaccagatccgcgggctgctaggggaattcggtctcgtgattcctcgtgggattacgagcattgcgccgcacgtgccgcagctcattgaagatgccagcaacgaactgccgggctcgtttcggctgttgatacagcgcctgaccgatcacctcaaggaactggaccggcaggtggaagagctcgagaagcagattaaagcctggcatcacatcaatgatgcgagccgcaggctggcagagattcccggcatcggcccgatcactgcaagcgctctggtcgcctcggtgggcgacggcaaatgcttcagcaacgctcggcaattggccgcctggctcggtctcgtgccgaggcagcattcgagcggtggcaagccgacgctgcagggaatcagtaagcgcggcgatacctatttgcgtaccttgatggtgcatggtgcgcgcgctgtcgtccgctacgttgccaacaagtacgatgcctcctcgagctggctccgtcgcctactgacgcgacgtcacacgaacgttgccgtggtggcggtggccaaccgaaacgctcgaattgcctgggcgctgctgacccaaggcagtacgttccgatcagattacgcgccgtccaaagccggcgcgtaatctgatcggtttaaaacaggttctccccaagaggttgctcgggcaaacgtgacgtgatggcaagataggtcagaccgggatcgggaaactctgccctgccacaggcgcttcgagcgcgaggtggtgattagagcccgatcagcagattccatcagggacagaggcgtcgtccgcctcacaaacagtccggatgtatggccgcaatctcatcccatctgtccatcgttcacgaaggcctggcaaaacgggggcgtccatgta

SEQ ID NO: 1131 - DNA, 1356 bp, unidentified
  source 1..1356: mol_type = unassigned DNA; note = element_1511a7c
  misc_feature 1..2: note = core
  misc_feature 3..72: note = LE
  misc_feature 73..1098: note = CDS
  misc_feature 1099..1356: note = RE
  misc_feature 1125..1343: note = bridgeRNA
tgatgccgtggacggctctccatcaccgcggagtcgatctaatctgctccggtcgaatggaggagaagtgccatggcgaacgtacatgtgatcggattggacatcgcgaagtcggtcttccagctgcatgggctggatgaagccggcacaaccattctgcagaagcggctgacgcgggcgcggttgctgccgttcttcgaaaagctgccgccctgtctggtcgggatcgaggcctgcgcgacgtcacattattgggctcgcgagatcgccaaatttggccatgaggtgcggctgatgcctgcccaatatgtgaagccctatgtgaagcgccagaagaacgacatggccgatgccgaggcgatcgcagaggcagtgactcgccccaccatgcgtttcgttgcgccgaaagcgcccgaggagcaaagcgcgatgatgctgcacaaggtgcgcctgatgctcaaccgtcagctggtgatgctcaccaatgccattcgtgcgcacatggcggagttcgggatcgtcgcaccggttgggcgccgtggcgtcgaccggctgctcgaggtcatcgacgatgcggccgatgcgcgtctccctgcagcagcgcgtcagtgtctgcagatgctcgttgcccaatggaagctggtgaagcagcagatcctcgagaatgatcgccaggtcctcggcctggcccgttcgacggagcttggtcgtcgtctcatggaagtacccggcatcgggccgctggtggcgtcagcactgatagcatgcgtgcccgacccgtcggtcttccggtgcggccgcaacatggcagcgtggatgggcttggtgccacggcaaaactcatccggcggcaaggagcggctggggtccatcaccaaggccggcaatcgctatctgcggcagatgctgttcgcaggcgccatggccgtgatccgacgcgcaatgcagagcacgcgccggacctggctcgtccgcctgatcgagcgccgcaagccaaaggttgctgctatcgcactggcgaacaagaacgcccggattgcatgggccatgatgatgcacggagaacgctatcgcgagccgatggccgtcgccgcatgagactgcgcggctgaaggctgcgctgcgaggttggaaagggcaaaggagctattgcacgaaagccggtcgacaccgccggatcagaccaccctactacgcccccgcaccccgagtgcgagcaattgatcagggatccggtccgcggaaggcattatggccagcggcaacgacagccgcatcaaaggccggacacatggccgcaccgaccaccaagtgcatccgctcgcaaacccttgccaacggagagccgtccacaca

SEQ ID NO: 1132 - DNA, 1647 bp, unidentified
  source 1..1647: mol_type = unassigned DNA; note = element_15198d1
  misc_feature 1: note = core
  misc_feature 2..267: note = LE
  misc_feature 268..1506: note = CDS
  misc_feature 1507..1647: note = RE
  misc_feature 13..287: note = bridgeRNA
cctgttactatatatttgccccggatatgtggtagccagctacgagccgggacaactcgttgcctaagctgttagaataggaaggtaatggtctgacccgttcctccaagggcattcacgcccgtagaaaagtcagtcagccatcctcctgttcgcagcgttcgatttgtgcaggtagagccggaatgttcgtgtcaccaaacagatagaatcggcaatgggtagaatggctttgtccattgcaaattcttttcaggagtgatgaacatgaacgcagcaggaattgatgtttccagcaggaagagcactgtcgctgtccttcgccccttcggtgaggtcgtgcggcttccctttgacgtgcgccacagcgcagaggatctggctgttctggcacaggagttgaaagccatcgagggtgagacacgtgtcgttatggaacataccgggcgttattatgaggggattgccaaggttctccacgaagccggactttttgtctcggcggtcaatcccttgctcatcaaggagtatggcaataattctctgcgcaaggtcaagaccgacaaggcggacgctgtgaaaattgcccgctatgctcttgacaactgggcggatttgcgggattatactcccatggacacgattcgatatgatctgaaaaccttaaaccgtcagtttcagttggcatccaagcagaaaaccgctaccgcaaacaatctgatcgccctccaggagcaatccttccccggcattcgcaagctctttgacagccctgtgcgcagcgatggcacgcaaaagtgggttgacttcacacacgacttctggcacgctgactgtgtccgtggcagcagtcagaacgccttcacggagcgttatcgcaagtggtgtaagcgcaatcgctaccagttcagcctggagaaagctgcccaggtgtacgctttggcgcggtctgccgttgtactggtacagaagacctccgtcacaaaaacacttgttcaggaggccgccaaccagcttacggctatctcccgcagcgtggaaacctaccgcacggagatgaacaagctggcctccctgctgccggagtacccggttgtcatgcagatgtacggcgttggggaatctctcgggccgcagcttatggcggagatcggcgatgtgcgccgtttccagcgcaaacagtccctcgttgctttcgcagggattgacccggcgcccaacgaatccggagactaccgttcacgcagcaacaagaccaccaagagaggctctccgtatctgcggaaaacgctgttcaacattatgaccattcacctgcagcgtgcgcccctggacgagccggtattccaattcctggataagaaacgtgctgagggaaaaccctactacgtctacatgacggcggcggggaacaagttcctgcgccgctattacgccaaggtcatggcctattttgccacgttggagaacctgccgcctgtggacatggaatccaccggattgtagcgcacagagtaaccaactgctatctgatctttcaggtcggcgcttttgcggcggcctttttgtgttgccctttcctctacctgctgcctacaaatttttctttcgtcaggctctttccgggcttgactttttatttgcagg

SEQ ID NO: 1133 - DNA, 1589 bp, unidentified
  source 1..1589: mol_type = unassigned DNA; note = element_151e696
  misc_feature 1..2: note = core
  misc_feature 3..477: note = LE
  misc_feature 478..1425: note = CDS
  misc_feature 1426..1589: note = RE
  misc_feature 3..230: note = bridgeRNA
ctcgtattatattgacatacccattctttaccttatctacaggtttgggtatgctgttaaagatgctgtggattggttttaacttcctaccgcatagacggttgattttaggctccaaccacagtctctttgtttaattgttaatcagttagataccgcatgacggtttatgtagaacgaggttacagcgtgcaaagagccctgtggatcttataacagcagcatcaaatactttttaaggaggatcatgtttatgatctatgctggtatcgatgttgccaaggacaagcacgactgctgtatccttgatgacgaaggcaggaaggtgtatcccatcttcaccatctcaaataacaaggtcggttttgatgagctgttctccagaatcgaagaagtgactactgacaaggcgaaaaaaaagtaggccttgaagctaccggccactattctaacaaccttctggcgtcactcgttgatatgggtttcccgacctatgttatcaacccgctacatacaaatctttacagaaaaggtctaagccttagaaagacgaaaacggataaagtcgatgcctctgcgattgctatgatgttgatgaccgacaggacgctcaagccctactcggagacatcataccacaatgaagagttgaaatcattaacacgctaccgcttcgacaaggttcatgaacgttctaaactcaaggcttcattagcccggcttgtaaacattctctttcctgagttggaagggcttgtcccttctctgcaccttaattccgtctatacgcttttggaagaacttccaggtgccacttatatcgcagactgtcatctgacccatctcaaaaagcttctagaggcttcctcaaagggtcgctatggccgtgataaagcgatcgagatcaggaataccgccattgattcaatcggcgctcctatggccgcaaaatcaatggaattggtacatacaatacgcctcgtccgcatgctgtccgaggagattgaagaaatcgaagagtccattaaatcaattatggacgaactgcattccccaataatgaccatccccggtatcagctatcgtatgggagctatgatcattgccgaagtaggcgactttaagtgctttgataatacagataggattcttgcatacgccggtttgtcaccgtctacatatcaatctggtcagctcgattcctcctactctcacatggagaagcgtggctccagatacctgcgctatgcactttttaacgccaccaagtttgtctgcaaatgggatgaatccttcggtatctaccttggaagaaagatatctgaagggaagcactataacgtagctatatcccatgctacaaagaagttgaccagaaccatctacagaatggagcttaccggagaagcatactcaccaagatagtacccctctagtccttttctgtttgagcatctgattggatgctctgtttgtcatgcaattttcaaggaactgattgccgggaataagtcccagccgctattcaaatcgcatttctgcgtttggatcaaaaatcttcattttctacttgacttctaatagttagt

SEQ ID NO: 1134 - DNA, 1571 bp, unidentified
  source 1..1571: mol_type = unassigned DNA; note = element_152a6ac
  misc_feature 1..4: note = core
  misc_feature 5..349: note = LE
  misc_feature 350..1561: note = CDS
  misc_feature 1562..1571: note = RE
ctcactggactaccctccaattcatgttggaggacaagccaagcagggttgtccacggtggcgggcgtcgcttgcgacgaacgaccgccgcggtggtcaacccgtgtttgacaagctgcctttggcaggaggatcgttcgaattgacttccgtgcccttgcagtgactgcccgcggcgctcgccgtacgacggcccggatgagacccgcagcctgcaaggtgccggaagaccctgacgggctacagggtgttgcgccgcactgacctcagggtgtgagcgccgatcagtgagcgtcccgcgtgggcttccggcacggccagtcataccgcaacttgcaggagtctgtctatgaaatccatcttcgccgggctggattgggccagccgaacccacgccgtgtgcgtcatcgacgagtgcggcaccgtttgcaaacagtgggtggtcgcgcacgatgccgatggcctgcgtgaactcttgcgccagttgcgcgccttgcgcgctgcgcgcatcgccatcgagcgcccctccggcctgctggtcgacgccttggtggaggccggcttcgaagtcgtgcccatccaccccaacgccgtcaaggccagccgcccgcgctaccgaagccacggcggcaagtccgacgcctctgacgcctacttgctggccgacctgctgcgcaccgacggccaccgcttcaaacctctggccgcgcaatccgatgagatccgcgccctgcgtgccctggtgcgcggtcgtgacgatctggtcgccacccgcgtgcagctggccaaccaactgcgcgccctgctggagtcgtactgggccggtgccgccgaggtcttcgccgatgtggactcgcccatcgccctggccttcatccagcgctaccccacgccagaggcggccagccgactcggccccaagcgcatggccgccttctgcgcgcagcacgcctactgcggccggcgcagcgctgaagaattgctccagcggctcaggcatgccccggccgttggcttgggcgagctggagatggacgccaaaggtgaactcgtcagcggcctggcgcgcaccctgagcacactggtcgatcaaatccggctgctctccagccgcatcgagcaccatgtggcggcctgcgacgatggccgcatcctcatgagcttcccgcgcgccgggcgcatctgtgccgcacagattctggccgaactgggcagcgtgcgtgagcgcttcgactccgacgaacacctggccgccgaggccggcgtcgcaccggttacctacgcttccggcaagcacaaggccgtgaccttccgctgggcctgcaatcaccggctgcgccgtgccctgaccaccttggccgacaactcccgccatgccagcgcatgggccgccgacgtctatgcgaaggcgcgtggcagaggttgcgatcatcctcatgccatccgcatcctcagccgcgcctggttgcgcgtcatctggcgcgcctggaccgaccgaaaaccctatgacccaaccgcccacggcgggcttcaaaccatgctcaaaacggcggggggttgacacagggtgt

SEQ ID NO: 1135 - DNA, 1417 bp, unidentified
  source 1..1417: mol_type = unassigned DNA; note = element_152b0eb
  misc_feature 1: note = core
  misc_feature 2..221: note = LE
  misc_feature 222..1301: note = CDS
  misc_feature 1302..1417: note = RE
  misc_feature 14..233: note = bridgeRNA
ctgatggatgctcgggcgggcgttgagctgcggctcatagcgtcctcgggctccggtcggctggctctcgaactgcctgctgctcgcgtgtcgggttagctcccgaacgaagcgtcagccgcccggggtgcggtcacggcgtggctcgaaagaggcgagcagcaacccttcatcaggagtgcccgtcgtgacgctcacacgcgtatacgaggaaaaacttcatgacggtgatcatcggcgtcgacccgcacaaggggacccccatggcagtcgcagtcggcggcgacgaacaaccgctggcccgactcgaggttgtcgccgaccgcggccaggctcagcggttgttggcgtgggcggcgccgttcgaggatcgcaggtgggcgatcgagtccgccgacgcgctcggcaagctgctcgcgcagcagctgctcgctgcgagcgaggacgtggtggacgttccgccgacgctgtcagcgagggtgcggctactcggctcggcgaaggctgccaagaacgacagcaacgacgcgctgtcaacggcgatcgctggcctgcgccactgcggtctgcggtcggttcgggtcgaggatcacgttgcggtgatccgaatgctggtggaccgctacgacgatctcaccgcgctgcgcacccaggccgcctgccgtcttcatgtcgctctgcgcgaactcgtcgctggtggcgctcccaagcggctctcggctgatcgggccggccgcatgctccgctcggttcggccccatggggtcgctgcgatcgaacggaagcgtctcgccggcgagctgctcgccgatgtgcggcggctggaccgcgacctcgccacagcacgagcacgggtcacggacgccgtcgccacgtcgggtacctccctgctcgagctgcacggtgtcgggcccatcgtcgcggggttcgtgctcggccatgtcggcgacccggctcggttcccgacaccggagcggttcgcctccgacaacggcaccgcccccatcgaggcatcgagcggcccggtcaagcggcaccggctcaacccgcgtggcaaccggaagctgaaccatgccatccacatggcctcggtcacccagatccgtcacgacacgccgggccgcgcctactacgagcgcaagctcaccgaggggaagtcgaaaaaggaagccctccgagcgctgaagcgccgcatcagcgacgccatctggcgtcagctccaagtcgacctcggccgacgccgagacaacgggcccgggagggcaaccagggacgactctgaatccagcgtggccggctgaaccctgaacaccggcacttcggagaagccactcccggacccacccagcacgctacgcccaccatcgcgggctgcttcaacgcgcccagcaacgcgtccttgacaacaaagaggctt

SEQ ID NO: 1136 - DNA, 1578 bp, unidentified
  source 1..1578: mol_type = unassigned DNA; note = element_1532e66
  misc_feature 1..2: note = core
  misc_feature 3..282: note = LE
  misc_feature 283..1461: note = CDS
  misc_feature 1462..1578: note = RE
  misc_feature 17..243: note = bridgeRNA
cttgtatattgaactcatagggaagttctcaacattttcctttcttagaatttctctatataattctgtgtagacgctgtggattagtttgacctcctacagcagcaccctattgctgactgttcttttgataggctctaaccacagctctatgtccaggtgttaatgagttagataacgcatgacgttttatatacagcaaggatacattcggcatagagtactgcggatacacagcgttaaaagttatttccatttccatatcaccaaaggaggttctctatgctctatatcggtatcgacgttgccaaatccaaacacgattgcttcatcattgattctgatggtgttgtctatacggacaatctcaggatcaccaatgatcggatcggttttaacaagcttctcgaaacgatccttaatgcccttgacggtgagcctgccacaaatgcaaaagtaggactcgaacacaccgggcattacagcatcaacatcaaacggtttcttgaatcccagggctttgtcgttacctgcttcaaccccctggaaacgagcgccttccgcaaagcatccactcttcgtagaacgaagaccgataaatgtgatgcgaagatcatcgctacgatgctcttctccgatgaatcgattcctacttcctctccatcatatcagattcgggagctgaagtcactcactagacatcgtttcagacttattggctatcgcggaaagttgaaggtttcttttgccagaatcattgatgttgtcttccccgagtttccgggctttgtctggtctgtcaatcagaaatcatctcatcaattgctcctggagctccctacaccggatactattgccgcatgtcacctgacacgccttaccaacctgatccgtaaaagttcacatggcaggtatggtcgtgagaaagccgtcgctctacgtgatcttgcagcttcgtccattggtctttctgatgaagctcttgcttttgagttgcagcagaccatccgcatgatacagaatgtgcagacagaaatcgatgctctcgacaggaaaatcaaatctattgtccgggagcttcatactcctctgcttacaatccccggtatcagctacacacttgctgccatcattctggcagagataggagatatcaataacttctccaatccttcaaagctacaggcatttgcagggcttgatccatcaacttatcaatcgggcaaatacactgcctcttacgctgctatggtcaaacgcggttctacatacctcagatgggctatgtttcaggctgcccgcctcgtagcgatgagagacaaaacctttgcggattacctggcgaagaagcgttccgaaggcaagcacttcaatgttgccataagtcatgtcagcaagaagctcctgagaacgattttttatatgctgaaacataacgaggctttcgttccgcagagttgattctgacacgctgtattttcaaggcaagcttcgcttgtctgttttgtcatgtcattattcaattctcaaagttcaatgcaattttttttgaaaatcacttgacttcacatagttagt

SEQ ID NO: 1137 - DNA, 1444 bp, unidentified
  source 1..1444: mol_type = unassigned DNA; note = element_153cff7
  misc_feature 1: note = core
  misc_feature 2..230: note = LE
  misc_feature 231..1289: note = CDS
  misc_feature 1290..1444: note = RE
  misc_feature 13..239: note = bridgeRNA
ctacttagagactggttgcaggatcggtgtccggccagactcggtccaggtgctcggcgagacgctctcatatgcggctgcccaccggcgtcattggtgtggctctctcatggcatgcgctctcgtcgggcaccgcgcgaggagaggctctaaaggggtttgttctgctcaaagtagcgatgccctccccgcttccacaccacggagcgaaatgaggaggtgcacgggcgatgggcgtgatcatcgggatggacccgcacaagcgctcggccacgatcgaggtcatcgaccagaccgggcgagtactcgaggtggggcggttcgacacgaacgaggccggctacgcggcgatgctcgccgcgggccgggcctacgggtcgagcggtgagcgggtgtgggcggtcgagggctgcaacggcattggccggcacatcgcccaccgcctcgtccatgacggggaacgggtggtggacgtgccgacgaagctgtcggcgcaggtacgggtcttcgccaccggtaacgcccgcaagaccgacccggtcgatgcccactccgtggccctcgccgcgttgtatgcgccggccgagcccgggctgcggccggtgctggtcgaggatgacctggtcgtgatgggcatgatggtcgaccgccgcgacgagctcggtcgggcccggacccagacggtcaaccggctgcatcggcttctgctggaactgattccgggtggcgcgaagacgttcttgtccgcgccgcaggcccgagcgttggtcgccaaggtgaagccgcgcgacctcgtcgggaagacccgtcgccgtctcgtcgtcgaactgatcggggagctcgaggtgatcgaccgcaagatcaagaccgccgagaaagagctgaccgcgctcgtgcaggagcgcggctcgaccctgctggagctgaccgggatcggcccgaccggcgccgcgcggctgctggccggcgtcggggacatccaccgcttccgggacaaggaccggttcgcctcgtggaacggcaccgcgcccttggatgcgtcctccggggcgcagcaacgccaccggctgtcccgtgccgggaaccgccggatcaatcggacgctgcacatcatggccgtcgtgcagctgcgtaacccgagcccggggcgtgagttctacgacgcccgcaaggccggcgggacaccgtcgctgatggcgatgcggtccctgaagcggcgcctgccgaatgtcgtgtacgcggatggtcgccgaccagacccgccgcgaccttgccctccgcgcgcgtgaggtgacgggcccgggagggcaccggggcaacgtctctgactccagcgtgaccggctcacaaccccacaccggctcttcggagaagcctcttcccggacccgtcaccacccagcgtagaaccccggccctcgccacgtcttgacctaaaggggtgc

SEQ ID NO: 1138 - DNA, 1542 bp, unidentified
  source 1..1542: mol_type = unassigned DNA; note = element_153e511
  misc_feature 1..2: note = core
  misc_feature 3..243: note = LE
  misc_feature 244..1422: note = CDS
  misc_feature 1423..1542: note = RE
  misc_feature 3..220: note = bridgeRNA
cttgtattatagagtagtagttattagagcccctctccaagggctgtgtgctacactgtaagggatgctgtggattggtgcaaatctcctaccacaagatggttcaagaaaggttccaaccacagccccttacaattttgttgatcagttaaataccgccagacggtttatgtggaacaaggctacaaaagtaaggtgtactgtggatgcagcatcacatatttaccgctggagggatttgttatggtgatttctgttggtattgatgtctcaaaagacaagcacgattgcttcatcgtcagctctgagggggaagtcctggcggatgtgttcacgattcccaacaacatggatgggtttcaccgtctgttgcagagaatccaggactgcaccaactctcaggacaaaataaaagtagggcttgaggcgaccggacattacagctacaaccttctcgggtttctctttgacaacggtctgaccacctatgtcctgaaccccttgcgcacaaacctctaccgaaagagcctcagtctgagaaaaaccaaaactgaccgggtggatgcgcgaaccattgcttctatgctgttatccgatgcgggcctcaaaccctacacaagtacagcataccacaatgaggagctaaagtcactgaccagataccgttttgacaaggtaaaagaacgggcgaaactgaaaagttctatttctcgattggtctgtatcctgtttcccgaactggaaaaactggtccccacacttcacatgacctctgtttactccctgttagaggagttccccggcgcaaagcaggttgccgcagcccatttgacaaggctgaaaacactgctcgaaaccgcctccaaaggccactacaagcgggatatggctcttgaaatacgagatgctgccagaaattccattggctctcggatgcctgccaagtcccttgaattgcagcacaccatccgcctcacccgggaactggatcgtgaaattgatgaaatcgaagaacaaatccaatccattatgggtgagcttcattcgcctattaccactatcccagggctggggttccgcatggccgccatgatcctggctgaggtcggcgactttacccgctttgactccccagacaagctgttggcttatgccgggatgtccccctcaacttaccagtccggacagctcaaaaattgctatccgcacatggaaaagcgtggctcccgatacttacgctacgcactttacaacgcaaccaagtatgtctgctactgggacccggcttttgctgattatcttgccaagaagcgggcggagggaaaacactacaatattgccatctctcatgctgccaagaagttagttcgtctgatatttgccatggagaaatccatgcagccatattgctcagcatcttaactgcaaccacttgaatagccagcaggggtctgacaagacctcagctttgctataccttttttgaaccatctctttttcaccaccaccattcattttcggggttgatttttaatagttaat

SEQ ID NO: 1139 - DNA, 1442 bp, unidentified
  source 1..1442: mol_type = unassigned DNA; note = element_15435e5
  misc_feature 1: note = core
  misc_feature 2..143: note = LE
  misc_feature 144..1166: note = CDS
  misc_feature 1167..1442: note = RE
  misc_feature 1212..1440: note = bridgeRNA
atggaatggtcgcctcccccgaaggggtgatgctgaagccggggaggaaaagatggggaagaaggggttcctgcatcccgacggcatcagatgtgccaaagtggaagatgcgaatcaaaaccacttgagggaggggaacccaaatgaagcataccgtagtcggcgtcgacattgcaaagaacgtattccagttgcattgggtggagctggaaactggggaaatcgtcagcaagcagatcaagcgttcgggattcctggagcatttcgcgaaccgcacgtcctgtttgattgggatggaagcgtgcggtggtgcccagcactgggccaggcggctgacggccatggggcatcaggtgaagctcttgccgggcaaggcggtcaaggcatttgtgactggcaacaagaacgacgcctgcgatgcgcgggcaatctggacggcggttcagcaacccggcgttcgggccgttgccgtgaagacggaagagcagcaggcggtgctggccctacaccggatgcggcagcaactggtgaagtttctcaccatgcaaagcaatggattgcgcggcctgctgatggaatacggcgaagtcatggcagtaggccgaaccggactcactcgtgcgatgccggaagcgttggccaggctgagcgaacgatttccggcgatgctgatcgacacgttgcggcaacagtgggagatgctgggcaagttggaggagcagattgcgcagatcgagcaacggctgcaggcgtggatgaaacaggacaaggcatgcaaggcgatagccgccattcccggtgtgggcctgctgacggcaacggctgcggtggcaacgatgggtgatgctcgggcattctggtgcgggcgcgagtttgcagcgtggctgggactggtaccgcggcaaacgggtacgggcggacgagtgaagctgctggggatcagtaagcgcggagacacctacctgcgcacgttgctcatccatggagcgcgctcggtgctcacgcgcgcaaaggaatgcgatgcgtggatcgaacagcttggcaagcgccggccgccgaacgtggtgacggtggccttggccaacaagatggcgcgcacgatctgggcgttgatcgcccatgaccggcagttcgaaaaggcgcatatcagcagcaggccggcatagaaggcggtcaacgtaacgcaaccggtttttatttaacgaaaggaatggcgccaacagagttgcgcaaggtgtgggtgtgatggcaaacaggtcagaccggtactcaccaagcctgaataacacgcagggcttatagcccgcgctagaaatgaggcgtgagtcagcggattccatcgaggtccgcagcgggtaaccgctgcaacaaggccggatataaagctgcagcctatcctgtccagcacacaccaatcttgcaaaactggaggcgaccatata

SEQ ID NO: 1140 - DNA, 1383 bp, unidentified
  source 1..1383: mol_type = unassigned DNA; note = element_154c2a1
  misc_feature 1: note = core
  misc_feature 2..80: note = LE
  misc_feature 81..1121: note = CDS
  misc_feature 1122..1383: note = RE
  misc_feature 1124..1371: note = bridgeRNA
atgttggggtggacggcccccgcacggcatcgatgtgccagattgaggtcgttttgaacttcaatcgaagggagccgtccgtggagaagattacgcgcattttcatcgatacgtcgaagcagattttccagctgcatggtgtgaacgccgccgaggtggtggtgcttcgcaaggcggttcgccgcagccagatgttggcggtgttcggcaagcttgagccgtgcgtggtggggctggaggcctgtggagcgtcgcaccattgggcgcgggttcttagggagctgggccacgaggtgaagctgatcgcgccgcagcacgtgaagccctacgtcaaacgcaacaagaacgacgggcgcgacgccgagggcggctgcgaggcgatgagccggccgaccatggagttcgtgccggtgaagaccgcccaggagcaggcgggcctgatgctgctgggggtgcgtgagcgcctggtgcgcacccgcacccagctgaccaacgccatccgtggccacgccgccgaactggggctgatcgcgccccgggggttggacaagatcgaacccctgctggcgcgcatcgccgacgatgagagcctgccggccctggcgcgggcgctgtttgcgctgcaggccgcagagcacgccgagcttgtggcgcggctgaagatcgtcgaggccgagctggtcgcctggcatcggcagaacgccctgagccgcaggttggcgcagatcccctcggtcggtccggtcggggccgcgatgctggcgctgaagacccccgatcccaaggccttcaagtccgcccgccacttcgcggcctggatcgggctgacgccgaaggatcactccaccgcgggcaagttgcggttgggtcggatcacccgggccggcgacgaggccttgcgaagcaccttggtggtcggcgccaccgccgtcatccagcaggcacgggccgggcggggcaggccctcgccatggctggtggcgctgctcaagcgcaagccgcccaagctggccgccgtggcgctggccaacaaggtcgcgcgcatcgcctggagaatgatggccaccggccaggattacgatcccagtcgtctgacgcgccccctggccgaggccgtctagacccagatcacccagccaacctggtctggatgaggccggaccttgcacgatgagcagcagatggtgcgatcgatcgatccagggcgccggacactccgagggatccattgggggctcgaccccgctgggatgtctggaacccgcgccgcggaaaccatcttggccagcggtcaaccacgacccgaaaacaggccggacatatggaagcaagcgatccgatcagacctccgccctcaccttgcaagcagggggccgtccacat

SEQ ID NO: 1141 - DNA, 1204 bp, unidentified
  source 1..1204: mol_type = unassigned DNA; note = element_156daba
  misc_feature 1..2: note = core
  misc_feature 3..238: note = LE
  misc_feature 239..1189: note = CDS
  misc_feature 1190..1204: note = RE
  misc_feature 6..225: note = bridgeRNA
cttgtatgttcagactagaccggcgcggtagagtctgactgccgctgaggcagccagaccggaccgtgcagcctggtagggccttgggccggcgagcatgctcgcaagcccgtctctgagtagattgcgcacggaccccgtgctggtctttctgatgcccgaacggttagtcgagcggctgcgtgccagctcgcatgtacaagcaagggatacgaagaccatgtctggatcatccgtgatggtaggcatcgacgtggccagcaaacacgtcgaagtggccgcagtcggcgccgagctttcggctgccctgcggcaggttcccaatgacgccgatggccatagtgcgctagccgaggccctggcgcggctgaagccggaactggtgctgatggaggccaccggcggctacgaggcggcgctggcgtgcgcgctccaggccgcagggcttcgcgtggccgtggtcaacccgcgcatgacgcaccacttcgcccaggcgatgcagaagttggccaagaccgaccggatcgacgcggcgatgctggccgagttcgccggcgtgctggcgcgtcggcccgactgcgaacggttcatccgcccgctcagcgagcccgagcaacaggacctcgctgcgctggtgacccggcgccgtcagctggtcgccatgcagctctccgagcgccagcggctgcgcctggcacgagccgtgacccgacccagcatcgaggcgctgctcgaggccatcgcccgccagctcgacgacgtcgaggccgagatggccgcccacgtcgagcagcatcacgcccaaatggccaagctcctgcagggcatcgctggcatcggcaaggtcgccactgccaccctgatcgccgaactgcccgagctcggccggctcaatcgccgccagatctgcgcgctggtgggcgtggccccctacgccaaggactccggcgccagcaaaggccgaagacgcatctccggcggacgcttcgagctgcgacgggcgctgtacatggccacgctcgccgcgacccgacacaacgaggtcatccgcgctttctacgaacgcctggtggccgccggcaagctcaagaaggtcgcgctcatcgcctgcatgcgcaagctcgtcacgcacctcaatgcgctcgtccgcggctacttgaacactcagcatcaggtttctatcgcttgacggcgaacacggtta

SEQ ID NO: 1142 - DNA, 1530 bp, unidentified
  source 1..1530: mol_type = unassigned DNA; note = element_1570bf4
  misc_feature 1..2: note = core
  misc_feature 3..240: note = LE
  misc_feature 241..1416: note = CDS
  misc_feature 1417..1530: note = RE
  misc_feature 3..218: note = bridgeRNA
cttgtattatagagtagtagttattagagcccctctccaagggctgtgctacactgtaagggatgctgtggattggtgatcaactcctaccacaagatggttcaagaaaggttccaaccacagccccttacacttttgttaatcagttaaataccgccagagggtttatgtggaacaaggctacaaaagtaaggcgctctgtggatgcagcatcacaaatttaccgttggaggttttgctatggtttctgttggaattgatgtctcgaaggacaagcacgactgcttcattgtcaactcggaaggtgaagtcctggcggatgtgttcaccatctccaatacgatggatggcttcaacagcctgctggaaaaaatccagaactgcaccacgccccaggacaacataaaagtaggacttgaggcgaccgggcattacagctacaacatccttgggtttcttcttgacaacggcctggccacctatgtcctgaaccctctgcgcaccaatctgtaccggaaaagcctcagtctcagaaagacaaagaccgaccgtgtggatgcacgaacgattgcagctatgcttttgtccgatgtgggcctcaagccctacacggatacagcataccacaacgaggagctaaagtcactcacaagatatcgtttcgacaaggtgaaagaacgagccaagctgaaaagctctttttccaggctggtctgcatcttgttccctgaactggaaaagctggtgccgaccttacatatggcttctgtttatgccttgctggctgagtttcctggtgccaagcagattgccggtgcacatcttacgaggctgaaatcccttttgaccgacgcttccagaggccgctacggacgggatatggctgtggagatccgcgatgctgccagaaattctatcggctctgtgatgccggcaaagtcattggaactgaaacataccatccatctcatccgggaattggacgctgagatcgatgaaattgaagcggccatccaatccattatggatgagataaattctccaatcaccaccattccgggtattggttaccgcatgggagccatgatccttgccgaggttggggatttttcacgctttggatcttccgacaagctgcttgcctatgccggactctcgccctcgacctaccaatccggacagctcaagaattgctatccgcacatggaaaaacgaggctctcgatacctgcgctatgccatttacaacgccaccaagtatgtctgtctgtggaaccccacctttgccgcctaccttgccaagaaacgggcagaaggaaagcattacaatgttgcgatctcccacgtagccaagaagctggtgcgcctcattttcgctctggagaagtctgggcaaccgtaccgcctaactgcctaacttactcttgtttacatccggggtccgaacggacctctgctttgctatgccctttttcagccatctgggtttgacctccaccattcattttggggttgacttttaatagttaat

SEQ ID NO: 1143 - DNA, 1155 bp, unidentified
  source 1..1155: mol_type = unassigned DNA; note = element_157bf85
  misc_feature 1..2: note = core
  misc_feature 3..183: note = LE
  misc_feature 184..1140: note = CDS
  misc_feature 1141..1155: note = RE
  misc_feature 32..198: note = bridgeRNA
cttgtatctttaatctggtttatgctggttaagtgagattggcaacaatcatgcagtcagacaaccatcaagggattaagcccgttaatgagctttcgacgcatgattgttgcttttcttcgagaaacccgaacagttgcttgaaactaaattcgcattggcaagaatgggagccgaagaaccatgactgaaacgatttgtgtcggtattgatgttgccaaagcttcactcgaaattgcgcttagtacacagggaattgtcatgacattcccaaatacccctgaaggccatgatcaactagcatctattttggctaactatgagattgatttagttgtattagaagcaaccgggggttatgagatgcccgttgcttgtgttttgcaggccagagggctagctgttgctatcgtcaatccccgacaagcccgtgattttgctaaggcaatgggatatctagccaaaaccgataaaatagatgctcaaatgctggcacagttagccctggttttatctcaacaaacagatcgggataaaataatcagagtgttgccctctgctcagcaacaagtgctgcaagccatgatcacacgtcggcgccaattagtcacactttccgtctcggagcgccaaagattaggaagctgccatccagaaattcgagaaagcatcactttaatgatcagctttatacaagaacaacttaaggtcattaaatcggcgttatctaaccacatcaaggcctattatcgtcccaaactcgatttattatcgacagtaaaaggcgttggtcctgccacaatagccactttgatcgccgatgtcccagagttgggtcaattaacccgccgtgaaattagtgcattggttggcgttgcaccgtttaatcgggattctgggttcttccggggaaaacgaacaatctttggaggaagagcaatggtgcgtcgaatgctttatatggctacgttaacagccattagatttaaccccgttctctgcgctttctacaagagattaaccgaagcaggcaagccaaataaagtcgccatcgttgcttgtatgcgtaagttactggtcattctcaatgcaatgataaaaacaaataaaccgtgggatgaatctttccacacggtttaaagcgaaagacagttg

SEQ ID NO: 1144 - DNA, 1455 bp, unidentified
  source 1..1455: mol_type = unassigned DNA; note = element_1589681
  misc_feature 1..2: note = core
  misc_feature 3..219: note = LE
  misc_feature 220..1434: note = CDS
  misc_feature 1435..1455: note = RE
  misc_feature 7..219: note = bridgeRNA
ctaatgggcgcggatcggtttcgtgtttgcgaggctggtctggagccgctggcaggtgagcactatcggacgctgggccgttgagccctatcgctagagcgtgccccggctggtggttggtggtctgaacggctggtgggatgacgtgccagtgcgagcactacgccattagcgggccgcgggtcgccacgggctcatgggctgtcgagaggaggcgggatgcgagtattcgtgggtcatgactgggctgaggcgcatcatgacgtgttcatcgaagatgagagcgggaaccggctggcagcagcccgggtttcggaggggatcgagggtgtggcccggttccatgccctggttgccgatcacatcgaggatccctcggaggtgacggtggcgaccgagaccgatcggggcctgttcgtcggggccctggtggctgcggggtatcgggtgttggcggtgaacccgatgtcagtggcccgctaccgggaacggcatgtgacctcgggagcgaagtcggatgctggggatgcgtggatgctggccgagctggcacgggtcgatgggcatcatcatcagccgatccgtggtgacaccgacctggcggatgcggtcaaagcactagctcgggcgcatcagatgatgatctggtcccggcaacgccacaccctccagctgcgctcgacgctgcgggagttctacccggcggctcttgaggccttcgatgatctcgcctcaggtgatgcgctggccgttctgagtatcgccccgacctcgaagatgggcaggcgactgtcgtcacagcggatcgtgtcagcgttgcgtcggggcggccggcagcgccgtatcgacgaacgggccgccgagatcagagcggcactgcgtgtcgaacacctcactgctccggatgtggtcgccgacgcgatgggcgccaccgtcacggcgcttgtcggcgtgatccgagagatggtcacccagatccgtcgtctcgaagcagaactggccgaccgttttgaacaacacccggacgccaagatcatccgctccttgccaggactcgggacgatcctgggcgcccgggtgctcgccgagttcggagacgacccgaaccggttcgatagcgccaagtctcgcaaaaactacgccgccacgtcacccatcaccagagcctcaggcaaacaccacatcgtgttggccagatacgcccgcaaccggcgtctcgctaacacctgccaccaatgggcattcaccgccatcagtgccagccccggagcccgagcgttctacgaccaccgacgacgttcaggcgacacccacaaccaggcgctgcgggtcctcgccaaccgcctcgtcgggatcctccacggctgcctccgccaccaaaccccctacgacgaacacaccgcctgggcccaccgcaacgacaaagccgcttgacaacttccacccgtgggatgt

SEQ ID NO: 1145 - DNA, 1752 bp, unidentified
  source 1..1752: mol_type = unassigned DNA; note = element_1592ec7
  misc_feature 1: note = core
  misc_feature 2..108: note = LE
  misc_feature 109..1386: note = CDS
  misc_feature 1387..1752: note = RE
  misc_feature 1420..1681: note = bridgeRNA
aaggagcattcctgttagaaatttttagggtacttgaaatataaaaagccctcttggtatgatgctggggtgtcaaatatccctacttcataaccaaggaggctctatatggattgtattcagaattccaaaattaatcaagttaccgaaacgactcttgtgatcggaatggatattgcgaaacgaacacattacgcgagtttcattgatgtacgagggcgtgtgttacagaaagcatttccggtctcacaatcaaaagaaggctttgaagccttttatcaaaatactttagaagccatgaaagaatatcagaaaacagatgtaattgtggggattgaacctaccgggcattattggctgaatctcgcttacttccttacggaacgagggattccattggttatggtaaatccgatgcatgtgaagcgttccaaagagttagatgataacttacagacgaaacatgatgcaaaagatgcgcttgtaattgcccgccttgtaaaagatggccgattcagttatccacgtattttagctggtgtagaagcagagcttcgtgtaggtgctaccttacggaatcaactggtcgaagaacagagtgcgatacgaaacaagctcattcgctggttagatcgctatttccctgaatttacacaagtgtttcctgactttgggaaaacagccatggcagcgttagaatgtacaccgtttccatgtgatgtcatcgcaaagaagatagaggaactcttgaatcattatcggcaagttgaaggtatcaaggctccacagaagtcaaaaattatgaaattggcacaggtagcctatcattctattggtgtaacagaaggacaagagatggcccgcatagagattgccacattagtccgccgttatcgccaaatcgagcacgaaatacaagagctcacaaaccaattgacagatttggcgaaaacttctgttgagtatgaatggttatcaactgttcctggtcttggggatagaaccattgtagaattgctatctgaaatcggaagtttttcgtattatcagcacccacgacaattaattaaacttgcggggttaacgttgcgtgagcattcttccggtcaacataagggacaaaaacgcatttccaaacggggacggaggcacttacgtgcgcttctctttcgcgttatgatgccgatggtccgttgtaacgaagcatttcgtcagttacatgtttattacacgacaagagccaagaatccgttacgtaaaaagcaatccatggtgattttgtgtggaaaattactgaagattttatatgcacttggtacaaagaaagtggcatttgatgcacagcgtatgttgaaagatatcccaagcctcgaaggggtagtataacgcctatcttctgtttcatttactagacaataggatgacacggagaagctgacattatattttccataagacttcgagtccctaagggagcttcgtcagcctctgccttatgactagaccgaacgaaggaatgtaggcacaagatgcccagagatatgggagggtacgtcatcataagttttgcagggatccacagtgcatcacatacggttaaattccaccaattttatccagtggaaacagcgtagcgtacccaagctctgtaagtgtttcacatatatataaattattgttaatctagtgtgtcgaaaaaaaattttgacaccccaatagcggttataaccgttgatatataagcatttatag

SEQ ID NO: 1146 - DNA, 1332 bp, unidentified
  source 1..1332: mol_type = unassigned DNA; note = element_1593422
  misc_feature 1..2: note = core
  misc_feature 3..76: note = LE
  misc_feature 77..1093: note = CDS
  misc_feature 1094..1332: note = RE
  misc_feature 1066..1318: note = bridgeRNA
tgttggggtggacggccccacggcatcggatgtgccaagaaagggtcgtgaaccaacccaaggagagggccgcccgatggcatacaagcggatttcgatcgacacgtccaagcatgtcttcacgatccacggggtcgatgaggtggaacggccggtgctgcgtcgtgatctccggcggtcgcaggtcgaggcgttcttcgccaagctggagccgaccgaagtggcgttggaagcctgcgccggcgcgcatcactggggccgccggctcggtgccatgggccatcgggtgaagctgatcccgccgcagtatgtgaaacctttcgtcaagcgcaacaagaacgaccgcaatgatgccgaggcgatcggcgaagcggcgtcgcggccgagcatgccgacggtgccggtgaagagcctcgacgaacaggcggcgactatcatcgtgaagcaccgggagttgctggtcgggcaacggactgcggcgatcaacgcgctacgtggccatgcggccgaattcggcgtgatcgcggccaaaggcacggccaatatcgaggcgctgctggcggtcctggccgaggcgcccgagatccccgcaactgccaaggtggccttcgcggcgatgggcgagcatatcgccgatctcgatgccaagctcgcggtgatggacaaacagctcctcgagcagcacaagagcaacccggtcagccagctcctggtgacgattcccggcatcggcccgatcacggcgatcaccctggcactgtcggtaaacccggcgaacttcgagagcggacgccacttcgccgcctggctcggcgtgacgccgcgggagaattccaccggcggcaagcatcgattgggcaagatcagcaaggccggcaacgaaagattgcgaacactcctggtggtcggcgcgacctcggtaatccgggtcgccaaaccggggcggtcgtcgagctcggcctggctgctgggattgctggcgcgcaagccaaagaaactcgcggcggtcgcgctagccaacaagatggcccggatcatctgggccatgatggcgcggggtgaggcgtatcggcgtcagccgagcgccgcctgaaccctgcgccggtgccggggtttaagggctgctggagatgacagtcggtcgaaccgacaagcaagacatgccgttaataccaatgaccctgtcaggtcgcccggttgtttggcgcttgcttgcggattccatctaggccagcggtcatgcgaccgcgccaacaggccggacacatgaacgccttcgacctgaagctcatctctcgtccgacccattgaaccccaggggccgtccacaca

SEQ ID NO: 1147 - DNA, 1364 bp, unidentified
  source 1..1364: mol_type = unassigned DNA; note = element_159bdb5
  misc_feature 1..2: note = core
  misc_feature 3..76: note = LE
  misc_feature 77..1102: note = CDS
  misc_feature 1103..1364: note = RE
  misc_feature 1078..1351: note = bridgeRNA
tgatggggtggacgccccccgacggcatcgacgtgccaaggtggtggtgtttcagagccaccacaggagagcgtccgtgacggaagttagcaccatcggcctggatctggccaagaacgtctttcaggcccacggcgcggatgccgccggcgcgccggtctttcgtaagaagctgcggcgcgaggaggttctgggcttcttcgcggcccagccgcctcgtcttgtcgcgatggaagcctgcccaggcgctcatcattgggcccgcgagatcggcaagcttggccatgccgtcagattgatcgcgccggcctatgtgaagccattcgtgaagcgtcagaagaacgatgcggctgatgcggaagcaatctgcgaggccgcgcagcgcccgaccatgcgcttcgtggcggtaaagagcgaaaccaagcaggcctccgccgtgatcttccgcacccgcgacgtgctggtcggccagcgcacccaactcatcaacgcgatccgcggtcatctgtccgagtacggcttgatcgcgccacaaggcccattccacatcgagaagctgatcgcacagatcgaagatcccgcctcgggcctgccgcaggccgcccgcacctgcctcgccgtgctcgtcgatgcgcttcgccatctgcaggaacagactgccgcgctcgatgccgagatcgccgcccgggcaaaggccgacgacgtgacccgcagtctcatgaccgttcccggcatcggcccgctgatcgccaccgccattgaagcgttggcgccgccgcctgagacgttccgctcggggcgcgacttcgccgcctgggtcggccttacgctggtgcagcgctcgaccggcgggaaggaacgcctgggacgaacgtcgcggatgggcgagcggacgctcaggcgcctgctgatcatcgcggccagcggcgtcgtgcgctgggccaagcgcaagggcacactgcccgattcctggctcggccggatgctcgcgcgcaagccgccgatgttggtgattgtcgccttggccaacaagaacgcgcgcgtcgcctgggcgttgctgacgaagggaggaacctatcgagctccggccgtcgtcgcttgagcggccgacgggtgtgaggctgtcgatggcgtgagcaggtcgaaggacaggtatggcgcaacgtcggtaaggcgggatcaggagaaccaggcgcatggggagcgcttcgagcgcgttccagtgatgtggacctgatcctcgcactcccatacgggcccgcggcacataacccgccgcatcagaggccggacacatggcagcacccgatcacgcgaagcgcctgtcccgagattttgcttgcgccagagggggcgtccacaca

SEQ ID NO: 1148 - DNA, 1436 bp, unidentified
  source 1..1436: mol_type = unassigned DNA; note = element_15a47dd
  misc_feature 1: note = core
  misc_feature 2..292: note = LE
  misc_feature 293..1318: note = CDS
  misc_feature 1319..1436: note = RE
  misc_feature 99..259: note = bridgeRNA
cctttagatttgcattttaattaaattgatcatattaagattattattatgtattattatagggggtctgggggatttgaaaaatgttaattttgtggaaaagttgagacaaagcgtggcaaattattagcgtccctaaataaaatttaagaagcgttttaatccacactttgctcaaaaggttaaaaagacagatagaaaattagggtaaaacccattaacaaggtaattgtccttcaccttttatctcaacttatttttcaaattcttaatttttaaaaccattattattatgttaatgttcattgtaggtgcggacatttcaaaggacaaaatcaattttgcacttcgacactctaatgatttcctcttagaaaaggaaatagaaaataccacatcagctctaactaagtttatcaaggaagttaagtctttggttaagagttttgccaaagaaaaaaagtctgattacgtactggaatttatcatggaacacacaggaatctacggtaatttacttatcgagtgtttgtcaggtttaaagataactatgtatgttgcttcaggccttgaaatcaagaagagcggagggatcactcgtggtaaaaatgatatcattgacgctcaacgtatagctgattatggggttcgattttcagacaagttaaagccttatacaataagtattgcgacaattacccaacttaaagggttgagaactaagaggtcccagcttgttgcagtgagatctcagttgacacaagccaatgatgataataaaaaatttatggacaaggagctctttaaaatgatcactaaaatcaatgatccaatagtaaaagaattggatgaagccattgagaaaatagaaacagaaattcttaatctaataaagagtgattatgacatttatgaaaattataaaatcgctcaatctgtaccaggaataggtccagtaacagcaacagcatttatatgtgcgacggataattttacaaaatttgattcagccaaagcattaggaagttattgtggcgtagtaccttttaccaattcatcaggaaggtacaagggtaaaaataaactttctcccattgcaaacaaagagataaagacactactgcaaatgggtgctttgtctatcatttgtggtaaatcgtttttcgccgcttattaccacaggaaagtaaatgttgataaaaagaataaaatgttggctcaaaataatgtgagaaataagattttaaaaacgctctttgcttgcattaaaaataaaaccaagtatcaaacagattattcattttcatttgcagcataaaattttaaagtgtggataactttgttggtaaggcttttaaactcaaagttatccacacaaaatatttcatttatgtattaaaaataaataaattaatgtttggattaaccatagaaaa

SEQ ID NO: 1149 - DNA, 1376 bp, unidentified
  source 1..1376: mol_type = unassigned DNA; note = element_15ac9bd
  misc_feature 1..2: note = core
  misc_feature 3..98: note = LE
  misc_feature 99..1103: note = CDS
  misc_feature 1104..1376: note = RE
  misc_feature 1120..1363: note = bridgeRNA
tgttggtgtggacggcctctcatcccaacggcttcatgacgcttcggcgtcaggccagatgagaggagagaccagtgaacatacctacacgcatcggcatggacaccgccaagtcggtgttccagctccacggcgttgatgagaacgaggtcgtcgttgtccgccgccagttccggcgggccgagatgatccgctacttcgagaagctgccaccgaccctggtggcgatcgagtcctgcggcagctcgcaccattgggcgcgcctgctgcagtcgtttggccacgaggtgaagctgatcccgccgcagtatgtgaagccctacgtgaagcgcgggaagaacgatgcggccgacgccgaggcgctttgcgaagcggtcaccaggccgaccatgcggttcgtcccgatcaagtcccaggaccgccaagccgcctgcatgttgatgaccgtgcgcgagcgcctggtgatggtgaagtcgcagctctccaatgccttcagaagctacgcggcggagttcggcatcgtcgggccggccggccgccagaacgtcaacgcgctgatcaaacgggtcctcgaggaggacaacttgccggagctggcccgcgagctgttttgcttccaagcgggggagtatgccgcggtcgaagcccggctcgaggaggtcgacaccaagctcatgaagtggcaccgcgcggacgagctcagccgtcggatcgcgaccatccccggcgtcggaccgatcggctcgacgatgctgagcatgaaggcgccgccggcggagaccttcaggtccggacgcgacttcgcagcctggcttggcctcacacctcgggatcattccaccggcggccgaactcgcctcggcgggatcaccaaggccggagatccgtcgatccgctccactctgatcgtgggcgcgaccgcgctcctgaggcatgtccggaacggccacacgaagccgtcgccatggctcgcgggcatcatgcaacggaagccacccaagcttgtcgccgtcgcgctcgccaacaagttcgcgcgcatcgcttggcggctgatggtgtcaggaggcgtctacagccgggagccagcagccatggcagcctgacctagattcggcgtcgaagggttagcgatgcagcccgtcggatagccgaccgaacttgcaggaacagtagatggaacgaccggtcggtcgatacgcgcgacattccgaagattgcactggcatccccgatgtcgctcatgtgtttggagcgtgcgtagcgaacaccatcttggccagcgaggtctcctcgcgcaaacaggccggacatctgatagcaagcgatcaggtcagactgtctgctaccatcctgacaagtggggggccgtccacatc

SEQ ID NO: 1150 - DNA, 1425 bp, unidentified
  source 1..1425: mol_type = unassigned DNA; note = element_15b288d
  misc_feature 1..4: note = core
  misc_feature 5..205: note = LE
  misc_feature 206..1411: note = CDS
  misc_feature 1412..1425: note = RE
  misc_feature 1..187: note = bridgeRNA
ttccctaagaatgtgaggcggtccgggaggaccgggtgtggctgatggtgggttgcccttgatggctccgaaggaatggccgcccggtcctccgggacgctccgacctctgattgggaactgcggtcatcgctggttagggacctgtcggcggagtgttctacgggccacgaagatgctggtcacggtggaacggagcgacggctttgagcacgtctcacgagcggacacgggtcggcatcgacgccgggaagggccaccaccgggcggtggcggtcgatgccgacggcgagacggtgttctcgacgaaggtgatcaacgacgagggacagatccttaccctgatcgagacggcccgggagaaggtcggcgaggtgcggtgggcggtggacatctccggccgggcctcgactctgctgctggccctgctgatcgcccacggccagcacgtcgtctacgtgcccggccgcacggtgaaccgcatgtccggcgcctaccagggtgagggcaagaccgacgccaaggacgcgcgagtcatcgccgaccaggcgcgcatgcgcccgaagggcttcgctcaactgcgcacgccgcccgaactggtgaccacgctccgggtgctgaccgactaccgtgccgacctgatcgccgaccgggtccggctgatcaaccggctgcgcgacctgctggtcggcatctgcccggcactggagcgggccttcgactattccgcggccaggggccccgtcgtcctgctgaccgagtaccagactccggccgcccttcgccggatcggcgtcaaacggctcaccacctggttggaacgtcgcaaggtccgtggcgccgacgccgtcgctgtgaaggcggtggaggctgcccaatcgcagatggccgaactgcccggtgacaagcggtccgcgaagctggtgggcgacctggcccaccggctcttggccctggacgagcggatcaaggacaccgaccgcgagatccgcgagaccttccccgccgacgagcgtgccgagatcatcgagtcgatgcccgccatgggcccgatcctgcgtgccgagttcgtcgccatcgtcggcgacctgtccgactaccaggccgcaggccgtctggcttcccacgccggcctggccccggtcgcacgggactccggccgccgcaccagcaactaccaccggcccaaacgctacaaccggcgcctgcgacacgtcttctacctggccgcacagaccgcgatgatgcggcccggcccctcccgggactactacctgaagaagcgcggcgaagggctgctgcacacgcaagccctgctcgcgctcgcgcggcgccggatcgacgtgctgtgggcgatgctgcgtgacaagaggctgttcacctccgccccgccagtcacgcagacggcttgacacgatcattgaga

SEQ ID NO: 1151 - DNA, 1357 bp, unidentified
  source 1..1357: mol_type = unassigned DNA; note = element_15c38ef
  misc_feature 1..2: note = core
  misc_feature 3..74: note = LE
  misc_feature 75..1100: note = CDS
  misc_feature 1101..1357: note = RE
  misc_feature 1076..1345: note = bridgeRNA
tgatggggtggacgccccccgacggcatcgacgtgccagagtgaggtgttgaacaacactcgaaggaggcgtccatgggacaggttagcactgttggtctggatctcgcgaagagcatctttcaagcgcatggcgcggatgtctcgggcgaggtggtgtttcgcaagaagttgggtcgggggcgattgctggcgttcttcgccggcctcccgccttgcgtggtggcgatggaggcttgttccggggctcactattggggccgcgagctggcccgtcaggggcacacgatccggctgatcccgccgatctatgtcaagccgttcgtgaagcgccagaagaacgacatggccgacgccgaggcgatctgcgaggcggcccaacgccccagcatgaggttcgtgccggtgaagcaggaggcgcagcaggccagcggtgttgtcttccgcgcccgcgatctgctggtgcgtcagcggacccagttgatcaatgccctgcgcggtcatttggccgagtacggctggatcgtccccaagggggtgccgcatgttgatcgactgatcgcccgcgtcgaggaccccgccgaggcgctgcccacggcggcgcgaaccatccttctggttctggtttcaaccctgcgaacactggaccagcagatcgccatactggatgtagagatcgcctctcgcgcccggcacgaccccgtcgcgcgtcgattgatgaccatccccgggatcggcccgatcacagcaacggccctgatcgcactcgccccgtcgcatgaagccttcaagagcgggcgtcattttgctgcctggctcggactcacgccgcgacagcgatccaccggcggccagcagaagctcggcgccatcaccaagatgggcgagcgaacgctcaggcggctgctgactatcggcgccagcgccgtcatcaaacaggcggtcattcgaggcgcaccggcagggtcatggcttgaccagatgctggcgagaaagccgaagatgctggtcatcgtcgccctggccaacaagaacgcccgcatcgtctgggcgctgttggccaaaggcgatgtctaccgagctccgggcgtgccggcctagccagcacgaacgcgagatgtcgaagcgtagggcgagcgaaggagcgtatggcgcaacagtcggcgagacgggatcaggaaaaccagggctttccaccgtgcctcgagcacgctttgggtgatttggaccggatcctcgaactcccatacaggccagagacggtacgccgcctcaccacaggccggacagatggcagcatccgactacgtgtcagaaactccgaaattcacccttgcgctgaagggggcgtccacaga

SEQ ID NO: 1152 - DNA, 1360 bp, unidentified
  source 1..1360: mol_type = unassigned DNA; note = element_15cd353
  misc_feature 1..2: note = core
  misc_feature 3..11: note = LE
  misc_feature 12..1106: note = CDS
  misc_feature 1107..1360: note = RE
  misc_feature 1132..1347: note = bridgeRNA
tgatggggtggatggttcctgctcccaccaacgccgtgatgcgtcatactgcagttgtcatggacagcaaacgaatggagccaccccatgcaagttacaactatcggcatcgacctagccaagaatatatttcaggttcatggtatcacgaaagtgaagaagttgctttcaatcggcctttgcggcgcgctcaggtacttccgtttttcacacggatagatccttgccttattggtatggaagcctgtgccacaagccattactgggcgcgtgagttgaccaaattgggccatgaagtccgattgatccatcctatgtacgtcaagccttatgtgaaacgtggcaagtctgatgccattgatgctgaagcaatttgtgaagcagtcacgcgtcctacaatgcggtttgtggagagcaaatctattgaacagcaagcgcttctttctctccaccgggcgcgcaacctcatggttcgtcagcgtacccaactgattaacgccttgcgcagcatgttggcagagtttggtgtgtatatcgctaaaggcccagcaagcgctatcggtttttctcaaggcgtgttggctggcaataagttggaactgcccgaaatcgtgcaggacgtcgttcataatttgtgcgggcagttggacatactgcaggaaaaggtgcgttggtatgaaacgcgtttgagatttgaagccaaacgtgaccccagggttaaattgttgcaaaccatccccggcattggtcctgtgaccgcctctgcgctagttgcgagtatcggcaatggacaccagttcaagagtggtcgtgaatttgctgcatggttggggttgacgccgactaatcgatctagcggaggcaaggaacggttaggcaggatcactaaaatgggggaccaatacctgcgccaactgcttgtcgtggggatgacatcgctcatcaggctgacaaaacatcacccagatcgcgcaaataattggctcaccactcttttggagcgcaagcctgctcggttggcgagtgttgctatggccaacaagacagcccggatcgtctgggcggttttaacaaagaacgaaccttacatgcccagatcagcctaaaaggatttgaagcggatttaggaacacgagattgcaagacctgcgaaatgatggtgcaaaagtcagccgctaaaaccaagacaccccgccgaatggctcgggcattatagcccgcttagctgatagggacttggtttgcggaacccttcaaggccagcggtcaaaaccgcgcaaacaggccggacacatgactgtttctgacaaaggtgccgatcatctcaaaaatgtcttgcaaagcaggagccatccacaca

SEQ ID NO: 1153 - DNA, 1440 bp, unidentified
  source 1..1440: mol_type = unassigned DNA; note = element_15d0c10
  misc_feature 1: note = core
  misc_feature 2..312: note = LE
  misc_feature 313..1137: note = CDS
  misc_feature 1138..1440: note = RE
  misc_feature 1190..1383: note = bridgeRNA
gaatgaaaggacttccccgtcctgaggttgcggcgaagccgcgaatgtcggcaccaaagtgccatgatggagtgtcgtgccttcatcaacgccagtaagaggggaagtccatgtccattgtcaccgtcggaatcgatcttgccaagaatgtgtttgcaatccatggagtgaatgaaaccggcaaggcgatattggccaagccgaaggtcacgcgtgatcaactcgtggcgttgattgcgcaattgccgccgtgactgatcggtatggaagcctgctcgggcgcgcatcactgggcccgcgtgttccagcgatatgggccatgtggtgaagctgatggctgcccggctggtggcaccgtaccggatgtccggcaagcacggcaagaacgacgcggcagatgccgcggccatctgcgaggcagtgacgcgccccagcatgcgtttcgtgccggtcaaggacgaacaccagcaggcgacgctttgcctccatcgaacgcggcaaggctttgttgaagagcgtactgcaacatataaccgtctccgtggactgctcgccgaattcggcgtggtcttgccgcagaaaccggagcgtttgcgcaaggagatcacagcgcacctggattctttgccgggttgggctagcagaagcatccgagacctgctcgaacacgtcgacaacatcgaagaccggctggccgaatatgatcgcgcgatccgcgaggtagcgcgcgaggacgagcgtagccggcgactgatgcaattgcgtggcatcggcccgactacagccagtgcgttgcttgcaagcatcggcgccgggcacgacttcaggaacggccgtcaggtagccgcccggctcggcttgacgcctgggcaatatagcagcggaggtaaagcgcgacttggcagtatcaccaaggctggcgacgcctatatacgctgtctgctcgtgaacggtgctcgcgcagtcatggcgaacctgggtgacaaacaggaccgcttcagccgttgggtcagggccttaaccgagcgtcgcggctattggcgcactgctgtggctatttctgccaaaaatgtgaggatggcatgggctctgctgagatacggcgatgacttcaaacatgaactatctgcgggttaaaacaccggcatccacaccgtaccgccatctgaccatgaccagatagaagatcactttgcactgccagcggtgatgtgaagtgggtttgacccgcgcggggcctacctgcgaaaagtactgggacttcaatcccgataatcgagcgaggtcctcgcgcacgtctttccatcagggtccgggccactggaccacaatgaccgtttgtagttctgcagtccttcaccttctcacgcaacacaggcaacggcaaagcaccaagataaatccgcgattgagcttgcgctcaacggggaagcccttgta

SEQ ID NO: 1154 - DNA, 1563 bp, unidentified
  source 1..1563: mol_type = unassigned DNA; note = element_15df0ae
  misc_feature 1..5: note = core
  misc_feature 6..265: note = LE
  misc_feature 266..1474: note = CDS
  misc_feature 1475..1563: note = RE
  misc_feature 11..246: note = bridgeRNA
ctcctacaatctacttatcgtgttttgactgcttctatcgaaccattcagaatgcgatgcagttactggcgaggcaggtatgtcgacatatgccctggggcgcttatcgcgaccccgccaaggagtctgacagcctgccccattcggggcggttcgcggattagctggatggcggggcctttgtttggccaccccgtgtctctttcaggaggttgcgagcccgtttggagtgcaggagcctgccatgtgcgaaggaggcaggtccatgatctacgctggaatagacatagccaaatcgagccacgtcatcggtgcggtggacgagcgcggcaagaacgccgccaagcccatgcggttcgcaaactccgctgaaggattcggcaagtgcgcagcctacctcgaagggctgggcgcacctgcggaggagatgctcgtcggcatggaagccaccggccactactggctgccgctgttcagcttcctgcacgcccaaggctacgacgtcgtcgtcatcaatcccatacgaaccgatgcgatgcgccgcttcaagggaagctctcgggtcaaaaccgacctcgtcgactgcatcctcatagccgacaccttgcgccttggcgagtttcgccccagcaagctcggagacgagtcgatggtagagctgcgccagctcacacggcttcaccagggcctcaaggagagcgtcgccgacctcaagcgccaggtgatagtggcgctggaccaggtatttcccgagtacgattccatcttttccgacaccttcggtgagagctccaaggcgttcctgaggaagtgcccgacccctgaggagtgccgaggcgtccgcgtggacgccctcggcaacacgctctcgcgcgcgagtcgcggcaagctcggacgggagaaggccgaggagatcaagggcatcgccaaggaatcgtgcggcatcgacagggggacgcgaaccctctccttccagatcaaactgctcgtggagcagatagacttcatcgaggggcagatcgaggaggtggaggccaggatcgaagaagggatcgagacgaccgagccgctcatcctcaccatcccgggcatcggacatgtcctcggcgcgcagatcgcgtccgagataggcgacatccatcgtttccggaacgcatccgccgtcgtcagctatgcgggcatcaacccctccgtcagccaatcgggaaagttctcctcaagcgagaatcacatcacgaagcagggctcgccctaccttcgacgcgctctctatctggcagcgaccgcgcagctcaggctcagcacgccttttcgggattactacgataaggagagagcagacgggaaatcccatcgggaggccctcatagccgtggcgagaaagctcgtgcatgtcatatacgccgtgctgtccaagcaggagccttatcgccctgatgcggtgaatgcgaatccggtatcgcgttctgaatgattcgatataaagctgtcaaggtacaaaaacctacattgcaaaactgtctagcaaaatgcgtctacgggtcttgactactcatagctggt

SEQ ID NO: 1155 - DNA, 1176 bp, unidentified
  source 1..1176: mol_type = unassigned DNA; note = element_15e2113
  misc_feature 1..2: note = core
  misc_feature 3..205: note = LE
  misc_feature 206..1153: note = CDS
  misc_feature 1154..1176: note = RE
  misc_feature 3..180: note = bridgeRNA
cttgtatggtaggacttgaagggaggaggagggacaaggctcgattctgactgttcacgcagtactgaccgtgggagagttcgcccctcctcctttcacccaagcgccgataaagaatgcatctggctagaccgacgataggaacaagcctgcgcccctgggtgagcccttcaagtgcttaaaaacatatcccggaggaagaccaatggcaatgccggtttctatctcaaagccaatcgtcggcgtggatgtcgccaagaatgagttggtcatttacaacgcagaattggacctgcttgaagaaattcccaataccaaagctgccatcaccaagtggctcaaggctttgcctggcgcagtggtgatagccattgagtccaccaatatctaccacttggcgtttgccgatctggcccacgaagccggttgcgtgatttacatgatcggtggttatgagctgcatcattaccgcgaaggcgtgaaggttcgggctaaaactgacgcgctcgatgccaagctgcttgctcgttatcttaaaaatgagcaacaagagcttcgcccatggacgccaccttcaccgctgtatcgccagctcctgagccttttccgccgccgggcggcgttggtccaggcaagggtcggactggaacagagctgggcaaatgaaccgttgttgaagaccgcttttgccgaacaggtgaagtccatgcagcaactggaaacgctggtcgagaagacgatcaacgatcagttgaaagaagccggattagtggggcaattgaagcgttgcctcaaagtggaagggatcggttttttaaccggagcccgtttgatcgctgcatttcaacgaggcgacttcagaaatgcggacgcgtttgttgcctttttagggatggatttgcgagtgtccaaatcagggcaaaaagacgggcgccgcagtttgaccaagcgaggcgacccagaggcccgccgacttttacacaatgcggcgatgtcggcgagccgtactaaagcctggaaagggttctacgaaagccaaagggcacggggcttcagcaccactcaggcactggtaatgctagcccgtaagctggctcgggtcgtattcgccctgctcaaggggcaaggtgaatatcgaccgaaagtcagttgagagcttcccctcaaccatagaat

SEQ ID NO: 1156 - DNA, 1587 bp, unidentified
  source 1..1587: mol_type = unassigned DNA; note = element_15e56df
  misc_feature 1..4: note = core
  misc_feature 5..491: note = LE
  misc_feature 492..1466: note = CDS
  misc_feature 1467..1587: note = RE
  misc_feature 16..283: note = bridgeRNA
ttttagtaccatataagtgtaagagataaagcatatcattagtgctttaccttctgcacttatttttttatgataagggagtaattggtctggcgaggcgctttttggattaaccacatccgtcatgaaaaccgtcaaccaccccttattataagcagtcgtttaagcaggttgaaacccgtaaggtgctttcgtgtaacgaactaaaatgagtggtaataagtgtggatgggacaattacaaatttattttggaggttacagatgataagtgtaggaattgatgtgtcaaaagaaaaaagtaccatatgtatcctgaagccgtatggtgaaatcgtgagcaggccttttgaagtctgtcatacagagaaagaattatccgaattgacttctatgctgctacgtttgaatgatgatgttcgtgtagttatggaagccaccgggatctaccatctgcctgtattatgctatctgaaataaaaagggctgtttgtggcagtggtcaatccatttgaaatgaaggaataccgttgccagggactgaggcgtgtgaaaacagataagcaggatgctgttacgatctctaactatgggattgaccattggtatcggctgagagaatatgaagcggaagaaaacatctacgcagagttgaagcttttaggacggcagtaccgccattatatgcggatgcgtgtggaaagcgtgttggaactgacccatcttctggactatacgatgcctgggatcaaaacgctgctgaaaggctggaatgaaacaaatgggaaagataagctgggggattttgcggaagaatactggcattatgacaatatcacgaagaaatcggaggaacagtttatagagagctatctaaaatgggcaaaagagaagggataccaccagagccaggataaagccgtcaagatttatgcgttggcaaaagaaggcatccccacagtatcctccgataccccatcgaccaaaatgctggtacaggaggcagtgcgggtgttacgagaagtcgataacactctaatgactattctaacacagatgcaggcattagccaagagtctgccggaatatccggttgtcagggcaatgggaggtgttggaaatgtccttgcgcctaaattgatcgcagagattggggatgtaagaagattccatagtggaaaagctttgatagcccacgcaggaatcgacgcgccgccatatcaatcagggcagttcattggaacagagagaaaaatatctaagagaggatcttccagtctgcgtaagatcggatatgaagtgatgagatgcctaaaaacccataaagaaccagaagatgcggcagtatataaatttattttgaagaaagaaaaagaaggaaagtcaaaacgtgcagcaaaaatagcgggattaaataaattccttaggatttattatgcgcgtgtgatggaagtataccagaagtaaaaagaactaaaacagaggataaggcagaccggattttccaccggtctaattgtcgtgggaaaaattcataccaaaaatttatttaaaaacctgctaaaaagtcttgacttttgttagcagg

SEQ ID NO: 1157 - DNA, 1443 bp, unidentified
  source 1..1443: mol_type = unassigned DNA; note = element_15e84ad
  misc_feature 1..5: note = core
  misc_feature 6..223: note = LE
  misc_feature 224..1426: note = CDS
  misc_feature 1427..1443: note = RE
  misc_feature 1..227: note = bridgeRNA
cccccgttacctttctggtggcccttgaggcaagggcttcggtcgccgggcttggtatgacttactgcccctgttgtcaatgatccggggggtgttgtcgccgggccgggtggcatcgggtgaccgctgatagggacacggcccagtgaggtctcgtcgtaacgtggctgccgggacttgatgcctgatcggtgaccgactcgaccgcagaggagagtcagcgttggatgcagacgagccgatcacgatctggtgcggacttgacgtcggcaagagtgcccatcacgcatgcgcgctggacaggcagggccaccgcgtcttcgatgccgaactgccgcaggaccaggaacgcctggaacgactgttcaccgagctagctgctcgaggacgagtcctcgtcgtggtcgatcaacccaacacgatcggcgcgctgccggtcgcggtcgctcgggcgatggacatcgaggtcgcctacctgccagggctggcgatgcggcggatcgccgacttgcaccccggcagcgccaagaccgatgcccgcgatgcctatgtgatcgccgattctgcccgcaccatgccgcacaccctgcgccgggtcgacgtgggcgaggatgtgttggctgagttgaaggtgctgatcggattcgacgacgacctcgctgccgaagcgacacggttgagtaatcggatccgtggcctgttgacacagatctttcctgccctggaaaggatcctgggcccccgcctgcataccaaggctgtgctcgcgttgatcatgaaatacggcggaccgcggggcatggcagcggccggccgagcaaggatgattacgaccgctaccgcagccaaccgccggggcgcggcagaactcgtcgaccagatcgtctccgcactggccgagcagaccgtcaccgtccccggcgcagcagcagccgaacgcgtcctgcccaggctcgccaagagtctgaccgaggccctggatcagcgggctcacctggcagccgaggttgaacaggtgctcgatgctcaccctcttgccgaggtcctgacctcgatgcccggcgttggggtcaggaccgcagcaagaatcctcgtcgaagtcggcgacgcgtccaccttccgcaccagcggccacctggctgcctacgccggcctcgccccggtcacccgacgatccggcacttcgatccgcggcgagttcccggcacgttcgggcaaccgccacctcaaacgagcgttcttcctctccgcgttcgcagcactacgggccgacccggccagccgggcctactacgaccgcaaacgagccgaaggcaagaaacacaacgccgcactcatctgcctggcgcgacgccgctgcgacgtcctccacgccatgatcagaacccgaactgtctaccgcccaaagctacccgcaaccagttgacatccgacatagggaca

SEQ ID NO: 1158 - DNA, 1753 bp, unidentified
  source 1..1753: mol_type = unassigned DNA; note = element_15f3fcc
  misc_feature 1..2: note = core
  misc_feature 3..302: note = LE
  misc_feature 303..1751: note = CDS
  misc_feature 1752..1753: note = RE
  misc_feature 13..271: note = bridgeRNA
cttgtataatatgtttaggctatagaataggtaaacatattatatacctgtcctatagctttattaaaaatattaatagcttgtttcttcagagaaggcaggagaaagctgtttcctccttgggaaagggttcccttatccttcaagaaagactgcttctccggccttctacctgaaataccgttaactaagttgggagtattcatttgaatacatcccctttttgaaacaaggctgtgttggtagaagtgctggagtaaatgcctaaaattgaagagcaaaaagaaaggagacaaaagtatatgggcaagagtatcgagaaggtaatgtttgtaggagttgatgttgggaaaagaaagcacgatgcttgctttcttgagagtagtggaaatgtggcaaaatacattctctttgagaatagaataaatggatttagaaagttctttaatacaatagaacagtttattaaagatggctacagtgtaagtgtaactgttgaagcaacagggcattacttccttaatctctattcttttttgagagaacataggatcgatgtaactgttgttaatcccatacagactgatagtttcaggaatgtattcattaggaaaactaaaagcgataaaagggattcctttgttattgctgaacttacaagattgggaagagcaagaaagtctgtcgttaatgatactaacagtaatatctctaatttgaggatgctcacaaggtttagggcagactatgtgttcaaacaagtagatatgaagaagaaactctcttcccttattgatagagtatttccagaattctttgatgtgtttaatggacttgctagtaagactgcccttatgatacttagaaattatcctaccccaaggaaacttcttaaagaggatagagaaatcctctatagccttgtgagcaagtggagtaagaacagaataaaaggagaagctgttgataaacttatagcagttgccaaagaatctgttggttcttctattgatattgatgcgatagaggtggagattccttttatcatcgatgaaatattctttattgagaaacagattgaagaaatcgagaagaagatagaatggatagctgaggggattgaagaagtggaactccttaagacgatacctgagataagtactattagtgctgcttctataataggagagatcgcagacattagcagatttagctctgtcaagaagcttagagcttacgcaggtatcgacccctccgtcaaggaatctggaatctctgttagaggaagaagtaccatatctaagggaggttccccatacttgaggagaaccctctactatgctgccaatgccagtaggcgattctctcctatatttaaaggatactacaaaaagaaaatcagtcaacaccctaatatggagaggtatgctattgtttctgtagccaataaacttctcactgttatttactacatactcaaacacaaaggaccttttaatccatactatgagtggaaggaagaaataaatgaatctataaatgccgctattaatggaagtggcaaagaaggagttggatataatgctcttcactggcctatgcctcttactattaatatgttacttcctacctgtttattattcctttgtccctctatataccccgctcttttcatattgcctccaaatacctccacaatttctaaggtttcttccattttctcccttcagggtattgacttattatactaagt

SEQ ID NO: 1159 - DNA, 1112 bp, unidentified
  source 1..1112: mol_type = unassigned DNA; note = element_15fc173
  misc_feature 1..2: note = core
  misc_feature 3..170: note = LE
  misc_feature 171..1100: note = CDS
  misc_feature 1101..1112: note = RE
  misc_feature 1..169: note = bridgeRNA
cctgtgtgtctgacctgtggttatatagctgcgggcggaaggccgtcgggatcctggtcgtgaaagaccgcctgctggctcttggtcctccgcccgcttcttgaccctcaacctgcacagttgacggaggccgtgacagcggacctcgcatcacaggataaggcatcgccatgatacaccctgatgttatcggatgcgacatcgccaaggcgcatctggatttctacgacagcggcctgcagcggcccctgcggatcgccaacacatcccccgctatcgccgactggctcgataaccttgatcgccggccggtgctggtcgtcttcgaggcgacggggcgctatgaccggcatctacgtttggcgctggaggcgcgcgggcagccctattgccgggtcaacccagccagagcacgtgactttgcacgcgccaccggcctgctcgccaagaccgatgcgatcgacgcgcggctgctggcgcgcatggggcagagcctgcagctcccgcagcaaccgcccgaggagccggcccgccatgcgctcgctcgtctgcatacgcgccgcgaccagctggttgccacacgcaagcaggagaagacccggctacatgaagccgacagtttcgagcgcggcagcatcgaagaccatgtcgcctggctcgacgcggagatcagccggatcgagcgcgcctgccgggaggccatgaaagccaataccgacatgcaggcacaggccgcaagcctgcgctcgatccccggcatcgggccgatcgcagcgctgaccctcatcacccagatgcctgaactcggcagccgctcggccaaggcgatggcagccttggcagggcttgcgcccttcaatgccgacagcggcacatcgcgcggtaagcgccatatcaagggcggacgaaagcgggtgcgtgatgcgctctacatggccgcgctcacggcaagccgcatgccgtcagccttcaaaccctatgccgaccgcatggccagccaaggcaaggccttcaaggtcatcatcatcgctcttgcccgcaagttgctcaccatcgcaaacgcaataacaagggacaaaacggtctattcgaaagcctgataaacacagttg

SEQ ID NO: 1160 - DNA, 1346 bp, unidentified
  source 1..1346: mol_type = unassigned DNA; note = element_15ff9ca
  misc_feature 1..2: note = core
  misc_feature 3..83: note = LE
  misc_feature 84..1103: note = CDS
  misc_feature 1104..1346: note = RE
  misc_feature 1119..1332: note = bridgeRNA
gatgggatggatggctcctgctccatcggcgtcgcgatgcgccatagtgcaggtatcgtcatctgcgagagaggagccaccccatgcaagttactacgatcggtctggatctggccaagaacgtctttcaggttcacggtttcaccgacgaaggagaagtcgctttcaaccaaagcctgcgacgggcacaggtgttgaagttttttgtgagtgtgccgccgtgtcttgtgggcatcgaagcctgtggcacgagccactactgggcgcgggagattgcaaagctgggccacgaggtgcgcctgatcccgccggcctacgtgaagccctatgtgaagcgcggcaagtcggatgcaattgacgccgcggcgatctgtgaggcggtgacacggccgtctatgcggttcgtggctgcgaaatcacgggagcaacgggcaatcttggccctgcaccgtgtgcgggacctgattgtccgtcagcggacgcagatcgtgaacatcctccgtggtgttctggccgagtttgggattgttgttcggcaaggcgccggccatgccattgcctttgccaagcggtgtctggaaagaacagaagacgatcttcccgacctcgcgagagatgttgtgagcaacctcagccaccagctcgcggctctgcaccgccgggtgctctggtacggtcgacagttgaaccgggctgcatcccttgatgcacgcgtcacccgcctgagaacgatccccggcgtcggaccgatcaccgcctccgccattgtcgcttcgatcggagacgggcatcagttctccaacgggcgcagctttgccgcctggctgggcctcacgccgctgaaccgatcgagtggcggcaaagagcgactgcggcgcatctcgaagatgggggaccgctatatccgacgccttctcgtgctcggcatgacctcccggattaaacaaatccaacaacgacctgaccaactcgatccttggtttgaagacattctcgggcgcaaacctccgaagctggcggctgtcgccatggccaacaagacggcacgtatcgtctgggcggtgctgacgcgcgagcaggactaccaggtcagaactgcgtaacgattgaaaggatcaaccaaatagcaagacgcaggatgtgatggtaaaggtcagcccaaagatcgagacaccccgtgctttgtcccgaacctcacgtgtccgctctgcagaatgggactcggtctgcggaacccatcagggccagcggtcagacgcaccgcgcaaacaggccggacacaagaccgcttctgaccagaaacccctcactaaaaatgtcttgctctgcaggagccatccacacag

SEQ ID NO: 1161 - DNA, 1365 bp, unidentified
  source 1..1365: mol_type = unassigned DNA; note = element_1618b90
  misc_feature 1..2: note = core
  misc_feature 3..77: note = LE
  misc_feature 78..1103: note = CDS
  misc_feature 1104..1365: note = RE
  misc_feature 1079..1352: note = bridgeRNA
cgatggggtggacgccccccgacggcatcgatgtgccaaagtgaggtgtttagaacaccactgcaaaggaggcgtccgtggaacaagttatcacaatcgggctcgacttggccaagtcggtctttcaggcgcatggcgccgatgcggcgggaggcgtggtctttcgcaagaagctcaggcgcgaccagatgctcgcattcttcgccgaccagccgctttgtttggtggcgatggaggcctgcgctggggctcactattgggcgcgagagattggcgctctgggccacgaggttcggctgatcccgccggcctatgtgaagccgttcgtgaagcggcagaagaatgacatggctgatgccgaagccatcagcgaggctgcgcaacgaccgacgatgcggttcgtcacgcccaagagcgccgaaagtcaggccgctgcgatcgtattccgcacgcgcgacttactcgtcaggcagcgcactcagcttatcaatgcgctacgcggccatctggccgagttcggctatgtcgtccggcaaggcgccggccacgccgcaaagctcttcgatctggtggccgatccctctaccgatctgccccaaccggcgagagcagtgctggcggtgatcgtcgagagccttcaagcgctacaggctcaggtcgctttgctagacaaagagattgcggcaagggccaagcaggatccggtcgctaagcgattgatgaccattccaggcgttggcgccgtcgtcgccacagcattggtggcgttggcaccggcggcctcaactttccggcgggggcgcgacttcgccgcctggctcggactcaccccccggcagcactccagcggcggtaaggaacggctcggccgcaccaccaggatgggcgagcgcagcctaagacggctcttaatccttggcgccagttcggcagctaaggccgcgagccgtggcagcgaaagcgccagcccgtggctgcgcgccatgctcgccaagaagccgcgcatgcttgtcaccgtggccttggccaacaaaatggcgaggatcgtctgggcgctcatggcgcacggaggaacctacaaagctccgatcgcggcgacctagtaccgccgcgtgtcagaggcgtcggagacgtaggaaggtcagcagagggatatggcgaaatagtcggtgagacgggatcgggaaaaccagaaatgtccgaagcgccccgagcgcgcaattgcggtgtggacccggtccgcgaactccataatggccagcggcgtgtgaaaagccgcatcaacaggccggacacacggaagcacctcgactacgcagccttaccctccaaaaatcttcttgcattcgaaggggcgtccacaca

SEQ ID NO: 1162 - DNA, 1422 bp, unidentified
  source 1..1422: mol_type = unassigned DNA; note = element_1619f4c
  misc_feature 1..3: note = core
  misc_feature 4..83: note = LE
  misc_feature 84..1139: note = CDS
  misc_feature 1140..1422: note = RE
  misc_feature 1141..1409: note = bridgeRNA
tgatgtagtggatggcgccctccagcggcatcaagtgtgccagaataggtttgttgcaaaacctttgagaggagccatccaccatggacgagattacaacgattgggtttgatatcgcaaagaatgttttccaactgcatggcgtcgacgcgcatggacagattgtactgcgcaagtcgctgcgccgcgggcagttgcatcagttcttcgagaagctgcctccttgcctgatcggaatggaagcttgcgctacagcccaccactgggcacggacgctgatgacatctggccacgacgttcgcctgatcccaccggcctatatcaagccttacctgcgccggcagaagaacgatgccgctgacgctgccgcaatctgtgaagcggtcacccgtccatcgatgcggttcgtaccagtgaagaatgaagagcagcaaaccacattaatgttgcacagtacacgcgatcttctgatttcgcagcggacagcgctgatcaacgcgttgcggggacattttgctgaactgggtattgtggttgctcaaggcgcgcgcaatgcccggcaactgaccgccatcgtcaatgatgaagataatattgttctgcctgcgagtgcacgtcatgctctccaacccgttacagcgatgctgatcgatatcgagacgcagattggcaaactcgacaaggatatccttgctactcatcgcaaggacaatgtcagcaaaaggcttgccaccattcccgggatcggaactgtcactgcatcatgtctttcggccagcgttccggatgcgcgcgtatttaagtgtgggcgggagtttgctgcctggatgggtctcgtgcccaggcaattctcaacgggcggtaaaccgcggctcggttccatctccaaaatgggtaaccggcgtttgcgagcgttactcgtcgtaggagcccatgccgcgctctacaggatgaaatccggcaagacccaaacaccgttggctgactgggcacgctcgctgttatcaaagaagccgttcaaactggtggcggtcgcccttgccaacaagatggcgcgcatcgcgtgggcagtcatggcaaaagttagtgattatgaacctgggttcaacggtcataaggttgtgcaaacaacggcatagaatatgcgtgaaagcattcgctcttttggggcaaacagttggcggagtgactatggtgtgatgtgaaagcaaaagcggaatggaccgcacgaaccggaaaacccgtggcgttgtcttgcgcattaaaagcgcgtcaatgtgagagggaccggatcaagcggaaaacatcaaggccagcggtcatgaacataccgcgctcaaaggccggagacatgactgcacccgacccgccaagctcaaacattgctcaaaatcatcttgccaaatgggcgtcatccagaca

SEQ ID NO: 1163 - DNA, 1355 bp, unidentified
  source 1..1355: mol_type = unassigned DNA; note = element_1621dab
  misc_feature 1..2: note = core
  misc_feature 3..74: note = LE
  misc_feature 75..1100: note = CDS
  misc_feature 1101..1355: note = RE
  misc_feature 1123..1352: note = bridgeRNA
ttaatgagatggtcacccccacaccctgcgagggctacgctttcgcagggtgttttgtttcggaggccatcatcatgagcgaattagcattggtcggcatcgacctcggcaagcacagtttccacctgcacggccaagacaagcccggccgtgaactgtttcgcaagaagctctcgcgtcagcagatgatgcggtttttcagcaaccttccggcctgtacggtggtgatggaggcctgtgccggcgcacacttcgtcgctcgccagttaatgggcatggggcatcaagccaagctgatttctccacagttcgtgcgacctttcgtcaagggcaacaaaaacgatttcgtcgatgccgaggccatttgcgaggccgcttcgcgtccgtcgatgcgctttgtctcgcccaaaaccgaggcccagcaaaccctttcagtgctgcatcgcctgcgcgaatcgctggtgcgtgaccgcaccaaaagcgtcaatcagctgcatggcttcctgctggagtttggtatcagcctgcctaaggggctggcgatcatgaagcgtctgtccagtgttctggctgagcatgagttacccgttcggctggctgtactgttgcagcgtttgcacgagcattttgtctacctggatgaacagatcaaggcgctggataaggagctggctggtcaactggccgaggatgacttaggccgccgcttgttgggggtgccgtgcgttggcccaatcaccgcgagtctgctggcggtggaaatgggtgatggcaagcagtacggctgcagtcgcgactttgccgcgtccgtcggtttggtacccagacaatacagcacagggggtaaggccaatcttttgggtattagcaaacgtggagataagaatctcaggcggctactggtccaatgcgccagggtctacatgcaacggctggagcagcagacggggccgctggccgattgggttcgctcgttgctgatgcgccggcactcgaacgtggtggcctgcgccttggccaacaagttggcgcggatcgcctgggccatgtcggttcgccatacagaatttgcagcagggccaggcaccttgaatgcctgaccctgctgctgttgcagtaccacgatccacctttctggttttgcgatagctgaacaacagatgacgtgaacggcctaccggcctggcgaacaccctgacataaaaatcggctctagaagccgcgcggtttttcaggatcgtcaggcgcgactctcatcgtggcgcggggcttgccccaagagacgccggatagatttaagcaagccaaccacatcgtccgttaatcagtattgcaaaagtgggggtgaccataga

SEQ ID NO: 1164 - DNA, 1364 bp, unidentified
  source 1..1364: mol_type = unassigned DNA; note = element_162cfa0
  misc_feature 1: note = core
  misc_feature 2..61: note = LE
  misc_feature 62..1108: note = CDS
  misc_feature 1109..1364: note = RE
  misc_feature 1114..1354: note = bridgeRNA
tatgggatggcccgcccctcagccgcataacctgcggcgacgagagcgagcggagggagcaatgcaaatttcggtgttggggatcgacctgggcaaaaatagctgcagtgtcgtgggcttggatgaagcgggccggattgtcctgcgtcgccggctgagccgcgcccgtgtgatcgaactgagctcgcagctgccggcatgcgtcatggcaatggaggcgtgctgcggcgcgcatcatctcggccggatcctggccgcacacgggcatcgcgttcggctgatgtcgccggaatacgtgcaaccctacgtcaaggctcagaagaacgatgagcgggacgccgaagccatcgcggaagcggcgacgcggccgaccatgcggtttgtggacctcaaaagcgaggagcagctcgacatgcaaagcttgcatagagctcgctcgcggctggtgggcgagcggacagcgctgatcaaccaactgcgggcagtgctgctcgagcgcggcatcatcgtcgcgcaaggacgggggcgcctggcacaatacctctcacaagcgttggatggcgacgaggctgcgcctctgcagctcagctcacgtatccgcctactgatagaagacatgcgtgcgcaatggcgggaatcggaccgaagggttgctgaatttgatggggagtttgtcgccgccgcccgcagcgaggcagcagcaaggcggctatcgaccattcccggtatcggagctatcaacgcgaccgcgctggtggcggccgtcggtgatgcgcggagctttgctcgcgcccgcgatcttgccgcctggctgggacttgtgccgcggcaagcgacaacgggaggcaggccccgcctgctcgggattactaagcgcggcaacaaataccttcgcacgctgctgatccacggggcgcgggcggcgctgccctcgctgctcacggtcgagagcccactcggcaactggttgcgcggactgagcgcgcgagcccatcggaacaccgtaatcgttgcgctggccagcaagctggcgcgaattgcttgggcggtgcttcggtcatcgacgagctacaatgccgccattgggcggagcgttatcgctgcatagggcaggagggcctcagcagcttgccttgcgcaagaaccgaaatctgcgagtggtgaaagcgagatggcctgacggtcgaaccggcgctctggaaccctgatcgaaaaaatggcgcatcgacgccgagccccttatgaggaccagagcgcgcggacctccatcttggccggggcggtggctccgacaccggatacgtttgatgcagacctgtcagatcgcctcgcaaaaagcccttgcgaacggggcgggccatacg

SEQ ID NO: 1165 - DNA, 1637 bp, unidentified
  source 1..1637: mol_type = unassigned DNA; note = element_162dc96
  misc_feature 1: note = core
  misc_feature 2..124: note = LE
  misc_feature 125..1294: note = CDS
  misc_feature 1295..1637: note = RE
agtaattatgtaagaaaagcatagcgcagcgtgtgcggtcatccgtcaaaaacggggccgaaattttaatttagtacgcgataaccaaagtttcgcaattattaacaattaaaagaactgcgctatgccaagtacaaatttgcaaaatccgattgactttaaaggtcagaaatttcatgtagggctggatgtccacaaaaaatcatgggcggtaaccattcgcagcatgggtattcaggtcgctcattttacccagccgccggacacggctgccttgtttaactatttacaaaggaatttcccaggcggctgttatcattcagcctatgaggccgggttttgtggaacgggcattcatgaacagctctgtaaactggggataaacaatatactcttacatgcagcggatattccggcgacagataaacagaagaagaacaaaacagatcttcatgacagccgttcaattgcagaacacttggaaaggggcaacctgcatggtatccatgtattgagccgggatcaacaggagctgcggagcttgttccggttgcgggaagccaaagttcaggacgtaacccgcgccaataaccggcttaaaagcttcctgatgctttttaatataaacatatcatcggtttctaaaaaggaatacctatccttaaaagcattggcatggcttggtaaactggaattagcttgcgcatcgggtacgatcagtttacaacaatatatagaagagttgacctatcaacgcaggcaactctatcaggtaacccggttgctgcgcacacaggtgcaggtttcacatgcgaaaacctatgaatgtttgctttctgttccgggtataggcggtgttacggctatggggctgattgccgagatcgctgatttcaaacgctttaaagacccggatgaatattgcagctttttgggtttatgcccatgggaagatagctcgggagaaaccatcaaaactaaaggaatgcagccgcgatgtaaccggcacctgcgcccactactcgttgaagcatcctggacagcgataaagagatcgcctgttttgtttgcttattatagtaaacacgctgccaggaacggtaaggctgctattgttaaggtagcgcgtaaactggctatgacagccaaaggggttgcaacaagcggacaaccctaccaggtagattattcacaaaaaaacaatcagcaggcatcaaaaaggtttttttcaggcattacggaacagcatgttaataaacagccgggcaatatacttacagtatggcccggctgatatgctttatccggctgtaatatccctggctggttgctcctcagcagtgccggcttccgtttcttacagcagtataaatataaaataaatgaatgttaaacgattcagtaaaacaactattaatctcaaaaaacattaaagaggaaaacgcacaaccttgattgtattgaattacattccacgagtattcgtacctcttttgacttcatacaattactggcggctcccgatttagggatgaccgcatatagcagtcggagattctttgttatgctgaaaataaaatgataactttatgtgattcctaaatctcatacctgtcgcttttgcttttctacatagc

SEQ ID NO: 1166 - DNA, 1416 bp, unidentified
  source 1..1416: mol_type = unassigned DNA; note = element_1633490
  misc_feature 1..2: note = core
  misc_feature 3..131: note = LE
  misc_feature 132..1142: note = CDS
  misc_feature 1143..1416: note = RE
  misc_feature 1172..1412: note = bridgeRNA
agatggtatgggcgaccccctcctaaccgcggtgcgcagctggagatccaattaacgaagagatcccccggcgacggcatcgcagtgccagagtggagatgcaactcaaccactgagccggaggatccgccatggagcttaccgtcatcgcagtcgatatcgctaagaaggtattccaactgcactgggttgacccagacacgggcagcatagaacgcatgaagctcaagcgagcccaggtgctgccctggttcgcaaaccgggaatccgccatcgtggcgatggaagcttgcggcggagctcacgaatggggccgccaactcatgaaactcgggcatgaggtgcggctgttgccaccaaagatggtccgcccgttcgtccatcgaaacaaaaccgatgctgctgatgcacgggctatctggacggcaagtcagcagccggacatgcgcttcgttcccgtgaaaaccgaagcccagcaggtggtgttggccttgcatcgcatacgagcccagctcatgaagatgagaatcatgcagaccaacgaattgcgcggtttgctctacgagttcgggatcgtgctgccggaaagccatcgagcactactggaggagttgcccggggctctgcgcgatgcgcaaggcaagctgccagccatgctcatcgagagcttgaacgagcagttgcacagggtccgtcaacttgatgccgacatcggtgccgtggaacggcgcttggcgcagcacatgagggagatgccggcatgcaagacgctcgctgaaataccgggtatcggcctgctcacggccacggctatcgtggccagcatggggtctcccacggcattcaaggacgcacgcgagttcgcggcatggatcggactggtaccccgccaagtaggcactggaggacgagttcggcagctgggcatcagcaagcgaggagatgcctacctgcgaaccttgctgatgcatggcgcccgagcattggtgcgctcagacaaaggtcaagcttggccttggctggccgaattgctcaagcggcggccttactgcgtcgccgtcgccgcggtggccaacaagctggccaggacgatctgggctgtactggccaaaggacaggcctggaaagccagcgcgtggtagccagcatgacaaggaccgaatgaacggactaccgctttgaaggagagcaagcgaccgagcgtgtgatgggacagacaggttggaccgggacgggatcactccggtaggaacgtggagcaccaagctcgtaaagcagatggggaacctcgtcggcgaatgccatcagggccagcaggcttgccagcctgcactacaggccggatataagactgcagccctgcctcctgcttcatcactcgacaacgttacttgcgatccgggggtcgcccatata

SEQ ID NO: 1167 - DNA, 1412 bp, unidentified
  source 1..1412: mol_type = unassigned DNA; note = element_163b31a
  misc_feature 1: note = core
  misc_feature 2..90: note = LE
  misc_feature 91..1128: note = CDS
  misc_feature 1129..1412: note = RE
  misc_feature 1172..1407: note = bridgeRNA
taatggcatggacgcccccactctgcacggcatcgactgtgccacagtggaagcgttgaacgaccacttaaacaggtaggagcgcccgaaatgaacattacgacgatcggtatcgatttggcaaaaaatgtgtttcaagttcatggcgcggatgagcggggcaaggcggtgctgcgtaaaccgctcaagcgcgcgcagatgatgggtttctttgtgaacctgccgccgtgcctgatcgggatggaggcgtgcggcagcgcgcacttctgggcccgcaagctcacggagctcggacatacggtcaaactgattgcgccgcagtttgtaaagccgtacgtcaagacgaataaacatgacgcagcggatgcggaggcgatctgcgaggcggtgactcgcccgaacatgcgctttgtgccgatcaagcacgccgagcagcaggccctgttgggattgcaccgggcgcggcaaggctttgtgcacgcgcgcaccgcgcaggtcaatcagatccgaggtctgctgaccgagtttggtctggtgatcccgcagggcatgcgctttctggcgaagcgggtgcccgagatccttgaagatgccgagaacggcttgccgggtgccagccgcaagctcttcagtcgactgttcgagcactttcgcgagctggatcgccaggcgaaggaactcgaagcccagatccaagtgtggcaccgcgaggatatgaagagccggcggctgcagacaattcccgggatcgggccgctcacggcgagcgcgttggtcgccagcattggcgatgcgagcgcgttcaacaatggccggcagcttgccgcctggctggggctcgtgccgcgccagcactcctcgggcggcaaagaacaattgctcggcatcagcaaacgcggagacacgtaccttcgcacgctgctgattcacggggctcgagcggtgctacgccaccggcatcggcacgccgatcaggctgaagggtggctggcgcgcctggcggcacggcgccatcccaatatcgcggcggtggcgctggcgcataaaaacgcgcgcatcgtctgggcgttgctcgcacgtggaacagcgtatcaagcgaattattccaagctcgccgcagcgacttgatctgaacggaaagtttgaccgggtcagtccgtcgtttttcaacacacaccaccgattgctcaggcgtttttcaaagtgatggcaacacaggtcagaccggggttgattcaacctgaaccacccaggggacatcaaaagtccgggccagtgagcaggcatcaaccagcatattccatcagggcccgcggctttgtgccgcaccatgaggccgaatgtatggctgcaatctctacccgcgagtcagaaccgaaaagaacgcttggcataacaggggcgtccatgta

SEQ ID NO: 1168 - DNA, 1252 bp, unidentified
  source 1..1252: mol_type = unassigned DNA; note = element_1645d67
  misc_feature 1..2: note = core
  misc_feature 3..244: note = LE
  misc_feature 245..1237: note = CDS
  misc_feature 1238..1252: note = RE
  misc_feature 18..191: note = bridgeRNA
cttgtatgtttaagtcagatgaattgatagagtatttaacagttactggggaagccgttggcacctggaggcagtatttactgacctcgtttgtagattggctccccgcctcattgcaaagctcgaagagtatcaggaagccgataagaatcggacttcgcatcacaaggttgagattgcataaagtacgaggtcgaggaaccagtgaccattatctaacaaaccattgcttaaaggaaaggccatgaacgtctttgtggggattgatattgcagctaaaacatttgacctcgtgatgagaagtaatggtcggtcatctaaagttgagcagttcaaacaaacaccccaagggcacgccaaagcagtcaaacgactcctggctaaaacgccttctcttatcgtgatggaagcgacgggaatttactattttgacttggccgtcgccttggtaaaagcaggattacccgtcgccgttattaacccaaaaagcttccatcactttgctacgcttaagctgacgggaagcaagaccgatggtatcgactcggccctgttggctgagtacggtgagcgtatggagcctcgactctggacaccaccaagcgagagccaccttggcctgcgggacatcggtaggcagattaaccgcctcactggtacacgcacccaagcgaagaaccggttgcatgcgttgcaagccaaacaggcaacgatgccgatgataatcgaggatgaggaggacgggattgatatgctaagccggcgtattgaccgtctgacgcaggccgccctcgcgttaattgcagagtcagaaatactttctctgcatttaaagagtatgtctgctgcgaagggcgtaggaagggcaacagcactcattgtgttggctgaattatgcgtcctacctaaggatttaaaagcgccacaagttagtcgatttgcagggcttgatgtgcgtctcacgcagtcaggaacaagtgttaaccgacctgcacggctcagtaaagcaggtaatgcgtaccttcgctctgcattatatatgccagcgatgtgtgcagctcagcacgacgtcagggccaaagcattttcagaggcgttggtctcacgtggcaagaaaaagatacaggctcagtgcgcgataatgagaaaatatctcactggcttgtgggcctgtatgaagacagaaacgccgtttgattcgacgttattgttcagtgaacagcatataaaatcttgacgtccaacagagtat

SEQ ID NO: 1169 - DNA, 1393 bp, unidentified
  source 1..1393: mol_type = unassigned DNA; note = element_1647d14
  misc_feature 1: note = core
  misc_feature 2..88: note = LE
  misc_feature 89..1123: note = CDS
  misc_feature 1124..1393: note = RE
  misc_feature 1162..1388: note = bridgeRNA
taatggaatggacgcatccttcctaacacggcactcatgtgccaaagtggatgtgtaagcgatccacgaccagaaaggagcgtccaacatgaagctgagtgcgtgcggtattgatctggcaaagacggtgtttcaggtccatggtgtcgatcttcatggcaagccctgcctgcgcaagcagctcaggcgtgcggagatgctgacgtttttcgtgaagatcgagccgtgcctgactggtatggaagcctgcggcagcgcccactactgggcacgcatgagcgaaatggggcctaccgtaaagctgatggccccgcagttcgtgaagccctacgtgaagacgaacaagaacgatgtagccgatgctgaagccatctgtgaagcggtcacccggcccaatatgcgtttcgtggcgatcaagacagagcagcaggcgttgctggcgatccaccgagcacgacaagggttcgtcaaggcaaggactgcccaggccaatcagatccgtggcctgctggctgaattcgggatcgtcatgccacagggactttgcaatctcggcccgaggttggcatcgctgtgcgatgaatcgactggacagctgccgggcagcttctgtgccttgctacagcgactcgccgaaaacctcaaggaattggattgtcaggttgaagaactcggaaaagagatccagctctggcacgcgcatagtgaagccagccggcgattggccgagatccctggaatcggcccgattaccgcaagcgcactggtagcttcgatcggcgatgcacactgcttcaagaatggccggcagttggctgcctggctcggtttggtgcccaggcagcactccagcggtggcaagcaggttttactgggcatcagcaaacgaggtgactgctacctgcgcacgttgctcatccatggggcatgtgctgtgctgcgacacgccgagcgcaaggtagagaccgccaccagctggctcgggcgcttgctctcgcgacgaaacaagaacgtcgccgctgtcgcgctggccaacaagaacgcccgccgggtatgggcgcttctcatgcatgacgacaggcggttccattcggattacgtcccggctagcgcaggcacgtaatccgaacggtcaatttaaggaggaatgacaagaatccttcaccgattgctcaggcgattgaagatgtgatggcaagacaggtcagaccgtgaccggcaaaccctgtttgcaccagggagcatcaagctcgtggctctgatcaggagctggtcagcggattccatcagggacagagactctgcctcaactaaagtccggatgtatggctgcaatctacctctctgaacatcacaaaatcgaaagtctggcaaaccaggatgcgtccatgta

SEQ ID NO: 1170 - DNA, 1465 bp, unidentified
  source 1..1465: mol_type = unassigned DNA; note = element_16500c0
  misc_feature 1..2: note = core
  misc_feature 3..87: note = LE
  misc_feature 88..1119: note = CDS
  misc_feature 1120..1465: note = RE
  misc_feature 1236..1463: note = bridgeRNA
cgatgagatggtcttccccctccttcacggcagccttcaattacgccatgatggataaactttaaccacaaaagtacgagggataccatgtctgaacagaaaatcatcggtatagatctggctaaaacgaacttttatcttttcagtatcaatgctcatggcaaacccgcaggaaagagcaaactttctcgcaaccaactgcttaactggctggcgcaacagcctaaaatgactgttgctatggaggcttgcggggcatcccattactgggcccgggaaatcaggaaactcgaccatgatgtaatattgcttccggcacaacatgttaaagcttatcagcggcgtcagaaaaatgattataacgacgcacaggcaatagctgaggcctgccaacatggaactatacgaccagtaccaataaaaactctggggcaacaggacgtccagacttttttgaaaatgcgtcggttggtttcgatggaaaggacacaactgataaatcacgttcgtgggcttctagctgaatacggcattgtattcagtaaaggcgcaacagaactacgccaaaaattaccagcattgcttgaggatgcggaaaacgaactcacagataccatgaggacgttattgcatcagcagtatatacggctgattacactggataatgaattggagtggtatgattctgaacagaaaaaatatgtccgacaggatcctgtgtgcaaacggttgttatctattctaggattcggccccctggttagtcaggcaataaaaagctggatgggggatggaaaacagtttagacgaggaagggatgcatctgcagctatggggctggttccccgacagttcagcacgggtggaaagcaggttcttctgggcataacaaaatatggagatcaatatgtcagatctatgctgatacacggtgccagagcggtattgttcagagcctcagagaaaactgattcacttagtgtgtgggttaatcgtattcgggaaaagcgtggcttcaaccgggcagttgttgctcttgcaaataaactccttcggatcgcctgggtaattatcgcccgcaatgagatgtatttgcctgcaacaaaacaaaatcaataagctacataaaatctgtaaaatctgtaaaatctgtaaaatctgtaaaatctgtaaaatctgtaaaatctgtaaaatctgtaaaatctgtaaaatctgtaaaatctgtaggagtaaagcttaccctgaaattgcgaagaatgccgaatgatgaaaaacaggtcagaccggcgttccgaaaacctgcaagatgaggaagtccagtaaggccgagtaagcgataaggtcggagcgcgcgaatgtctcatcaaggccagaagtaataacttcatgaacaggccggatatacgaaagcaaacctgtctctatcattgtagctgtgctcttgcaatatggggaagaccatata

SEQ ID NO: 1171 - DNA, 1595 bp, unidentified
  source 1..1595: mol_type = unassigned DNA; note = element_165187c
  misc_feature 1..5: note = core
  misc_feature 6..259: note = LE
  misc_feature 260..1444: note = CDS
  misc_feature 1445..1595: note = RE
  misc_feature 11..241: note = bridgeRNA
ctcctatcttttagttgttgcatttgggagccgaatatcgaatgctttcagatgcaatgcagactctggcgggcagggatgccgacatgacggctgaggcgacgggtgcgacctcgcaaaggagagtggcatcctgccccgttcgggaaaggccgcgaattagctggatgaggggcgacgcgccacctcggatctcttttgggaggttgcggtccgggcgctcgggcaggccccgccgcatcgcagaagggagccgggaatgatctacgcgggtgtggacatcgccaagacggaccacgtcataggggcggtcgacgagcgcggggcggagatgtgcccgccgatgccgttcaagaacaccgaggccgggctcgagagggccgtcgcgtggctcgagggccttgcggggtcgccgtccgacgtcgtcgtgggcatggaggccaccggccactactggatggcgtgctactcgttcctcgtcgcccgaggctactcggtcgccgtgataaaccccatgcaggtcaaggcggtgcgcaagctcaaggggctcgacaaggtcaagaacgaccgcgtcgacgccgggctcatagccgaggcgctgcgcataggccagtacgacgagaccaggctcgccaccgacgagatggcgtcgctgaggtcgctgtcgcgctacctgcagtcgctgcgcggcatggtggcggagctcaagacccagtgcatatgcctgatggacgcccatttccccgagtacgccgggatattctcggacatgttcggggccggcagccgcgcggtgctgtccaagtccccgctgcccttcgagctggcgcggaggcgcgccgactcgctcgcccgcgacatcgccgaggcgtccaggcgcggcggcaagtcgtccggctacgccgcgaagatcaaggccgcggccaagtcgtcgatcggcgtgaggctcggccaggaggcggcctcgttccaggtcaagtccctgataaggcagatcgagttcgcagattccgagtgcgccggggtcgaggcgaggctgaggtccctgctcgacgaggtcgagccgctcgtgctgacgatacccggggtgtcctacgtcacgggcgcccagatagtctccgagataggcgacgtgtcgcgcttccgcaacgcgcccgccctggtgagctacgccgggctgaactcgtcggtgagccagtccgggcagttcgacagcggcggcggccccataaccaagcacggctcgccgtaccttcgccgcgctttgtggctggcggccaaccgcgccaggcagtacgacccggggctgcgcgccttctacgacaggaagcgcgccgagggcaagccccaccgcgtggccgtcacggccgtggcgaggaagctgtgccacatcgtgttcgcggtgatgcgcgaccaggtcccgtacgacccagggagggaatagggcaatccaagcaaagggcatcggaggcggccccgccgcctgcttcgccatgcccggaaagcattcgatattcggttctcaagctgcaacgttcggacaattaactgttctcgaaaacttacggtttagcccttgacttcatatagctggt

SEQ ID NO: 1172 - DNA, 1404 bp, unidentified
  source 1..1404: mol_type = unassigned DNA; note = element_165c4cb
  misc_feature 1..2: note = core
  misc_feature 3..122: note = LE
  misc_feature 123..1157: note = CDS
  misc_feature 1158..1404: note = RE
  misc_feature 1164..1399: note = bridgeRNA
agatacggtaatgggccgcgcttccagctggtctggaggggtggctgtcccccggtcatgatggagtgacggggtttcaggtgtggtgcctcgaagccccgctagcctgatggaggacagccgtggagcattatgccggattggacgtctcgttggaactgagcagcgtgtgcattgtcgacgcgcaaggtgcgatcgtgtgtgaggcgaaggtgccaagcgagccgcaggcgctggttcgctatttcacgacgttgaagctttcgatcacgcggattgcgcttgaagctggtcccttgtcgcagtggcttcatgccgggttggttgcggccggcttcgacacggtgctgctggagacccggcacgtcaaagctgccttgtcggcgatgaccgtgaagaccgatcgacgcgatgcgcgcggcattgcccagctgctgcggcttggctggtatcggccagtgcacgcgaagtcggacagggcgcaggaggtgcgagcgctgttgaccgcgcgcaagctgatgcagtgcaagctgctcgacatcgagtgcggcattcgcggggcgctgcgcggctttggcctcaaagttggtgcaatcagccgcggccggttcgagatgcgggtgtgtgagctggtcgccggccatctgatgctcgagaccgtgattggcgcgatgctcgcggcgagggccgcgctcgagaccgagttcaagcatcttcaccgcgcgttgcttaggatcgttcgtgccgaccctgtctgccgtcagctaatgagcgttccgggcgttggcgcgattgttgcgatcaccttcaagagcggagtggacgatccggcacgcttccgacgctcgcgcgatgtcggtcctcactttggcctgtcgccaagaaagtatcagtccggtgagatcgatgtgaccggctcgatcagcaaggtcggcgatcgcatggtgcgcactgcactctacgaggcggccagcgtgatgctgacgcgcaccatccgcttctcggcgctcaaggcctgggcaatggcggtcgccaaaagacgcggcacgaagaaggccaaggtcgccctggcgcgcaagctcggcgtcatcctccatcgcatgtgggtcgatggcaccagcttccgctggtcgaacgaggttgctgccatggcataaaagagagcttggaagatcggccggcacaatagccgcccgaggtcccgtcgctgggacggtgaagttggtgaagccgcaatgtccgcagtagctgtcagagatctacgtctacagactacgcttgaaagatgggctcaccgcttcctctgaacgtatgatgtggcagcaacttagctgaccacggacagaagcaagataccagcgacaggatagaccgggacagcttgacacacgggcccattacaga

SEQ ID NO: 1173 - DNA, 1544 bp, unidentified
  source 1..1544: mol_type = unassigned DNA; note = element_1662f3c
  misc_feature 1..3: note = core
  misc_feature 4..278: note = LE
  misc_feature 279..1442: note = CDS
  misc_feature 1443..1544: note = RE
  misc_feature 37..262: note = bridgeRNA
tcacgtataatgaaaaccatctcgaaaggggtggttttcattatatctcctttcctaaaaatgttatgtggcaggagtagctacctgcgatataatcagcacaagcactgtggatttgtttctatatcattacagcttgactgttcggaggtgactcaaaccacagtgacttgtctgaattggtaattagttagttaacgctggacgtttcaattttcgtgagtacatagacaagccatctgtggaaacagcagtgcaaaattaaaaaggaggataccatgtactttgtaggaatcgacatttcgaaattcaagcacgactgcgccgtcatagacgaccttggcgatgttgtcacaccctcctggtcgtttagaaacgattgcgagggattttctttattggcagatttgctgacgaacttgggcgaagacataaaaatagggtttgaatctaccggtcattatgggcaaaatctaaagctatttctcgaatccaacaactttactttcatggaatttaatccgattctaatttctcgatttgttagcagcaaatcgcttagaaaaacgaaaaccgattccattgacgcgcttctaatcgcccaatatttgatgacggtagagtgcaaaccctatccggcatcattttaccacatggataagctgaagtcattgacaagatttcgtgacagccttgttcggcagcgaagccggcagttagttgaactgacaaatgttcttgacaaggtatttcctgaattcaagccttttttcaaacacagattctccgttaccgccctatatatcctgtcaaattacaccatgcccgagaaaattgccaacatgaacgctcgctcttatgaaatcattcgcaagctttcgcgcggaaaattcactatgagcgccttcattcagctcaagacgctggcaaagaacactgtcggacagtcggacgattacttgttacaggagatagacgtgcttctggagctttacaatcagttagactccaaaattcaggagattgaggaacaggtagttgcgtgcattaggggaatcaatccacccatgctgtccattcctggcatcggtgcgttatctgccgccatcatcctctccgaatacggtgacttcagcaaatacgacaaccctgctaagttgctttcctttgcgggtttggacccgggatacttccaatcagggcagtccgaacacactgggcacatggtaaaacacggctcgtcgcatcttcgctacgctctaatgaactgctgcctgccattgacctccaacgagcctgtctttgctgagtactatgctaaaaagcgtgccgaaggcaagcctcactgtgttgctatgtcacatgtcgccaagaagctgttgcgtgttatttacacgcttcagaccacgaacgttacttacgatcctaatctaatccgctaatttatgctttgattttttgagtccttgtaagagggcttggtttggtgcacccttttttgccgcataagtttttgcattaaggggttgactttttatagttag

SEQ ID NO: 1174 - DNA, 1359 bp, unidentified
  source 1..1359: mol_type = unassigned DNA; note = element_166334c
  misc_feature 1: note = core
  misc_feature 2..70: note = LE
  misc_feature 71..1108: note = CDS
  misc_feature 1109..1359: note = RE
  misc_feature 1119..1349: note = bridgeRNA
tatggaatggctcgcccctccctcccgcgtcgtgcattttgcatgaagggatttaacaaggagcagagcaatgcagatagcagtgttaggtatcgatcttggaaagaacagctgcagcgttgtcggagtggacgagcgcggccaagtcgtgcttcgacggcggttgcgccgtgagggtgttgtcaaacttggcgcaaccctgccgtcctgcataatggcaatggaagcatgctgtggtgcccatcatgttggtcggcagttgcggtctcagggtcatgacgtgcggcttatgtcacccgaatatgttcgcccgtacgtgaaggctcagaagaacgatgatcgcgacgcggaggcaatagcagaggcagccacgcgcccgacgatgcgttttgttgacatcaaggaggaagagcagttggacatgcagaccctccatcgtgcgcgtgaccgtttagtcggagaacgaactgccctgatcaaccagttgcgggcgatcctcttggagcgcggcattacagttccacaaggccgtcgcaagctggagatctggctggacttgaacactgacgaagagagggtttcgctcagtaggcgcacggtggccctcatcgcagacatgcgagcacagtggagtgagatggatcgccgcattgccgcttttgaccaagaattcaaagcctatgcccgatctgaccaaccatgccgcctcttgggcacaatacccggcatcgggcctctcaatgcgactgcgttggtagcaacagttggggatgctcggacctttggacgcggcagagacttggcagcctggctaggccttgtgccgcggcagatgacaaccgggggcaaaccgaaattgctcggcataacgaaacggggaaatggatatctgagaaagatgatcattcatggtgcccgagccgcgcttcccgtgctttccaaatccgccacacctcttggcgaatggttgcgcgcgctccttggtcgcgctcataaggataaagccatcgttgcacttgctgcgaagttagcgcggatcgtgtgggctgttttacagagcggccgtgcctacaacaataacggcttggaaccggtggcccaagcctagccgtataatcggcaacgatcgccgccggcgggcgctgctgaagatatctgcatgtggttgtgaagatggcctgactgttgatcggcgttccgaaatcctggttaaaaaaatggcgctagccgccgaggaagttatgaggatcggaatgcgcggagctccatcttggccagggatttgccctgagaccggatacgttggcgcagactgtttagacatctaccaaaacacttgcagacggggcgagccatacg

SEQ ID NO: 1175 - DNA, 1536 bp, unidentified
  source 1..1536: mol_type = unassigned DNA; note = element_1664766
  misc_feature 1..2: note = core
  misc_feature 3..248: note = LE
  misc_feature 249..1268: note = CDS
  misc_feature 1269..1536: note = RE
  misc_feature 3..227: note = bridgeRNA
cttgtatgatgtatttaagtccaaatacatcaatacgctcctttccattaaactttgatataatcaatattaacactgtggactttttattttttcttatggctttgactattttaaggagtgtattgccacagttttatctaaatcatttatagttggataagtctttgaacttttatgtcacgcaagtttatgatgataaaaccaggtggataaacacagtgattttacttaaaggagttgatcttatgatctatgtcggcatcgatattgccaaacttaaccattttgcttctgttatggattctgatggagaagttctcgctgaaccatttatgttcaccaacgatttctccggattccagaagctgctcgactgcatcagcagtttcccaagagatgaactttacatcggtatggaatctactgctcactatgcagaaaatcttaccagctttttatttaccagagattttaatgtgtgtatcattaatccgatccagacatctgctctcagaaagtctaacatccgtaaaaccaagactgattctgttgatacataccttatcatcaaagcattatctatgaatcatttcagactttacacacagagagattatgattcacttcaattaaaaaacctctgccgcttccgccaaaaacttatgaaggcaaggacaagggtcaaaattcagcttgttacttatgtggatctgctgttccctgaactccagtatttctttaaatccggaatacacggtaaagcatgttacgcccttcttaaagaagaacctaatcccgacaagattgcgtcgatgcatctcacgcggttatcaaacctgctaaacaagacctctaagggccactttggtaagcaacatgcaattgctttaaaagagcttgctgcacaatctgtcggtattaaaaatgatactctatctttacagattttgcaatccattaatcaaatcgaattatttgattctcagcttaatgaagtcgaaggatctatcaatgagatcatggataagcttgactcggtcattaaaacgatccctggcatcggcagcctgaatggcgccatgataatcggcgagatcggcgatatcagccgttttgaaaagccctgccagcttcttgcatatgccggcctcgatccatctgttaccagtcaggaaacttttcagcatccaggacaaggatgtccaagagaggctccagaatactccgatacgctctcatcaatgctgcatggcaggcaacattgaacaacaggactttcagggattactatgatttaaagatctcacagggccgccgtcattacaatgctcttggtcattttgcaaacaaacttgtccgtgtcattcacaagatgatgactgataatgttgaattcgatctagactagtcctacctgtcaactatattcaattttcaaaagcacctaatcgatgctttatttcctatacacttttttacgtcaaaactattttgttttttcttcgaattttctattgactattcatagttggt

SEQ ID NO: 1176 - DNA, 1396 bp, unidentified
  source 1..1396: mol_type = unassigned DNA; note = element_1664818
  misc_feature 1..2: note = core
  misc_feature 3..79: note = LE
  misc_feature 80..1120: note = CDS
  misc_feature 1121..1396: note = RE
  misc_feature 1118..1383: note = bridgeRNA
tgttggtgtggacggcctccaaacggcatcacaatgtgccaggttgaggttgttgcaaatctcaaggaggagaccgtccgtggaacatcttatccgagttggcatcgacacgtcaaagcacgtttaccagcttcatggcgtcaacgccgccgagaagcccatcctgcgcaaaaagctgcgccgtaccgagatgatggcgtttttcgagaagctgccgccaacggtgattgctatcgaggcgtgtggggcgtctcaccatttggcgcggctcctgacgtcgtacggccatgaagtgaagctgatcgcgccgcagttggtgaagccctatgtaaagcgcgggaagaacgatgcggctgatgccgaagccctgtgcgaagcaatgagccgacccacgatgcgctttgtgcccatcaagacttctgagcagcaggcagcgctcatgctggtcggcgtacgcgatcggttgatccgcacccgtacgcagttggtcaacgcgatccgtggttatgctgcagagttcgggctgattgctgcccagggcaagtgccggatcgttccgctgctcgaccgtatcgcggtcgaccctactgtgccggcgcttgcgcgaaccctgtttgccgcgcaggcgaaggaatattctcggcttcaggaccaaatcgaagaggtcgaagcggagttggcggcatggcaccgcgccaacgaatgcagccgacgcctggcggaaatccccggtgtcggtccaatcggagcgtcactcctcatgatgaaaacgccagcgcccgagctgtttgcctcagggcgacaatttgccgcctggatgggcctgacaccaaaggaccattctaccggcggcaaggtccggcttggcattataacacgcgccggtgacgaactgctgcgaagtgtgctggtggccggtgccaccgcgcttctacggcatgttcgagcaggaaagggcaacaatgcaaacgcctggctacttgaactgctcaagcgcaagccgccaaagctcgttgccgtggcggttgcgaacaagattgcgcgcattgcctggaagctcatggtgaccggcgagcgctaccgggcaaacagtattccgctacgcgaggtagcggcatagagcttggcgaacagggggtgctgatgtgcaagcactcgtgttgagctgaggcctgaacttgcaatagaatgcgcagatgggatcgatcattccgggcgtgagacactccgtacgatgcaatggctactacatgccggaaacttgtttggaactcatgtggcggaaaccatcttggcccgcggtcatttgcggctgcacctttgaggccggacatatgaacgcaagcgatcggtcatactctgctaaatctattgtcaggcgggggccgtccacata

SEQ ID NO: 1177 - DNA, 1305 bp, unidentified
  source 1..1305: mol_type = unassigned DNA; note = element_166907f
  misc_feature 1: note = core
  misc_feature 2..267: note = LE
  misc_feature 268..1263: note = CDS
  misc_feature 1264..1305: note = RE
  misc_feature 103..257: note = bridgeRNA
ctttagatttgccttatagataaaatctattatgatgatcgtgttgaaaagagggggtccgggggagactcataactcctataaatgttcataactttattgaaacataaaaaaagaacggggtgaactttctgtcggccaaggttgacgacctattgcctgtatcagtccccgttcttctaaccggtcgcccagaaccatataggatttcagcctcgacttttaaaggtcttagtttaagcgaccattttcaaacatggtaaaattatggaaatcaaggaaattatcggtatcgacgtgagtaaattaacattggacgcccacatccacttaaaaggcgttgcggaaaggttcaccaataccgtggatggcatcaaggaaatgtgcgtatgggcaaatgagaaccttggcccggccatggacggccttcttttcgtattcgagcacacggggctctatagcgacacgctcgaagagttcctcgatacggcgaggctgccctaccgtatcgttcccggcctggagatcaaacgctcccttggcattgccaggggaaaggacgacagggcggacgcaaagcggatagccctttacggatggcgcactagggaggaattcgtaccgcgccaaagaccggatgcgaaactggcggacatgaaaaggctcatgtccctgcgcaggaaactggtcgcccaacgggcgggccatatcgcgaacctgggtgagcagcgaagggtattgggcggagacccgcaccaacgcctgtacagctgtcaaaaggccatcatcgactgcctggacaaagagattgcggcgttggagagcgatatcgacgggcttatcgcacgggacccgaagctcaatgggatgttcaccctattgctcaccgtcaagggcatcggaaaggtcacggcaaggttccttatcgtgtacaccaatgggttcaagtggttcgcaagctggaggaagttcgcctcctacgtcgggatcgcacccttccccaatacctccgggaccagtctcaagggaaggacgaaggtcaacaggatggccaacaaggaaggaaaggtgctgttgaacatgtgcgcatgtaccgccgtacagtacagccacgaaatgaaaagatactatgaaaaaaggatcggtgagggaaaggacaaaatgtccacaatgaacatcataaggaacaaggtactggccagggcgttcgcagtggtaaggcgcggcacaccgtatgtcgataccatgaaattcatctcatgatagaaaaaatttatgaagaatatttgttttaaccataggata

SEQ ID NO: 1178 - DNA, 1550 bp, unidentified
  source 1..1550: mol_type = unassigned DNA; note = element_1674312
  misc_feature 1..3: note = core
  misc_feature 4..282: note = LE
  misc_feature 283..1446: note = CDS
  misc_feature 1447..1550: note = RE
  misc_feature 35..266: note = bridgeRNA
tcacgtataattaaaccatctcgaaagtggtggtttaattatttctccttcctaaaaatttggttatatttgcagggttagctgcctgcgatataataaagacaagcactgtggatttgtatctatttcataacagcttagactggtcggagatgactcaaaccacagtggtttgtctaaaatggtaattagttagttaacgctttgacgtttctatttgcgtgaatacaaggacaagccgtctgtggaaaacagcagtgcagaaaagaagaggaggaaaccatgtattacattggaatcgacatttcaaaattcaaacatgactgtgcagtaattgacgacgcaggtgatgttgtcacaccatcgtggtcatttgcaaatgatcttgagggatttttgcaattcaaagcactacttgattcacttggtacagaaacaaaaatagggcttgaatccaccggtcattacggaatgaatttaaagctgttccttgaagcagacggcttttcattcatggagttcaatccgctcttaatcaatcgttttgttaaaagtaaatcccttcggaaaactaaaacagatgcgattgactgtgagatgattgcacgttatctaatgacggtagagtacaagccctatccaccatcattttaccatattgaaaagctaaagtcactaacaagatttcgtgacaaccttgttcgccagcgtagccgtcagcttgtagagttgacaaacatcttagacaaggtattccccgagttcaagccatttttcggcggtaaattcactgtcacagcgttacatatcctctcggagtattcatcgccggaaaagattgcgaacatgaattctcggtcatacgaaccgttaaggaaactttcaagaggaagattttctacaacccattttgctaagctgaagcttctcgctaaaaacacggttggacatccgactgactttcttttgcaggagatggacattgtcttggaactttacagccagttggactcaaaggtagatgaaacagaattactgatccgtgaatgtgtttcggagattgatccgccgatgcttaccgttccgggaatcggtgttgattcggctgctgtaattctcgcagaattcggagacttttccaagtttcaaaatccgtcgcaaatgctttcatttgccggtatggaacccggctattttcaatccggcacttcggaatccacaggcaagatggttaagcacgggtcttctttcctcagatatgctcttattaactgtacgcaaacggttattaactacgagcctacctttgctcaatactacgctaaaaagcgagcggaaggcaagccttatcgtgttgcgctaactcatacagcaaagaaactcattcgcgtaattttcactttgcaaacaagaaatatcacttacaattctgattccgttaggtaattatgcttcaattttttcagcccttgaaacacagggcttacttttctatgccttttttatattttaatattttcttaaaaaagctattgactttttatagttag

SEQ ID NO: 1179 - DNA, 1425 bp, unidentified
  source 1..1425: mol_type = unassigned DNA; note = element_16761d3
  misc_feature 1: note = core
  misc_feature 2..213: note = LE
  misc_feature 214..1194: note = CDS
  misc_feature 1195..1425: note = RE
  misc_feature 1205..1419: note = bridgeRNA
taatgggatggtccgccgcctctgccaagagcagccgggtataagaggagcaaggaggtgttcccatgcagctaccacgatcggcattgatctcggcaagacagtgtttcatctggttgggcttaacccacgcggcgaggttgtggtacgcaagaagttttcgcgcaaaaactgttgctcttcactgcgaacctgcaggtcgaattgattggcatggaagcctgcggagggtcgcactttctcgggcgggcgctgagagagcagggtcacgaggtacggctgatgccggcgcagtatgtcaagccgtacgtaaaaaccaacaagagcgactacattgatgccgaagcgattgcggaggcagtcgggcggccgaagatgcgcttcgtaccgatcaagagcgacgaccaactcgatctgcaatccctgcatcgggtacgagagcgctgggtgatgcgacgcacagcagttatcaaccagattcgtggtttgctgctcgaacgtggaatcactctacgcaaggggcgacgccatatcgatgccgcactgcccgggattctggaagacgccagcaaccagctctctggcgctgtgcgcgtgttgttagttcaactgaagctggaactcgatcatttgcaaacgcggatcgacgaagtcgatgccatgatcaacaaagcttctggcgagagcgaaatctgccgacggctggtattgattcctggcatcggaccggtgacggcgactgccatcatcgccgcgatcggcaatggagcagctttcaagaagggacgagggttttccgcgtggctcggaatcgtccccggcgaatacaccacgggtggcaagcaaaagctgctggggattagcaaacgcgggaactcttacttgcgaagactcttcgtgcagggggcacgtgccgtcctacagcagagcgcgaagcaatcttccggtctgagtgcgtggctggcccagctcacaacccgcgcccacaataacgtggtcgcggtcgcattagccaataagctggcgcgtatggcatgggcggtactctcgctaagaatgaaccctatcggccgccgatcgcggtcggtgcagccacagcataactggcctgcagatgacgcctggctgaagccaggcttggaaatcgcattcgcgattcccacatctacagaccagcgcctgctgcggagttgataattttctgtcaggtctgctaacgaactatgagatgacacaacggtcgaacccggcgctctcgaaacctgcaaaccggaaaagccttcggggctgcctgactaaataggacgagcgcgcagcgcattccatcaaggcccggagctttgcgctccaccaaggccgaatacatttgcgcaggccaacctgtcgccctcatttttcgcttgcgacaaagcggcggaccataca

SEQ ID NO: 1180 - DNA, 1425 bp, unidentified
  source 1..1425: mol_type = unassigned DNA; note = element_16782f5
  misc_feature 1..2: note = core
  misc_feature 3..137: note = LE
  misc_feature 138..1163: note = CDS
  misc_feature 1164..1425: note = RE
  misc_feature 1177..1421: note = bridgeRNA
agatggtatggacgcctccccccggcagcgggccggccgcagcacctctgcattaatagaggatcctcgctgccccggcatcaaggtgccaaagtggagagtggataacaaacaccacttgagcaggaggatccaccatgaaacatagcgtaattggcatggacatcgccaagaaggttttccagctacacactgttgatcagtgcactgggaggatcgagcgtatcaagctgcgccgtgatgaagtgctggcgttctttgcaaattatccgaccagcctggtggcaattgaggcctgtggcagtgcccactggtgggcacgtcagcttcaacagcaggggcacgaggtacgactactcgcccctcgttcggtacgcccctttgtgctgcgaaacaaaaccgatgcggctgacgctcaagccatctggaccgcggtgcagcagcccggcgcttgcttggtggcaatcaagcaggcggatcagcaggcgatcctctcgctacaccgtatccgcgcccagttgctgaagtttcgcatcatgcagagcaatggcttacgtgggctgctttacgaattcggaatcgtgctgccagaaggttatacccaactgagtaaggccgtcccggaggccttcgccggtgctgagcatcgagtgccttccatgttgttggacagcttacgcgatcagtggacgcggattatccagctggatgaggaaattcgaaaaatcgaacttcgcttgaaacagtgcctgcgtgagagcaccgactgccagaaaattgcagagattcccggaattggtttgttgaccgcgactgccgctgttgcctcactgggagaggcgacaaccttccattctggtcgccagttcgcggcttggctgggactggttcctcgacaaacgggcaccggtggcagagttcggcaactggggctgagtaagcgcggagacacctatctgcgaacgctgttgatgcacggcgctcgctcgatcctcaatagagggcagcggtcagcgtgggttgaacgcttgttgaccaggcggccttataacgtggcggtcgccgcagtggctaacaagctcgccagaaccctttgggccgtgttgtcgaagggttcgccatatcgggccgaactctttaccgcatgccctgcggggcattgaaagcagtaatcaatagacttcacaaggagcgcaggcggtaaacacgtgatggcgaaataggtcagaccgtgacggggtaaacctggtagggaatatgagccacaggcacagccttcagctcgattttcagatgagggcctcgtcagcggattccatcagggccagcaggtttttccggcctgcacaacaggccggatataagactgctcctacctaatacgccagcatggctacctattgagctccgggaggcgtccatata

SEQ ID NO: 1181 - DNA, 1193 bp, unidentified
  source 1..1193: mol_type = unassigned DNA; note = element_1678df7
  misc_feature 1..2: note = core
  misc_feature 3..183: note = LE
  misc_feature 184..1185: note = CDS
  misc_feature 1186..1193: note = RE
  misc_feature 27..190: note = bridgeRNA
ctcgtatgatgatcacgtcgacttttggcaaaatatagctgagtgtacggccaggcagagtgacatcggtggtgcctgaggcgcatgagcctgtgggacagagtggtgcctctgcctgtttatcatttcagagtccggacggtatcttaggcttgaagcctgcatacgagggaggtcggttaaatgattcaggtagtttcgcctgttgtagggattgatgtcagcaagaagaagctggatgcagcattgctcgctggcggaaagttgaagtacaaagttgtagagaactcggccaaaggctacgcggatctggtggtatggctacgaaaacaggatgtcgtcattgaggacattcatgcttgtatggagtccactggtgtgtacagcgagcccgtagcgctaggattgctggccttggggctgaaggtgagcatggtcaatccgacccagatcaaagggttcggacaaagcgaaaacatccgcaacaaaaacgatcgcgccgatgccggcgtaattgcccgctactgcgcgacgatgcgcccgccgctgtggcaggcaccgtcgcccgagctccgacatctgcgctcgctgacggaccgtgaggccgtattgaaggatatgcggcagcaggaggcgaacaggcttgaggcctatacgtttgcgaacgacgtagccatgcaagcggacgccagacgacttattgccatctttgacgaggagatcaaacgactagggatagaagtggatgaccatatcgatcgccacccagatctcaagcgcgacgtggaccttatgacgtccatcccaggccttggtcgcgttaccgcggccaaggtaatcagtcgcgtgggcgacatacggcgctttactgatgccaagaagctcgccgcttacctgggggttacgccaaagcagcgccagtccgggagctccgtgagaggccgatcgacgataagccgcatgggtagcggcgaagtacgcacggccatgtacatgcctgcgatcaccgctatcagatacaacccgctgatcgccgctttcgcagagcgtctgagcgcgaacggcatggccaagatggcagttgttgtcgctgccatgcgtaagctcgtgcaccagatttatggtgtcgtcagctcaggccagccgtttgacccaaattatttacaaaaacagcttgcaacttaagacggtat

SEQ ID NO: 1182 - DNA, 1169 bp, unidentified
  source 1..1169: mol_type = unassigned DNA; note = element_168784a
  misc_feature 1..2: note = core
  misc_feature 3..225: note = LE
  misc_feature 226..1155: note = CDS
  misc_feature 1156..1169: note = RE
  misc_feature 20..230: note = bridgeRNA
cttgtatcttggatttgccatctttgtgatagaacaagggtgggcgtgagatccggtatagcggcaggtcctgatcgttcatcaagaccgctcgtaagtttgatccacgctctgcccttggcggtaaacaaactcgaacagttactggagcgaccaagccggccccaacccaagggcggtgccggcctggccagctcgcatttacaagcaggagttatttaacccatgaagcaaagtgttgtctatatcgggatcgatgtggctaaagcttatctggatgtggcttgggccggagtctctcggcgtttccctaacgagacaaatggccacgccgctttgaagcgctggctcaagcaaagtgccgcgcccgtgcagttgatctgcgaagccagtggcgggtatgagcaagcgttactcgagagcctggccaggagcgaagtaaaagtcactttggtccaggccgtgcgtgtccggcagtatgcgcgtgccgctggtatcctggccaagaccgaccagatcgatgccaaagtcctggccgcatttggcactgcgatgcaaccgaaaccgactccgccactctcggccgagcaaaagcgtttgcgtgagtatgaagcacagcgccgtcacctgagcaaagtcttgctcgcagaacaaaatcgtctggcagggttaagctgtgccgagttgcgatctttaagccgcagcctgatcagcaaaatcaaaaagcaaatcgagaccatcgatgcggagatcgccgatctcatcgcgcaagaccaagtcctttgtgctaaagcgcaaaaacttaccgccattagcggagtgggcgcacgcacggctgcgctcctgctcgcgcaaatgcccgagctggggcaactcaatcgcggggaagcggccgcgctggctggtctggcaccgtttaatcacgacagcggttcgatccgcggcaagcgcgccatcttcggtggacggcgcgctttgcgcagcgggctctacatggccgcgctctcggcggctcgcttcaatccgatcctctcgagcttttaccagcgtctgcgcgccaaaggcaaaccgcacaaactcgctctgaccgcagtcatgcgaaaactcctccttgccctcaactccacactcaaacccatcgcctgctctgcttgaaaacaacacagtta

SEQ ID NO: 1183 - DNA, 1655 bp, unidentified
  source 1..1655: mol_type = unassigned DNA; note = element_1694f91
  misc_feature 1..2: note = core
  misc_feature 3..282: note = LE
  misc_feature 283..1521: note = CDS
  misc_feature 1522..1655: note = RE
catgtatatgatgaaggagacgaaaggaatggatggccatccattcctttcgcgccatttccatcatgtgatatcatatgatgcagagaggcaaagggtttaggaaacggctattggtttcactgggcatcagcgcccgcttttgtgaccagccgttcctttcccacaatccctccagttctggaaagttgggccaatgcatcgccttgcgcccgtatcaactgcatgtctggtctttgtgggtgaaaagggctatgccaattgcttcggaaaggaaagtttatgaagaaatacgttttggccatcgatatcggaaaggggacgtcaaaaatcggactctacggactgaataccgagaacatgagaaccatcaagatcatgaagccgagaaatttcaagcatagtatcgaaggactcgatggtatcggaaaggccctggctggtattcccatggatcagataggtgtcatgatggagtcgacatatgtctatcagatgcctgtcgtggagtatttcaaaagaaaagggtttgatgaaatcactgtcgtcaatcctcttaaaatcaagaggacatgcggagacatccagaaggtgaagacagatatggtcgactgtgacaggatttcagcctactacttcttctcacagtggaaaaaacctctgaccgtctctaaggaacagagggaagcgagagaactttcaagatacatcgactttctacaaaaggaagctaccagggtaggcaataaaatccgtcagaacctgagtaacgtttttccagagctggaaagaatcggcgactcgaaaggctcccttttcaaggccggtttcctgaatcttatcgagaaaactccgcatcctttgtccatcaggaagaagaccaaagccggaatcatttccaccatggctggaaaaggcagacgagattcaagctacgccgagtatgcgtccctcatcatcgaagccgcaaaggaaagtcttttctcggccccggaaggaggaatcgaagcaagcctgatactgcccgatcttgcgagaagactaagggaactctcaaaacaaatagaagatgcagaggacaagctcgagtcaatgactaaagagatgccgctcttcaaggttctgcagtcattcaaggggataggcaaaggaatagcctcccatctcactgcggaaatatggtcgactgaacagtatgcaacgcctcagaagcttatcgcctcagcaggcataaatccgtcaagatctcaatcggccgcatccatcgaccgctacggaagaatagtgaaggccggcaacagatatatcaggcattggctgttcacggcagtcggatgcatattgcagcagaacggattgggaaggggagacaagagattagcagagtactacataaaaaaacatagcagcgaacgtgatcaccactatgttgcaactatagcctgcgcaaacaagctattaagacaggtcttttaccgttcccgtgatcttgctaagacgggacagctgattgtgaaatagacttgcaagaataatataacatgccaaaccctgcattccaacatcaaagaatgcattctttgatgttggaatattattgcacctatcgttctatcgcagttatttaaaaaattggtattgacaaattagaaagt

SEQ ID NO: 1184 - DNA, 1494 bp, unidentified
  source 1..1494: mol_type = unassigned DNA; note = element_1695f6f
  misc_feature 1..2: note = core
  misc_feature 3..247: note = LE
  misc_feature 248..1474: note = CDS
  misc_feature 1475..1494: note = RE
  misc_feature 13..244: note = bridgeRNA
ctaatcagttctgggagtgagctatccggcacactcctgctggtagccggccggcaggtgagcactctcggttcctggatttcgagtcctggtgaaagacagtgcccctgccggtaggccgggagagttgatcgctgctgggatgtcgtgccccgcgtgagggtggcgggaagcactgcttgattaggtcgctgatggttctcccactggctgcacagggtgatcggcatcgagagcgggaggaccgttgcgactgttcgtgggagatgactgggccgaggaccatcacgacatcgagctgatggacatggccggacgtcggctggccaaggctcgcctgcccgagggcgtggcggggatggcccggttgcacgcgatgctcggcgagcagctcggcgaggccgacgacgaggacgtggaggtgctggtcgggatcgagaccgaccggggtccgtgggtggcggccctggtcgccgctgggtacacggtgctggcggttaacccgttgcaggcggccaggttccgggaccggctgggggtctcgggtgccaagagcgatgctggtgacgcgcacgtgctggcggacatggtccgcacccacgcccacgagctgcgcccggtcgccggggacagcaccgaggccgaggcggtcaaggtcgtggcccgtacccacaagacgctgatctgggaacgcacccgccacacccagcggctgcggcacgcgctgcgcgactacttcccggccgcgctgatcgccttcgaggacctggacgccgccgacagcctggaactgctggccaaagcgcccactccggctcaggccgcccggctcacgaccgcacagatcagcggcgcattgaaacgcgcacgccgcaagaatgtggccgagaaagcggtggccgtccaggccgcgctgcgggccgagcacctgggccagcccgagatcctgaccagcgcctatgccgcctcggtccaggcgttgatcgcggtcctgaccgtgctgaacactcaggtgaaggccttgcaaaggcaggtggagacccattttgggcagcacccggccgctgagatcatcctgtcccagcctggtctggggccggtgctcggcgcccgggtgctcgcagagttcggcgacgactccgcccgttacatcagcgccaaggcccgcaagaactacgccggaacgtccccaatcacccgcgcgtcgggcaggaagaaggtcgctctggcccggttcgtgcataacgaccggctgatcgacgcgctgatgacccaggcgttcgccgcgctgaaagcctcgcccggagcacgggcctactacgaccggcagcgcgcccgcggggccgggcacaacgccgccctgcgtcagttggcgaaccggctggtgggcatcctgcacggctgcctcaaaaccggcaccctctacgacgagacgaccgcctggtcgcatcacgccgagaacgttgcggcttgacatttcagctcctgggatgt

SEQ ID NO: 1185 - DNA, 1463 bp, unidentified
  source 1..1463: mol_type = unassigned DNA; note = element_169fdd6
  misc_feature 1..4: note = core
  misc_feature 5..235: note = LE
  misc_feature 236..1447: note = CDS
  misc_feature 1448..1463: note = RE
gtcactggtccaccctctgtggtgcaggggctgtcacggttcctgtcactcgatgagggtcggggtgacggccggcgtcggtcgcccttcgagggccacgatgacaccgccgcccccttctctccgaggaccgacgaccggcaacagagggaagcgccgctgagcgccagtcagtgaccgcccgggggacgtcctcctcatcgagatcgtgctgccacgcgaccaaggagacgagatgttcgtaggaatcgactgggcctcggaggaacacgccgtgtgcgtcctcgatggcgagggccgagcggtggaccgcttcacgatcgcccacagcgccgatggcttcgaccggctgacggcccggttggcccgccacggtgaaccagccgttgtcccggtggcgatcgaacggcccgatgggcgcctggtcgaccggctcctggaagccggccacccggtggtgccggtgaagaccaacgcgatcaaggcctggcgcgaagccgaagtgctctccggggcgaagagcgatcccggcgacgccgaggtcatcgccgactacctccgacagcggcgaggccgcctccgcgagctgttgcccttcagcaccgagacccgagcgctgcgagctgtggtgcgcagccgtaccgacctcgtcgaacagcgtgtcgccgccgccaatcagctcgaagcggtcctcgacgcgttctggcccggggcgaaggccgtgttcgctgacatctggagccccatcgccctcgacttcctcgagcgctacccgaccccggcgtcggccgcccggctcggcgaagcccgcatggccgcgttctgcaccaagcacggctactccggacggcgctcccctgccgagctcgtcgaacgactccgagccgctcccgccggcatcgaggccggacccgaaaacgaagcccgccgagacgtcgtgctcgccatggtccgcgtcttgcgtgccctcgtccgggcgatcaaggacctcgaccgctccgttaccgcccacctcgacgagcacccagacgccgagatcttccggtcgctgccacgatcggggcagatcaacgccgcccagatgctcgccgagtggggcgattgtcgcgaagccttcgacagcccggaagccgtcgccgccctttgcggcgccacaccggtcaccaagaagtccggaaagcacgaagctgtgcacttccgctgggcctgcaacaaacgattccgcaacgccatgaccaccttcgccgacaactcccgacgagccagcccctgggcccaggcgatctaccaggccgccctcgatcgcggccacgaccacccccacgccgtgcgcatcctcgcccgggcctggatccgcgtcatctaccgatgctggatcgaccacaccccctacgacccccaaagacacggagccatcacacgcatggagcagcccgcggctgcatgaggttgacacagagggt

SEQ ID NO: 1186 - DNA, 1378 bp, unidentified
  source 1..1378: mol_type = unassigned DNA; note = element_16a2653
  misc_feature 1..3: note = core
  misc_feature 4..88: note = LE
  misc_feature 89..1117: note = CDS
  misc_feature 1118..1378: note = RE
  misc_feature 1088..1365: note = bridgeRNA
agatggggtggttgccgccctccccagacggcatcgcagtgtgccagagttgtgatctttagaggtcacacagcggagaggacggcaaatgaagaatataatgatcggggttgatctggcaaaaaatgttttacaactccacggggcgtcgatgacgggcgaggtgctgtttcgcaagaaattgtcgcgcgggcagtttctgcgtttcatgcagagccagccgacggctgttgtcgtcatggaggcttgcggcagcgtccactactgggcacgcgagttgatgtcgctgggccatgaggtcaagctgatcgcaccacaatatgtgcgccctttcgtgaagcgtcagaagaacgacgctgctgatgcggaagcgattgtcattgcggcacgacagccggaaatgcgttttgtcgaacctaaaacaccggatcagcaagcgcgggctgttctatttcgagcgcgagaacgcatcgtccatcaacgcacggaactggtgaacgcgctgcgcgcaatgctctatgaatatgggcatgtcgttcctgtgggcctcggacacgtcaaacggttggaagccatattgaacgacgcggctagtgacctccccgatctcgtacgcgaagaaggccatgatctcttggcacaaatcggtgaaaagaccgtcagaattgacaacaagacccagaagctggcctctctcgccaagcagaccgatgtggcgcggcgtcttcagactatgccgggtatcgggccgatgaccgctgtggcggtcgaagctttcgcgccaacgatggaaaacttcaaatcggggcgcaactttgccgcctggcttggcctcgtgccgcgacagttttcgtccggcggcaaggaaaggctgggtaaggtctcgagggccggccaggtcgacattcgtcggctgctgatcatcggtgccatggctcgcgtgaattgggcgagccgcaaggcaacatccactgatccctggatgatgcgtatgcttggaagaaagccccgaatgctggtggcgatcgcgctggcgaataagatggcgcgtatgatctgggcgatgctgacgcggcaagaggattatcggaatccggggttgctggcggctgcatgaatgcagctatcgtcgatgtcggccaacaggtgtgagaagtcgatgacctgaatgggcgcaagatcgaacgatccggctcaggaaaaccagtactgctcttcgagctcagagctcgtgaacaagatttggacctgatccgctgatcaccatcccggccagcggtcgctgaaaacgccgcaaatgaaggcctgacagaagaccgcattcgatcacacgttcaaaaggtaagaaacgacttgcacaacgggcggcaaccacaga

SEQ ID NO: 1187 - DNA, 1713 bp, unidentified
  source 1..1713: mol_type = unassigned DNA; note = element_16a2bef
  misc_feature 1..2: note = core
  misc_feature 3..68: note = LE
  misc_feature 69..1226: note = CDS
  misc_feature 1227..1713: note = RE
  misc_feature 1263..1480: note = bridgeRNA
agatgctatggggcgagcggcgaggacaatggcaccatcgtcgctccagcgaatcaatggagcgccccatgcagaagttgaacgacctgagccgatccctcacccctctcaacccggacggcacgctgatcgcggtaatcgagatgagtcaatcgagctggctcgtcgccggcattgttccaggcatagagcgccatccgctgaagaagcttgaaccgaacgagggggagttgctccgtttactgatgcgctggcgtgccgaggcgaccaaaatgggctgcacgatcacgcgcatcgctgtcgcgtatgaggccggccgcgacggattttggctcgcgcgctggctacgggcccgcgacatcgaaacctacgtcatccacccgacgagcgtggctgtatcgcgcgagcatcgccgcgcgaaaacagatcgactcgacaccgggttgctcaaacgcgtcttcatcggctggttgcgtggtgaaccagatcactgccacatggcagcgattccgacgcttgcggaggaggatgcgaagcgcccgaaccgtgagcgtgaggggatcgttcgtgagcgcacgcgcattgtaaaccggatgaagagctgtctggcccgcttcggtgttcgaaacttcaagccgacgttgcgcaaagcaccggaacgtctcgcaacgctggttacgccggagggggttcctctcccaccaaacacgcttctcgaacttcgtcgagacatggcgcgactgcgcttcgtcatggaccagatcaaggaggttgaggaggcgcgtgcgcaacggttggaacaggctcctcaggaaaagacgcatgcgatggtccgactgctcgcccgtgttattggcgttggcatcgaaacggcggacatgctggtgcatgagatcctgtcgcggagtttgcgggatcgacgagccgtggcgcgctacgctggtctcaccggcgcgccagacgagagcggcagcaaacggcaagagaaagggctcgccaaggcgggcaacgcacgagtacgccgcggaatgattcagttggcttggcgctttttgctcttccagaaggatagcgcattggcccaatggtatcgtacacggactgaaaggggcggcaaaaagcgcaagacaatgatcgtagctctggcgcggaaattgctaatcgccctgtggcgtctggtaaccactggcgaggtgccagctggcgtcgtgttgcgagccgcgtgaggggagaactcagacaggacaagctctcggagcccgacgaacaggacttcgtcggcatccgatgacgatccgaggtggcggtcacccgaagcaggccatggtgttgacaccggtttcgagaatgggtccgccgccgaggagcttcgccgccgatgcgcatgactgcatcatggtcaggtccacctggacctaccgaatacaaggttgcggcgcgatgatccgcgcccgatggcaagcccccctctgatcgtcgtcccgatcgcgtcaagcgtgccgtcgtgtcggagccgtcaaggtatggcctggccagggcggagcatgcggaaaggttggtgcgacggccaaccctgacggcccctgtgcgcgccgccgtgagcaaagggcgcgtcggaacgaagacacggctgtgagatcgaacaaagaaccgatgaaggagaaaaagatgcgctgcgctggcgaaaccccttgacaagaaacgccccataca

SEQ ID NO: 1188 - DNA, 1424 bp, unidentified
  source 1..1424: mol_type = unassigned DNA; note = element_16a778d
  misc_feature 1..2: note = core
  misc_feature 3..119: note = LE
  misc_feature 120..1160: note = CDS
  misc_feature 1161..1424: note = RE
  misc_feature 1184..1379: note = bridgeRNA
agatggggtattcggcttgagccccatcttcgacggatatgcatgaaggtgttgtgctccgagccaatgctagcgtgggaattgttcaacccgcaccgcatcaggaaaggacgcgcagcatgaagcactacgccggactggacgtgtctctcaaggagacttcaatctgcatcgtgaacgaggcgggttcaatctgccgcgagatgaaggtgcccagccatcccgaagacctcgttcgggctcttcaagatcccgcatggcggctggtccgcatcggcctggaggctggacctttgtcgcagtggcttttcagtggattggcgccagcaggcctgccggtggtctgcatcgagacccggcatacgaaggcgttcctcaaggcgcaggtgaacaagacggaccgcaatgatgctcgtggcattgcccagatgatgcgggtcaacctgttccggccggtgcacatcaagacgctgacaagccaacatcgtcgtgccttgctgatggcacgcaagctgctgcaggagaaggcggtcgcgattgagaacgacattcgcggtctgctgcgtaacttcggcctcaaggttggcatgaccggggctgtgggatttgacgtccggatccgggagctcgtagacggcaggccggaactggcagacatcaccgcctccctgctcgccgccaggcagatgttgcgggaggagttgtcccgcctccaccggaaagtgctggagatcacccgagaggacggtgtctgccggcgcctgatgaccattccgggcgtcgggccagttgtcgccctggcgttcaccagcaccatcgatgtgccggcccgcttccgaaagtcgaaagccgttggacctgtcttgggattaacgccagtgctcaaggagtccggggagagcaagcgtgttgggcaggtctccctctgcggggatggaatgatgcgagggttgctctatgaagccgcccaagtcctgctgacgcgggtgaagaagtggtcctggctgaaggcatgggcgatgaatgtcgctaagcggcgcggcattcggaaagccattgtcgcgctggcgcggcgcttggctgtcctcatgcaccggatctggagcgatggaacggagttccgttggacgaaagatcctcgagtgcagccatccctttgatcgcccgttagggagaagacaccgaagttccgcctgccggtggaaagctgtccctcgcaggacgatggatgaagtaagttcgtgctggcctttgcgtcgattgccacggtgatcaatgcgctcatcagattgtgctgcctcatccttctaatcccatcatgggagggcaaatgccgatcccggagagaagcaagagctcgcgaggaatgcgctataccgaagggttgaaaagagaatgcttgacgtggaggtgccgaatagaga

SEQ ID NO: 1189 - DNA, 1355 bp, unidentified
  source 1..1355: mol_type = unassigned DNA; note = element_16aacc0
  misc_feature 1..2: note = core
  misc_feature 3..80: note = LE
  misc_feature 81..1106: note = CDS
  misc_feature 1107..1355: note = RE
  misc_feature 1123..1342: note = bridgeRNA
tgatgtggtggacggcctccgctcccgacatcgcaatatgccaaagtgtggcagtcgaagccacatcaggagaggcgtccatggagaaggttaccacaattggtctggatatcgctaagcaggtatttcaggttcacggagtcaatggtgctggcgcgatcgtgtgccgccgcaggcttcgccgcgacgatgtcgttggattcttcaaggcattgccgccgtgcctgatcggaatcgaggcctgcgcgaccggacaccactgggctcgggttctcatggcactgggtcacgaggctcggttgatgccggtgtcttacgtcaagccttacgtgaagcggcagaagaacgatgcgaccgacgccgaggcgatctgcgaggcggtgacgcggccaactatgcgcttcgttccggtgaagagcgaagagcaacagagtgtgctgatgctgcatcgggtccgcgagcttttgatccggcagcggacaatgcttgtgaacgccttgcgcggccacttggccgagttcggcatcgtgacgcgacaaggcattgccggcgtcggaatgcttatcgcgttggtcgaagatggtgatcacgatgtcatcccgccgcttgcgcggtctgcacttctcttgctggtcgggcagttacgggaggtgcacgagaaagtcagcgagatggatcgccaaattcatgcctggcatcgctcgaacgaactgagccgtcgccttgagacgatccctggaattggcccgatcactgccagcgcaattgccgcgacagtgacagacgcctcgctcttcaaatccggccgacaattggcggcgtggataggcctcgtaccgcggcagaactcatcgggtggcaaagaccgtctcggaaggatcagcaaacaaggcgatccctatctccgccggcttctcgtcgtcggggcgcacgcggtcctccgcttcagccggaacggcaaaacggcgccgacgcgttgggctgccgagcttctggcgaagaagccgtacaacatcgtcgctgttgctttggcaaacaagatggcgcggatcgtctgggcgttgatggcgacgggcaggcgctttgaggctgcccccgccctttgataactcgggacaattcagaagttggtgaggtgctgatggtgtgatggcgaacggtcgagccgggattggagaaacccgatcagtgggtgtcgcttgaaagcgcgttgacctgtctgggatccgatccgcgggctacatcagggccagcggcatgaacacgccgcaatcaaaggccgaatacatgcctgcacccgaccaatccgccagaaacaccaacttgccccttgccacgcggaggccgtccataca

SEQ ID NO: 1190 - DNA, 1571 bp, unidentified
  source 1..1571: mol_type = unassigned DNA; note = element_16be2e2
  misc_feature 1..2: note = core
  misc_feature 3..246: note = LE
  misc_feature 247..1425: note = CDS
  misc_feature 1426..1571: note = RE
  misc_feature 3..226: note = bridgeRNA
ctcgtattataaagtagtagtgtttacagtccctctccaaggactgtatgctatactgttggagatactgtggattgtttttcgcctcctaccacttgatggtttcagaaaggctacaaccacagtctctttgtatatttgttgatcagttagataccgcatgacggtttatttagaacgaggttacaatcacaaggagtaactgtggctctaaacagtatcaaatttattcaaaggagatttcttatgatttacgttggaattgatgttgctaaagacaaacacgactgctttattacgaactcggatggagaggtattatttaagtcttttactatctctaacaatcgtgatggttttgaaaccttatttcagagaattgaatctgtatcagatgatttaactaaaataaaagtaggactggaagccaccggacactacagttacaatcttctgggtttccttcttgataaaggtctgaccacctttgttatcaatccgcttcacacaaatctttacagaaaaagtctcagccttagaaagacgaaaacggataaagttgattcccgtaccattgccactatgatgatatctgacatgaacttaaagtcctactcagatacatcttatcacaacgaagagttaaagtcactcacccgttatcgttttgataaagtaaaggaacgggcaaagttaaaatcttctattgccagacttgtaaatatccttttcccggaaatggaagcacttgttccatctcttcatttggcttcggtatatgctttgctgttcgaatttcccggtgcctcccatgtggcttctgcccatctcacgaggcttacgaatctactttctaacgcctcaaaaggacgatacggcaaagacacttccatccttttccgtgataccgccagaaactctatcggctctgttatgcctgcaaaatctctggaactgaaacataccatcaaactcattcaggaattaacttctgagattgatgaaatcgaagcagctatcgaacggatcatggatgaagaaatccagtctccaatccttaccattcccggtatcagttaccggatgggctcaatgatcctcgctgagattggggatttcagtcgttttgattccgcagataaaatacttgcatatgctggaatgtctccctccacttatcaatcaggacagttagataactgttattctcatatggagaagcgtggttccagataccttcggtatgccctttacaatgccacaaaatatgtctgccactgggataaatcctttggtgcatatctggaaaagaaacgttcggaaggaaaacactacaacgttgccttatcccatgctacaaagaaacttgtacgtttgattttcgcaatggaaaaatcaggacaggcatacattcctgctgtgtaacttatctctgtaaatatctccttttagagtgcctacaatgacactctatttgtcatgcagttttcaaggttcaaaaatatctgaaatgcatttctgcaattcattcaaaaaactttcattttaagacttgacttttaatagttagt

SEQ ID NO: 1191 - DNA, 1433 bp, unidentified
  source 1..1433: mol_type = unassigned DNA; note = element_16c137b
  misc_feature 1..2: note = core
  misc_feature 3..120: note = LE
  misc_feature 121..1152: note = CDS
  misc_feature 1153..1433: note = RE
  misc_feature 1188..1387: note = bridgeRNA
agatggggtaatcggccggcgagcttgtggatagctgaagattttgggtgctgcgcttcaggctgatggtgaaacgaggtccgtgtgaacggcctcaagcatcagaaggagaagcgcagcatggaccattttgcgggattggacgtttcggtcaaggagaccagcgtctgcattgtggatgagacgggcaagattgtccgggaagtgaaggtagcgagcgaacctgacgcattggtggaggtgctgacgagcccctcctaccacttcaagcggattggattagaggccgggccattgtcgcaatggctttacaacgcgcttgcggaggcgggcttgccggtgatctgtgttgagacgcggcacatgagagcggtgctgaaggcacagatcaacaagacggaccgcaacgatgcgcgtggcatggcgcagatgatgcgagtggggctttaccgcccggtgcatgtgaagacgttacgcagtcagaagctgcggatgctactgacccatcgcaagctgctacagtcgaaggctatcgccatcgataacgacctgcgcggtacgttgcgcaacttcggtctcaaggtgggcatggtcgggacggcgaagttcgaggcccgcatcaacgagctggtcgagaacctgcccgacctggctatgttggtcgaaccgctgcttgtcgtccggcgggtgcttcgcgagcagatcggcgtcctgcatcgcagtttactggccatcgtgcgcgacgatgacgtgtgccggcgcctgatgacggttcccggtgtcggccctgtggtggcgctgacctatcgcgccaccgtcgacgtgccagctcgctttaagaactccaaggcggtcggggcggtatttggactgacgccatcccggcatcaatccggcgagagcgaccgccccggtagcgtatcacggtgcggagacgagatgatgcggatgatgctctacgaagcagcccagaccatgctggtcgtttcgacgaaatggtcctggctcaaggcctgggcgatgaagattgcccggcaccgtgggatgaagaaggcaatcgtggcgctggcgcgtcggttggccgtgatcatgcaccgcatctgggtagacggcaccgaattccagtggaccagagaagtcacagcggcatgagggccgtgcaggatcaaatgcgataggaggatactcgagttccaccaagcagtggaacgatgtccctcgcgggacgatggatgaggtgagttcgtgcggcagcttggacctaacgtcagcttgacggtaaggccgcggtctagattgttccacctcgtcctcgaaccccatactggaacggcctagtgccgattccgaagagaagcgcgagcccgtgagcgacattgacactgcagtcttggatggcctgaaagtgcttgaccccaacggccgattagaga

SEQ ID NO: 1192 - DNA, 1291 bp, unidentified
  source 1..1291: mol_type = unassigned DNA; note = element_16c2f82
  misc_feature 1: note = core
  misc_feature 2..211: note = LE
  misc_feature 212..1183: note = CDS
  misc_feature 1184..1291: note = RE
  misc_feature 34..202: note = bridgeRNA
tcttaagtttgttttttaataaattagacacttaaacagaaagaataaaagagagaattaaggttactatatacggtgaagcattagacttcgacaacattgataatcctctctctcttctactaaaaatcacgttcagttctgtgagactttgatctcgatttcaagttgttgtgagttcagtagcttattctttcataaatcaatacttatgaataaatataatgaaacttttggaattgacatcagtaaagatgtttttgattgttatggcagtgttcaaggccatttacaatttaacaatagtgaaaccggttttaagaagtttcaagaactactatctaaagatagtttggtagtgatggaagctaccggttattatcattacagatttgcacaatatctgtataagaaaaaagtagctgtatcagttgtaaatcctttatccgtaaaacgatttatccagatgaaattagctaaagtaaaaacagataagagtgatgctaaggccatttgtgagtatggattaatccaagaagttcctttatataatgcacttaccgatactcaaagtgaatgtttacaactctttagattgatggatagttttttaaaaaaacgaacagccaccaagaatgaaatacatggcgaagaagtcttgggagttccttcaagttgggtctatcgttcattaaaaagagataagaaacatttagacaaagagctcaagggaatagaacaaaagcttcttagtttggtaaaacaagaccaacagcaacaattaactttattgcaaagcatacctggaataggaatgaaaacagccttatttttaattattgttacagacggttttaagaagtttgaaacagcatcacaactatgtagttatgtaggaatcactcccacaataagggaatcaggaagtagtgtaagaggtcgagcaagaattagtaaagttggaaacaagaaattgcggaatctacttttcttatgttcatttacagcttgcaaacataacaaggggtgtagcgaaatttacgatcgaatcgtaaataaaggaaagagcaaaaaattagccttaatagcagtctctaataagctgctaaaacagtgttttgcaattgcaaaatcaggccatccttatgatccaacttttgtatctgtatttgtagttaaatagtaagtaaaatctaaaaaattgaataaatgaagcttaattataaagttaagcctagaataataatgtacaaaattaatgaagaaaagagttgttttttagctcagttct

SEQ ID NO: 1193 - DNA, 1657 bp, unidentified
  source 1..1657: mol_type = unassigned DNA; note = element_16c8a5a
  misc_feature 1..2: note = core
  misc_feature 3..277: note = LE
  misc_feature 278..1498: note = CDS
  misc_feature 1499..1657: note = RE
  misc_feature 29..240: note = bridgeRNA
ctcgtatattgttttcgccacttctcgcgcagtggccgcgctctttcccttccttttcaaatatgggataaagggcgagtagagggcggagggcgcagaacgacctcctgggatttggccttggacgacaggattgcgcctccgacccgcagcgtgacgtggataaggcaggatggccgttcggggctggatatctgacgaggttgcgtgctgcgggaaccgaaggaagacttccgctctcgcagaaggtttcggacctcaataataggaggcacgcatgcgctacgtcggaatagacatagcaaaaaaggatcatcagatagccgccgtcgatgagtttggcaacgtcatcctcaagtcgttcagcgccggcaacaacgaatctggctttgccaagatcgccgaaaaactcgaggctgcccgcatcgagtcggatgagtgtctcgtcggaatggaggcgaccggccactactggatctcgctctgggagttcctcgacgccaacggctacgaggtcgtggtcatcaaccctatccagaccgacgcattccgcaaagtcgactcgctccgcaaaacgaaaaccgacgccatcgacagcgtgctcatcgccgagtacctgcgctttgcgaaccccgagtcgtccaagatggccaatccggacgtcgagcaactccgcgaactggcacgcttcaggagctttctcgtagagcaggcgacccagcttaagaacaaggcgatccgcgtactcgaccaagcattcccggagtacggaaagttgttctccaacacgttcggcgaggcatcgaaagccctgctcaagcagtgcccggcacccgaagaggtcctcgcaactgacatccgcacgctcacgcgcatcctcaaggaaaacagtgggggcaattgcggtcgggccaaagccgaggcagtcaaggacgccgccaggagctcgatcggcgccaagttcggcgcccgtgccctgtccttcgagatcaagttgctggtgaagcggctatcgttcacccaggtccaaatcgaagaattagaggacgagatatcagagctgctgcaccgttcggatggtcactggctcacgaccatccccggcatcggagactcgctcgcggcctccatcgccggggaaatcggcgatcctgaccgtttcgagacccccaagaagctcatcgcctacgcgggcatggatgcctcgaagtaccaatctggcgcgaatcaggacacaaacgggcacatgtctaagcgcggctcctccgagcttcggcgagcactcatgctggcagccgacaaggtgcgcatctacgatccctacttcggcgagtactacgactcaatgaaagcccgcggtaaacatcactacgtcgccctgtcgggagtcgccaggaaacttgccggcgtctgcctgtcgctcatgcgcgagcagcggccctacgagtccgaacctcccgagcatcacctgccaggtcatcttcagcgccaagcctaaatttgggtaaaaatcgcggaacttataaaccgccttctccagggcggtttatatcctgatgcctcgaagcagcaaatccacgtgcctttctattccatattctattatcaacatcctatctaaaagctttggtttagttcttgacttcaaatagcaggt

SEQ ID NO: 1194 - DNA, 1380 bp, unidentified
  source 1..1380: mol_type = unassigned DNA; note = element_16cf76b
  misc_feature 1: note = core
  misc_feature 2..78: note = LE
  misc_feature 79..1125: note = CDS
  misc_feature 1126..1380: note = RE
  misc_feature 1147..1371: note = bridgeRNA
taatggaatggtccggccgtgctcctgccccgccagcgattgaagctggccaggggcgccaaagacaaggagcacgccatgtcgcagaatctcgacagagcgatcgccgtcatcggcatcgatatcggcaagaactcgtttcacatcgtcggcctggatgggcgcggtgccattgtgcttcgtcagaagtggtcgcgtggtcaagtcgaagcacgccttgtcaatatgccgccgtgcctgatcggcatggaggcctgtgttggcgcgcatcacctcagccgcaagctcaaggcgtttggccacgatgcccggctgatgccggcgaagtatgtgcgcccgtactcgaagggacagaagaatgacttccgcgacgcggaggcaatcgccgaagccgtgcagcgtccaacgatgaagttcgtggcgaccaagaccgccgatcagctcgacctccaggcgctgcatcgcgtccgcgagcgattggtcagtcagcgcaccggcatcatcaatcaaattcgtgccttcctcctggagcgcggcgttgcggtccgacaaggtctgcgattcttgcgcgctgagttgccgcgcattctcgctacgccacccgatgtgctgtctcctcgcatggtgcgtgtcatcgagggtctggccgaggactggcgccggctcgatgagcgggtcgatcatttgtccggggagatcacagccctggcgcggcaggatgtcggttgcgagcggctgatgagcgttcctggcatcggaccgatcatctcgagtgcgatggtggccgcgatcgggaccggcgatgcgttctccaagggccgcgacttcgccgcttggctgggcctcgtacccaaacagatctcgaccggagatcgcaccatcctcggcaagatatcaaagcgcggcaatcgctatctgcgcgttctgttcgtgcaggcggcatgggtcgtgctgatcaagccgaagagctgggagcgccatggactcaagcactggatcgaggcagccaagaagcgactgcaccgcaacgtgcttgcgatcgcgctcgccaacaagctggcccgcatcgcctggagcgtgttggctaacggccgcatttttgaagcaaggcttcaagccgcgtgaacattcgcaggaagtccagttacctgccaaggtctgcgagaggatgagacgagatggaggttcggtcttcccggcgcatgcgaacactggtgacccaaatggcccagtcgaggcctgtccgctaatgagctcgcacgcgcgctgatatccatgatggccaggagcacgctccaaagaaaggccggatacattgatgcaagaccgctcaccaccggctcgacgaaatcttcttgctacgcacggccggaccataca

SEQ ID NO: 1195 - DNA, 1649 bp, unidentified
  source 1..1649: mol_type = unassigned DNA; note = element_16d868b
  misc_feature 1..3: note = core
  misc_feature 4..296: note = LE
  misc_feature 297..1559: note = CDS
  misc_feature 1560..1649: note = RE
taatctccattccgccgcctttcagttggcggcacaaatagtaatgaaagtcttccaattctccacgttattgatacaataattcttaaagaagctatactacaaagcacggggaggtaagttgtaaagactttcttcggttttagacagcattgtaatcagtgtaagttccatctttcaagcacaaataagtggatctataagaccgtacagtaagaattgttttaacttctctgttatattgtgtggtggaacagtcaatggcttctttatcatccacgaaaggagttttttatatgaaagttgtttatcaaacctgttgtggcgtcgatgttcataaatcctttctcgttgccacaatcatcaagaccacttccggcatagaaccttcttatcaaaagaagcgtttctctaccttcaacaattctatcctgcagttcaaagactggcttctaaaaaaccattgccgtgatgtctgtatggaatctaccggtaaatactgggttcccgtgtccaaccttctcgaggacgaaatcaacgtcacgatcgccaatcccaaatgggtgaaggccgttaatgggaataaggatgatgtaaaagattccaaatggattggggatttgtttcgattaggtctggtccctggcagttacatcccttgcaaacctatccgtatcctacgtgaatttacaaggtaccgctacaagctgacttgctgccgatccagtgaaaagaacagatatcagaatgcgcttactgtctgtaatgtcgcattagattcggttgtttccgatatctttgggaaatcagctacatctgttattgattacctaatcgagcaatccggcaattccgtcaaccacgaagaaatagcctccagactcctccgttctcttaagaagaagtctgacagtgtcattgaatccatcgaagggtaccagatgactgactcccaaaaataccgcatgcgccttgtctgcgcacatctggattatatcacatctacgatcaatgatatagacactatgcttgattctttggttgctccttatgaaaatgctgtccagttactgtgtaccattccgggtgttgatcgtaacagtgcaattactgttatctccgaaatcggtacggatatgactacgttttccaactccaaacgcttatgctgttgggcgggacttactcccggcagcaataaatctgctggtaaaaagaaatctgttcgcataacacgtgccggtgtctacctcaaacctgcattggtgcaagctgcccatgcagccgtgaaatcgaataaatctccttactacaaacagaaatatgagcgtattatgaagcgccgtggtaagaaacgtgccatcattgcaatcgccaggatgatccttaccgctatctaccagatgctgtctaccggtgaagcgtggaacccgaccgatttatacaaaattgatatgcctgaacctctgaaagagaaacagaaggaaaaggctatcaaacaggctaagaagctgctcattcgtgaggggattctttcggaatcacaattcgcttcttaaatttttacagcaatacattttttttaggctgctgtaagacagcttgttaaagtgcgccatttattggctgtcctctactttctttcacag

SEQ ID NO: 1196 - DNA, 1436 bp, unidentified
  source 1..1436: mol_type = unassigned DNA; note = element_16d951b
  misc_feature 1..2: note = core
  misc_feature 3..122: note = LE
  misc_feature 123..1157: note = CDS
  misc_feature 1158..1436: note = RE
  misc_feature 1190..1389: note = bridgeRNA
agatggggtaatcggcctgcgtttgttgtggattaactgaagattttgggtgctgcgcttcaggctgatggtgaaacgaggtccgtgtgtgcggcctcaagcatcaaaaggagaagcgcagcatggagcattttgctggactggacgtgtcagtcaatgagacgagcgtctgcattgtggatgagacgggcagtatcgcgcgggaagtgaaggttgcgagcgaaccggacgctctgctggcggtactgacgaccggtgcttaccacttcaagcggatcggactggaagccgggccgctgtcgcaatggctgttcagtgcccttgccgaagcaggcttgccggtgatctgtgtcgagacgcggcacatgcgggcggcgttgcaggcgcagatcaacaagaccgaccgcaacgatgcgcgcggtatcgcgcggatgatgcgggcggggctctataagccggtgcatgtgaagacgttgcgcagtcagaaactgcggacgttgctgacccatcgcaagctgctgcagtcgaaggcgattgcggtcgagaacgatctgcgcgggacgttgcgcaacttcggcctcaaggttgggatggtcgggacggtgaagttcgagcaccggatcagggagctggtcgctgatattcccgacctagcagtactggtcgagccgctgctcgttgtccgccgggtgctgcgtgaacaaattgccgtgctgcaccggcgcgtgctggcaatcgtcaaggacgatgaggtgtgtcggcgactgatgacgatcccgggcgtcggcccggtcgtcgcactgacctatcgcaccaccatcgatgtgccggcgcgctttcgcaactccagggcagtcggggcggtgctggggctaacgccctgcaagtatcaatccggcgagagcgagtacaccggcggcatatcaaaatgcggcgacgagatgatgcgcgtcatgctctatgaggccgcccagatcctgctgatgcgcgcaacgaaatggtcctggctcaaggtctgggcgatgcagatcgccaggcgccgcggcctgaagaaagcgatcgtcgcgctggcacgccgcttggccgtgatcatgcaccgcatctgggttgacggcacggagtttcgctggagccggcaagaggctgccgcagcatgacaacgcaaggtcacaatcgataggagaaaacgcgagctccaccgcgcggtggaatgatgtcccttgcgggacgatggatgaggtgagatcgcatgtctgcttggacctgccgtcacttgacggcaaggccgacccaaagattgttcccctcattctcgaatcccatactggaagggccatagtgccgattccgaagagaagcacgagcccgcaggcgacatcgacactggagtggctggatagcctgaaagcgcttgacccaaaccggccgattagaga

SEQ ID NO: 1197 - DNA, 1271 bp, unidentified
  source 1..1271: mol_type = unassigned DNA; note = element_16d9c88
  misc_feature 1..2: note = core
  misc_feature 3..86: note = LE
  misc_feature 87..839: note = CDS
  misc_feature 840..1271: note = RE
  misc_feature 862..1080: note = bridgeRNA
cgatggaatggactcctcctgccgatgcggcatcatcgtgccaggttgaaacggcctcttgagggccacggtcaggaggaatccaaatggagcatacgaccatcgcggttgatcgcgcaaagtccgtgtttcaagtcgcggtgtcccaccggcctgggcgcgttgatgacgagcggcggctcacccgcgaacgctttctgaggttcttcgcgcagcagccacccgcgacgatcgtgctcgaggcctgcggatccgcgcactactgggcgcggcagctgcagcccttcgggcagaccgtccggctgctccctccgcatgacgtccgtcgctatgtccgtcgaaacaagaccgaccggacggacgccaaagccttactggaggccaacatgcgagccgtcgaccgtcagctcacgtcgctggtgcgacaaccgccggacgtcacgctcttacagacggtggccggcgtgggcgtgctgaccgccaccgccctcgtcgcgctggtgggcgacattcggcgctttcgctcaggccgccactttgcgagcttcctcggcctgacgcccaaggaagactccagtgccgggcgtcggcgcctcggcgccatcagcaaacagggcgacgtctatgtgcgcatgctgctgacgcacggcgcgcgctcgtttgtctggcacgcgaagacggcggcaccgcccacgtcgctgcagcggtgggctgtgcagacggagcagcggcgcgggcacaatgtcgcgactgtggcggtggccaataacctcgcccggatcgtgtgggccgtgtgggtgcagcaacgcccattcgcggccgagcaccggcccgggtaatcgcggatcgacggtcgctcacccggaggactgcaccgagcgcatcgcaccatggcgcaccggtcggaccggcgcggggcaccgccgataactcggctggccgtgaggggccgtgcaagcgattggctccccgcgcgcggatgtccatgatggcccggagtcgagacggctccaccgacgaggccgaagatacgactgcagtccgactcttcgcgcagccatccgggtcacgcgaacagccacggcgctccgcgcgcgtcaaggccttgcggccgccttcggcggtgcgctccgcgcagccttgaccgtgctcccgccgcggcctgagtacagctatgcgacgaaggcagagccttcgtcggtgatccatcaacgggaggacttagcagaacgtttactcggcgctttcttcttgacggaggagtccagata

SEQ ID NO: 1198 - DNA, 1685 bp, unidentified
  source 1..1685: mol_type = unassigned DNA; note = element_16e8fe9
  misc_feature 1..3: note = core
  misc_feature 4..596: note = LE
  misc_feature 597..1541: note = CDS
  misc_feature 1542..1685: note = RE
  misc_feature 45..299: note = bridgeRNA
cccattacgttgttagcagttccgtttgaggcaaccgttgattcatagtctattccctgcttcaggggtgggttatgtttgttccgttcccttattcctttcgaggagatggaactagtcgctggttttggtatggcttattcctgtccctgtctgaaaatgatccgggtggtgatgccgccaaaggcagtgacatactctcaacagctcaataggaacctgacccaacgcaatctggtgtgaggtctgaaaagtaatgtggatgccagcgcgaagtatgtccgacacccagcgatgaaatgacccaattttcgtttcaattcgctaggaggttaaagatgacatacgactatgtcatcgggatggatgtcggcaaatatttccaccatgcctgcgtcctcgattccaagggcaatcaagtcctatctaaacgcgttaaccagcacgagcagtcgctgcggaagctcttcaagtgctacgcaaccaatgaagccaaaacgctcgtcgtagttgaccagccgtacaatatcgggcggctaaccgtcgcggtcgcctaagatatcggcgtagacgttcgctacctccccggactagccatgcgacagctatcacgtattcatgcgggtaattccaaaactgatgtccgtgatgtttacatcattgcctgcgctgggaaatatcttcctgaatcactacgccaggtcgaccgagtagaagaagctttcatccagctaaaggtactcaacggtatcgatgaagacctcacccggtcctatacgcggctaatcaaccagatccgttccgcactggttggaacatatcccgaatttgaacatgtgctgcgtgggcagatgattcaccgaaaatggatcttgcacctgctagccaaatacgcaggaccgtcaaagatcaagcgcttaggcaaagcccgggttaatgccttcgcacgcaaacatcgtgcgcgtaatcccgaaccagttactgacgcaatatttgtcgccattgctggccaatcagtccagatcgcaggtgcgaaatacgccgaggtaggtgtgtccatgtcggcaaaagatgcgctgcttaaacttgagcatcgcaaggaaatagaagccgaagtcaccgagctcatcgacgaaatcccgcaaacacaactactactatccatgcccgggctaggaccaagatccgctgcacaaatcctcatgacggttggcgatatgtccgattttcctaccgccggccacctagcttcctatgctgggctatcatctaggaccaaccaatccgggacatcgataatgtccaattcgctcaaccgcgccggaaacaagaaattaaagaacgccctatggcaatcgtcttttgcatcgatcagattccacgagcgttcacgacaattctacgaacgaaagcgaaacgaaggcaaaaggcgtaacgccgcagtcgtagccctagcgcgccgacggctcaacgtcttgttcgccatgatggaaaatcacgagttctaccgcgagccccagtcggaggtcaccgccgcataaacacaccactaccagcaaagccgattgggacatccaaaccggctaatactcatgcccgcaaaacaacaccacagaaacaaaccagacatcttgactaccccttcaacccacacccacaaggctgacaaactatataggaacacc

SEQ ID NO: 1199 - DNA, 1406 bp, unidentified
  source 1..1406: mol_type = unassigned DNA; note = element_16edf85
  misc_feature 1: note = core
  misc_feature 2..303: note = LE
  misc_feature 304..1353: note = CDS
  misc_feature 1354..1406: note = RE
  misc_feature 87..270: note = bridgeRNA
ctttaactttgcagctgtaaactaagagtcttaattactcttaatattaaaacgttaaatagtacgataaatatgataagaatatcagtttttacttacctttgttgtataaaggaaggattaactgccagaggtcaacccagttttgtcgctaggcctaagcccatgagtcgttgatggccctctggattaaagctgcaaatgccagataggaagatagactcgaagtctaattaaagtgatagtcactcacagctttctctcagttaatcgcttccataattttaaaaccggtacaaaggtatgaaaaaaattattatcggcatcgacgtttctaaagaaaagattgatgcaagtgcgattgacgtgagaaacagccagttgggagtgctaaaactggactatcaggcattcgagaatcgcccgatgggtttccgtcgtatgcttgtctgggccaggcggctcctcaagggtgttaccctggaagaaattctgttctgctgcgagacgaccggaggctacgacagaagtctgtgcgactacatctacgccaagggtcttgacatctggcgtgagagttcgctacagatcaagaaaagcagcggccttcgcaagggcaaggatgacaaggctgactcgctgaccatcgcagagtatgcgatgcgccacatagacaaagccgtcagttacatctctcccagtgagactgtgcgcgagctgaaagcactgttgctctatcgtcgcaagctggaacaggagaagacctccaagaaggtacgtgtggctgaactgaagtctacggctgccaagagcaggtcagtgagctttatcctccgagacgcccagaagagtatccgggtactggagaaaagtatcaaagactgcgaaaagcagatcctggctttgtatgacagtgacgaggaactgaagaagagttacgaccaccttatctccatccggggaatcggtatcgtaaacgcgacagcaatgattgcctattcaaataacttcaagaacatcacatcatctaggaaactggcctcctactatggaatagctccctttagggaaaggtcaggaacgacgattgacaagaaggcgatggtgaagtgctactccagttcgatgctcagggcctatctgactcaggcagccgagaacaccatcagggagcatggtatctatcatgactactacacacgattgagtgcgagaggtaaatgtcatgggatagccctcaataatgtcaagaacaagctgcttcatctgtccctttcgctgataacgaatgacatggattacgaggaaaaccatgaggttctaagagctattaggaaggtgcaagcgggataattttcagtatatacattttttaacttaattaatttggtaaatatcataggaag

SEQ ID NO: 1200 - DNA, 1631 bp, unidentified
  source 1..1631: mol_type = unassigned DNA; note = element_16f7998
  misc_feature 1..2: note = core
  misc_feature 3..259: note = LE
  misc_feature 260..1474: note = CDS
  misc_feature 1475..1631: note = RE
  misc_feature 76..230: note = bridgeRNA
cctattagctatacttgtgaggagtcagccgatggggtagactacaagcggtgagcagccacttgccaggctaaccccatcggagactcgcccgggatcagaggaccgcgtgcccccagcgccgcgagcgccacccttggatggtccccccgggctagccggatggcactgtcgaaagcgtgctgcgctacgagcgccataataggaacacggtagtccgcatactccgatgggcacaagaacccagaggaggcgttcaatgttcaagttcgggattgactggagtgaacagcatcacaacctgtgcattcgcaacgacaaaggtgccattgtgagccaggtcgagttcaagcacaccctggcagggttccagcgcttcgacgacgagcggcgcaagttgggtgtgccgcccagcgaatgtctagtcgccattgagaccgcctacaacctgctcgtcgatttcctgctcgaccgtggctacctcgtctatctgatcccgccccaggccacaaaaggctaccgcaatcgccagcgtagcaccgacgcccataccgatgacaccgatgccgctctcctatccagcatcctccacaccgacctggacagccatcgccgtctgcagcccaactcggctctgacccagcagatcttggctcaagtgcggttcatcgacctcctgcgccgctctatccagcgccagaccaaccaactgcgggccgtactgtttcgggtctatccccaagctctgggcctcttcggaaaactcaccgcccagatcaacctccatttcctcatggcctatcccacggcccaggaagcccaatgcctgactcgagctgcttttgaggctttctgtcgagaacatcgttatggccgggcgaatctcatctcgcggcgttacgctcacttgatggagcctgccccacaagcgaatcccatcgcggtggcagcctatcgagaccagatccgcatcttggccgaactgctcctgcctcaggtactccgtcggacggaagcgctctcttgcctggctcagctcttctcccaacaccccgatgacttcatcttcgagtccctgcctggagccggcgagctcctggctcctgctctgctcgccaagttcggtgaccaccgggatcgcttccccacagcggccggcgttcaggccctggccggtacctgccccgtcaccaagaagagcggcaagcgcaaggtcgtcctcttccgtcgtggctgcgatcgtgagttccggcgcattgcccagcagttcgccaaggcctccgtccgacagtcgggttgggccttggcttactggcgcgatgtccgcccccgctgtcgctccgactcagatgcataccgccggctggccaatcggtggctggccatcatctggagaatgtggcaagacggcaaggcctacgacgaatcgtaccacatacaacaacgtgctcagcgtcgccgtcctaggtcctagccctgaagtacccgtgaatccgttataggggttcgatgacttggcaagtcaaaggctcaccgaagaagattggtatctgaagcgaggtgcaattatcgtaaagcgccgcgttgcttccgcatgcgcatcggccactgcgggacttgacaaagcgtgt

SEQ ID NO: 1201 - DNA, 1395 bp, unidentified
  source 1..1395: mol_type = unassigned DNA; note = element_1700337
  misc_feature 1..2: note = core
  misc_feature 3..122: note = LE
  misc_feature 123..1157: note = CDS
  misc_feature 1158..1395: note = RE
  misc_feature 1175..1390: note = bridgeRNA
agatacggtaatgggccgcgcctctggttcgactggaggagtggctgtcccccgatcatgatggagtgacggggtttcaggtttggcgcctcgacgccccgctagcctgatggaggacagccgtggagcattatgccggattagacgtgtcgttggaactgaccagcgtgtgtgtggtggacgcacgaggcgagatcgtgcgcgaagccaaggttgcgagcgaaccggaagcgctggtccattttctgtcatgccaggacctggagatcgttcgtgtcgggctcgaggcaggtccgctatcgcagtggctccacgcaggactggttgcggccggcttcgagacggtgctgctcgagacgcggcacgtgaaggcggcgctgtcggcgatgaccgtgaagaccgaccgccgcgatgcacgcggcattgcccagctcttgaggctcggctggtaccgaccggtgcacgcgaagtcggccagcgcgcaggaggtccgcgcactgctcaccgcgcgcaagctcatccagggcaagctgctcgacgtcgaaagcggcatccgcggtgtactgcgcgggttcggcctcaaggtcggtccgatcagccgcggccggttcgagatgcggatcctcgagctggtcgatggccatgccatgctcgaggaagtgatcggggcggtgcttgctgccaggactgcgctcgacactgagttcaagcgccttcaccgtgcattgctggcgcttgttcgtgatgatcctgtctgccggcagctgatgagcgttccgggcgtcggcgcgatcgtcgccatcaccttcaagagcggcgtcgatgatcccacgcgcttccgacgctcgcgcgatgtcggtccgcactttgggctgacaccaaggaagtaccagtccggcgagctcgatgtgaccgggtcgatcagcaaggtcggtgatcgcatggtgcgcaccgcactctacgaggcggcaagcgtgatgctcacacgcagcgtccgcttctcggccctcaaggcctgggcaatggcggtggcgaagcgtcgcggcaccaagaaggcgtgcgttgctttggcgcgcaagcttgccgtgatcctccaccgcatgtgggtcgacggcaccagcttccgctggtccaacgaggagaccgcaatcgcataagaaggagagctttaaacgatcgtgcaggcctacggtctgcgccaccgaggtcccgtcgctgggacggtgaagttggtgaagccgcaatgtcagcagtagctctagagactacgcttgaaagatgggctcaccgcttcctctgaccgtatgatgtggcagctcaagctgaccacggacagaagcaaggtaccggcggcaggattaacgggggcagcttgacagaagggcccattacaga

SEQ ID NO: 1202 - DNA, 1586 bp, unidentified
  source 1..1586: mol_type = unassigned DNA; note = element_170469d
  misc_feature 1..6: note = core
  misc_feature 7..137: note = LE
  misc_feature 138..1250: note = CDS
  misc_feature 1251..1586: note = RE
  misc_feature 1278..1541: note = bridgeRNA
gtgccggcagagacgatatgagcaggacataaaaacattgagagcccctgctgcatgaaagaccgcggattaggccgacaatggtgagtgtctaatccaaccgtggcggccacgccgcattcatggaaggggctcccatgctcgatactaccaccttcgtcggcctcgacgtccacgcccgctcgataaaggccgtctccctcgacgtcatgaccggggaggtacgcgccgcgaccttcggctacgacgccggcgccgtcgcggagtgggtccgctccgtggaccccgaggccaggtgcgtgtacgagtccggggtcacgggattcgacctgcagaagaggctctccggccttggggtcgactgcgtggtcggcgccgtctcgaagatgatcaagcccagcgcggacaggcgcaggaagaacgaccgcaacgacgccgagttcctcgcccgcatgctgtcggtcggcaacgtggtcgaggtgtgggtccccgacgacgagtgcgaggccgcccgcgacctgaccagggcgctcgaggacgcgagggacgacccctcgcgctcgaagcagcggctctccaagttcctgctcaggcacgggctcgtcttcgacgagaggacgcccaccggccgcaggaagggcaactggacccgggcgcactggtcctggatcgagtcgatagggttcgcggagggggccgacaacgacgtgctcgcctactacgtcgacgcggtcaggcgggcggcggaggacaaggcgcggctcgaggggctcgtcgaggccgagacccgcaagcccaggtggaggaagagggtcgactccctccgctgcctcaagggcgtcgacaccgcgacggccgccgacctcgtgttcgaggccggcgagttctcgaggttcaggaacgcccgctcgttcgcggcgtgggtcggcctgacgccctccgagcactccagcggggagagcgaccgcaggggcgcgatcaccaaggctggcaacaagcacctgaggaagacgctggtcgaggccgcgtggcactacctgacgtgctcggggcggccgaaggacctcgccaagggccaggccccggaccggggcgcccggaggcatgccgccaagggcgtgcggaggctggtcgagaggcgggaggcgctgctcgcgcgcggggtccacggcaacaaggcgaacgtggccacggcgcgcgagctcgcctgctgggtatgggcggtcggcctcatggccgaggaggcgtaggggggcggtcccccgcacataagccaatcaccccggaagcggttcgatccgaagccgttgaggcgaacctcaggtcccttttctgcgagcgcccagggcgccacacgcgtgcacagactgtcggttcgacgtagaagcctcagccgtagcaacggattgcccagcgagagatcgccgcgggcggatattaaactgcaaagacgagcgtcggtaagacacgccgaggtcgccgcggacgggctgatatagggagagggcctgaccccatatcgttggggccaggcccgattttgcctcttgacaatgtcctgctcatattaaaaggaacgtccctaa

SEQ ID NO: 1203 - DNA, 1378 bp, unidentified
  source 1..1378: mol_type = unassigned DNA; note = element_170d925
  misc_feature 1: note = core
  misc_feature 2..64: note = LE
  misc_feature 65..1099: note = CDS
  misc_feature 1100..1378: note = RE
  misc_feature 1135..1373: note = bridgeRNA
caatggtgtggaccccgccctcccgacgcgggttggccgtccactgcatcgagggagaacaatcatgcagatcgctcgtattggtttggatctggcgaaatatgtcttcgaggttcatggcgtcgatgcccatggcaagacggtcgtgcgcaagacgcttcgccgtcatgcggtatcagcgtttttcgcgaacctgccgccgtgcctcgtcggcatggaggcctcgaacggcgcacacttttgggcgaaggcgatttctgaacttggtcacgatgtccgactgatcagtccacaattcgtcacgccctacgtgaagtccaacaagaacgaccggaatgatgcggaggccatctgcgaggcggtcggccgaccaaacatgcgcttcgtgcccatcaagtccgccgaacagctggccgtgcaggcccttcatcggattcgcagtcgcctggttgctgatcgcgtcaggctcgtcaatcaggtccgcggcattctcgcggagcacggcattgtcgttccaaaggacatcggcaatctgcggcgagctctggcgaggatcgtcggcgacaatgaggaccgcgctctcgatccactggttcgcgcgcttatgggagagctgcgggaagaactcatcgaactggatgcgcgggttacaggttacgaccgaaagatccgagagctttatcgcagcagcgagatctgccagcgtctcggcaaggtcgaagggatcggcccggtgacggcaacagcgctggttgccgcggttggcgaccgaagctccttcaagaacgggcgtcagttcgcggcctggcttggtcttgtgcccaaacagcgatcgagcggaggccgggccagattatttggcatcagcaaacgtggagaccgctatctgcgcaccttgctgatccatggcgcccgtgcggcgctcgggcgggttcgagaaaagcaggatccgagaagcttgtggctaggcaagatgcggcagcggcgacaccccaatatcgtcgccgtggcgctcgccaacaagaatgcgcggattgcctggagcttgctcactagcgacagcgtttatgacgcgagtctttcggttcgtggagcttgaaagcaaatcctagaaaggatcaataagcctcacctggcaattgcaatcgattggcggaagatggcgaatcggtcactccgtcgcttcccgaacctggtgtctggaccggcatggcttcggccaatgccttggcgccgttgaggtggaagcgcgcgaaaatccatcgtggctcgcggcatgatcactcaagccgcatcaggaagccggatatacgtcagcagttgtgacccttggaccacagcctgccaaaaccggttgcaatccggccgggtccatata

SEQ ID NO: 1204 - DNA, 1761 bp, unidentified
  source 1..1761: mol_type = unassigned DNA; note = element_1714965
  misc_feature 1..2: note = core
  misc_feature 3..294: note = LE
  misc_feature 295..1743: note = CDS
  misc_feature 1744..1761: note = RE
  misc_feature 98..273: note = bridgeRNA
agcagtggccaccccgtcggcgtggttatatgagtcagaaacttttttagagagcccgaaggtcctgggtgtctcggcgcgagttagaatctggggcacaacatggctcggcagctaaggccgcatttcccctggagcgttcctgcccgaataaaagcatggctccggtattggcgattgtatagatggtggcggcattgtcctgaaaaggataagggcctgtccccgctggagaggttgagtagtttcgccgaccgggccgagccaagttgaattcaacgtggagcggttagcatgaaacccaagcaacaggagaaaaccaagaatgcaacctaccaaccaacgcagggccattggcaacagatgaaccgcaagcaacggcgggagatgacgcggaagatccagagcgaagacatcagcttggagatgattcatccagatgccgccggaattgatatcggcaacgaatcccactacgtggccgtcccgccgacacgggatagccaaccggtacggcgctttgggtgcaccaccgcggagctgaaggcaatggccgattggctaaagcaatgcgggattcgaaccgtcgcgatgcaatcaactggcgtgtactggatcgcggtatacgacattctcgaagaagctggcttcgaggtatacctggtgaatgcgcgggagaccaagaatctgccgggacgcaaaagcgacgtgcaggagagtcaatggctgatgaagctgcacacctatgggctgttgcgaaattcgtttcggccgtcgcaggagatccgcacgatgcggagctactggcgacagcgcaatgatctagtgcagagtgcgggccgacatattcaacggatacagaaggcgctgacgcagatgaatgtccagttggccaatgtgttaagcgacgtgagcggaatgacgggacaaacgatcattaaggccattctggccggcgaacgcgatccgcataagctggccgcgtttcgtgatcaccgggtaaaagcgagcgaggaggaaatcgcgcggagtctggagggccactgggaagacgatgttctgtttgtgctgaagcaggaacaggatggttacgagttttgccggaagcagatggctgagtgcgatcagcggctggaacagtatctccagcagagggaagaccggagcgcaggggccgctccgccggaagagaagcgcaaggaacggctcaagaagaagaaaggcaataagcctttgttcgacttgcgtatcgggttgtttcgcatgaccggtacggacctgacccgcatcgatggcatcgatgtcatgactgcgatgacgatcctcagcgaagcgggatcggatatgagcaaatggaagaccgaggaccattttgtttcctggctgcggctgtgtcccgacaacagaatcagcggtgacaagattattgggaaaggtcggctgccaacgaacaatcgggtcagtatcgctttgaagatggcggccaacgccctacgcacaagcaagacctatctaggagcacagttccgccgtctgagaagcagactgaacactcccgtggcgatcaaggccatggctgccaaactggcacgtttggtctaccgcatgctccgctacggaatgaaatacgtggaccaaggagcggagttctacgagacccaacaccgtcgactacagatcaaacacctcaagacgaaagccgccaagcttggattccagctcatccaagttccagcggcttaaaagccggagtttctggag

SEQ ID NO: 1205 - DNA, 1382 bp, unidentified
  source 1..1382: mol_type = unassigned DNA; note = element_171b8a0
  misc_feature 1..2: note = core
  misc_feature 3..87: note = LE
  misc_feature 88..1116: note = CDS
  misc_feature 1117..1382: note = RE
  misc_feature 1090..1366: note = bridgeRNA
agatggggtggatgccgctctcccctgacggcatcgcgatgtgccaaactcgtggtgtcgaagcacaagttgaaggagagggcatccatggaagaagttagcatcatcggggtcgatctggcaaagaacgtgttccagctgcatggcgctgcggcggacggggcggtcgtgttccgcaagaagttgtcgcggctgcagttcgggcggttcatgtcggaccatcccgcatgcgaggtggcgatggaggcctgtcccagcgcgcatcactgggcgcgggaactggccgggcacgggcaccgggtccggctgatcgcgccgcactacgtcaagccattcctgaagcgccagaagaatgacgcggccgacgcggaggcgattgccgaggctgcgctgcggccgactatgcggttcgtggaacccaagtccgcagaacagcaagcccgggcggtggtgtttcgtgcgcgcgagcagctgctgaagcagcggaccgaggcgatcaacgccttgcggggccatctctacgagttcggccacatcgccccggaagggatcggctatgtgccgcggctggcgcaggtcgtcgaggatccgggctcgggcttgcccaacctggcgcgcgacatctgccgcatggttctggagcaggtcgaatttctgaccgtccgccttgccgccctgacggcgaagatcgccgccctatcaaggcaggccgcgatgccgcgacagctgcagacgatgcccggcgtcggcccgatcggcgccctggcgatcgaaaccttcgcaccgccgatggatcagtttcgacgtggccgcgacttcgccgcctggctgggcttggtgccgaggcagcattcctcgggcggcaagcagaggctggggaagacatcgaagatggggcagcgggatattcgacgactgcttgtcaccggcgcgatggcagtgctccgctgggccctgcgtcggggcgcccccggaaacccgtggctggcgcgcctgctggaacgcaagccgccgatggtcgcggccttcgcgctggccaacaagatggcgcgtgggatctgggcgatgctgacgcgcaaagaggactaccgcgacccggtgactgtcggcgcctgaacgggtgctgtcggccctaggcgcgacagagttgtgaggaagacatgaactgcatgggcaaatgatcgccatgatccgggttgggcaaaccagaaaccttctccgggcctcgagcccgccttcagagatttggctccgatccgcgcatcaccatcccggccagcggcatcagtcagtcgcacatataggcctgaccaaagatcgcactcgatcacatgcgcagaagttcagatattccttgcaaaccgagcggcatccaccaaaga

SEQ ID NO: 1206 - DNA, 1376 bp, unidentified
  source 1..1376: mol_type = unassigned DNA; note = element_171ce46
  misc_feature 1..3: note = core
  misc_feature 4..87: note = LE
  misc_feature 88..1110: note = CDS
  misc_feature 1111..1376: note = RE
  misc_feature 1113..1363: note = bridgeRNA
tgatggtgtggacggccccgacctccggcatcgcgatgtgccatgttggtgctgttaggaaccaaccatgggaaggagccgtccgacatgaatgttacaaccatcgggatcgatctggccaagtcggtcttccagcttcacggtgttgatgctgacggcggcatcgtctttcgtaagaagcttcgccgctccgccgtgctggattttctgcgggaccgttcaccttgcctgatcggactggaagcctgtgcaacggctcactactgggcccgcgagattagcgcgctgggccatgatgtgcgccttatcccgcccgcctatgtaaagccttacgtgaaacggcagaagaatgacgcggccgatgcggaagccatctgcgaggcggtaacccggcccaacatgcgctttgttccgatcaagagtgcggaccgtcagggcgtgttgatgctacaccggacgcgcgacctcttgatgcgccagcgcacaatgacgttcaacgccgtgcgcgcccatctggcggagttcggtatcatcacggcgcaggggccgcacaagatcctggccctgatcacggcgatccaggcaggcgaagtcccgggattaccgcagatcgccgcagtcgctctcgaaagcctggccacgcagctcgacaacctcgccggtgagatccgccggctcgatcgccggctcatgtcctggcaccgcgcagacgagaccagccagcgtctcgagaccatccccggcgtcggtatcatcaccgcaacagccctggcagccagcgtgcccgacccctccgtcttcaagaccggccgtcagtttgcggcctttctgggtctggttccgcgccagaactcgtcgggcggcaaagaccgtctcggccggatatccaagatgggcgatggttatctgcgcaggcttctggtcgtcggcgccacatcggtggtccggcgcgccaacaccaacacatcggcgacggggacctgggtgcgatgcctgctcgaacgcaagcctgtgagagtggccaccgtggctgtcgccaacaaaaccgcccgcatcgcctgggccatcctcgcacgcggcgagaccaatcgggcgccgatggcggcataaacgtcaccagttgcagggacatctcgtcgctgcgcagcgctgtgagggcaaatgtaagcgatgatgatcaaacggggccgcagccgggaaaacccggggtgctgtcagggcgttcaagctcgatagtctgagtgggacccggcaagcggacttcatcagggccagcggtcacgggtaccgcgcaaacaggccggacacatgaccgcaacccgcaacgatcagaatcactccatatttacccttgcagaaacggcgccgtccacaca

SEQ ID NO: 1207 - DNA, 1575 bp, unidentified
  source 1..1575: mol_type = unassigned DNA; note = element_171f8a0
  misc_feature 1..2: note = core
  misc_feature 3..241: note = LE
  misc_feature 242..1498: note = CDS
  misc_feature 1499..1575: note = RE
ctcagtggggaagtatcgaggatgcggctaggacggatgcctggtcgtggcttctcggtcgcgtcgggggatggcctcgttgccgagccgatgcgacggccagttttagtgctgccaccctcgacgcgccgaggcccgggaccggcgttagggacatgcccgaccgagggccgaacaatgaggaaccggcgagggcctcgacaccgtggagtcaaccacttcactccgcgggaggctagcgatgaagtatgtcgggttggactgggccagtcaggcgacggtgctcgacgaggccgggcaggtgctggaccggtgggcgtttccgcactccgaggctggttggttgatgacgatggatcggctgcggaggcaggggatgcccgaggagctcccggtgatcgtggaacggactagcggcccggtcgtggatcggctgctctcggcgggccatccggtggtgccggtgcatcccaccgcgttcttcgcggcccggccacggtggggtgcctccggggcgaaatccgatccaggggatagctacaagctcgctgactacctgcgcaccgacgggcatcgactgcggcgattggcaccggtcgatcctggcctgcaggaactacaggcactcgtgcgtctccgtgataaccacgtgcgggcgcggacagcagcatccaaccagctcaccgccatgttggatgcctactggccagggccgcgacagttgttcgtctcgctcacctcactgatcgcgttgtccttcttggccgactacccgactccggcggtggcggcacatctgaccgaagcgcggatggcggccttcctgcgacgccaccactaccgcggcgggaagactccggcggaactggttgcccggctgcgcgctgctccggtggcacacgccggtctgccgactgccaccttggcagcgatggtcaccacacaggttcagttgctgcgcaccctgcagcagctgatcagcgacaccgagcggctcatcgccgcccgagtcctcgcctatccgcggacccgggtgcttgcagatcttccaggcgtcggcatgatcaatctcgcgcagctgctggccgaggtcggcccgatcctggatcgggtcgacagcgctgaacaggccgccaccgagtgcggtgcggcgcctgtcacccgcgcttccggcaagaccagcggggtctacttccgctgggcagcgaacacgcgcgcccggaaggcgatcaccagcttcgcccacaacgcccggcttcaagactcctgggctgccaagctctacgccgacgcccgcgctcgcgggaaacgccacccgcacgccactcgcatcgtcgcccgagcctggcttcgcatcatctgggcctgctggaccacacaacagtcctacgatcccagccgtcaccgcacatccacgtcctcatacccgccggttcctccaccgccagccaacccgccggcgcgcaggcgcggtcaagatggagcaccccacggctgaacgaccttgaccgcgccgagcaccggcacaccatcaaacgcggaggaaccccgatggcctcgacttgacttagagaa

SEQ ID NO: 1208 - DNA, 1595 bp, unidentified
  source 1..1595: mol_type = unassigned DNA; note = element_1724235
  misc_feature 1..2: note = core
  misc_feature 3..245: note = LE
  misc_feature 246..1529: note = CDS
  misc_feature 1530..1595: note = RE
tctaccatcggaatttagcaggtagcgggactgtagggaatcttgtatagaaggtcctgacgagggtgtggctcttggggtcagtggcctgtacattcaggctcgcaacggcctgaaatgccgccctcgtcacctgcatcatccgaagggtcgaccgggatggtgccatattctcaccgaatacgtggctctgtaagtagacgagacctgaggatgatcgatctcgatctacaaaggagggctacgtgtcagaagaaaaatcgatagagttacgagtcagcgtggatgtggggtatcgtcgtcacagtgtggcgatcgggttacccagtggcgaggtcttggaggagtttgagatcgagcaccggctcgaagggtttcaggattttttctcccgcatagaaaagcacaatcccaagcagggttattcggtggcggtggcgatggaaggttacaacggctatgcgcggccgctcgacagcatggtacgccagcgcggctaccggctttataacatcaacaatctgaagctggcacggttcaaggagatctttcctggagcagccaagagcgaccggatcgatgcgcgcaaggggttggagctgtttcagctcagggatcacttaccgctggccaaagaagtcctgcaagaagtttcggggacaccgcagcacaacgaagtgctcaaacgattaacccggcgccggcgaagattagtcaacgagcgggtgcgggtggtcaataatctacaagcggacttgcaagcggtctgcccgggactgttagagatcacttcagaggcgagcaaccagtggtttttaaattttcttctcagcgcggataccctaccgcagctggctcggcttagaaaagcgagtttgctgaagatcccggcggtgggcaaaaagtatgcgagcctcatcgaggcttggcagaagcgggcgcactttggtgcggaggtggagtgggtcagcgaaatgatccaggaagacgcccagcgctgtcttgatctcgaagagaagatcaaaacactggagaccaagattcaacaagtcgccacggattccaagatcgccaagactttattatccattcccggctttgggccggtgtgcacctccgagttagcgggggagatcggcaccattgagcggttcagcaaggaaggaagtctagcgctgtacctgggcatgtccacgttggacaacagctcgggaaagtatcagggcaccaaggcgcctaagcatgtcaacacacgggcgaaggctgcgatgatgatcgccttggatcgacatcgaaagtatgtgccagagtcgcagaggtactacgagaagaaacgaagcgaggggaaaaggcacaaccaggcgatccgagccttaggccgacacctgtgccggatcatttacaagatgctcaaggaacaaagagagtaccaacttcgctctgaaaagggggatacccaggccagggtcagatcgagatcgtgcgttaaaacgagaatacggaggccgaaagcttcagcgaagagctaaaaataacatttcatcaacagagcccgtacggataggcttgtctgcttgaaattcccagcgggatga

SEQ ID NO: 1209 - DNA, 1394 bp, unidentified
  source 1..1394: mol_type = unassigned DNA; note = element_172e9cf
  misc_feature 1..2: note = core
  misc_feature 3..82: note = LE
  misc_feature 83..1108: note = CDS
  misc_feature 1109..1394: note = RE
  misc_feature 1140..1381: note = bridgeRNA
tgatgatgtggacggcctctcctcaacggcatcatagtgccaaggcgtggtcgcaggagcgccacaaagagggagaccgcccatgaagaagtttatcagaatcggcgtcgatttggccaagaactattttcaggttcatgcgcttgagagcgaaaacggccccgccgtgacgcgcaaattgaagcgctcgaagatgcacgagttcttttcgcagatcgaaccctgcctcattggcatggaggcctgcggcacggcgcattattgggcgcgagaactcaaggcgatgggacacgaagtgctgctgatgccgccggcttacaccaagccgtatgtcaagcgcggcaagaacgatgccgtcgacgcggacgcaatctgcgaagcgatgtcgcggcccggaatgcgctttgtgccgattaagagcgcggagcagcaagcgacgctgatgctgcataagacgcgcgaactgctgatcaagcaacggacgatgagcgtcaacgcgcttcgcggccatctttcggaattcggcattgtcgccgccaaggggatcggtcgcgtcgacgagttgctcgatctggccgaaagtgatgcgacgcttccgaacgccgccagggcgagcgtcaaagttctggttcacgctcttgaggggctcgacaaagcgatcgacgatctggagaaggaaatctccagcgcccatgcgcaaaatgagatgagccggttgctggacaaggttcccggaatcgggaagctgatcgcttcggtgatcgcagccagcgtgccggacccgagcgtgttcaaatcgggacgagatttcgcggcctggctcggcctctcgccgaggcaaaactcgagcggcggcaagcagacgctcgggagcataaccaagcagggcaaccgatacataaggaagatgctcgtcttgggagcgacctcgctgctcaacgtcgtgggtaaacgcaaaggcgccttgcgcgactggattgtcgcgctgctggcgaaaaagccggcgcgactggttacggtcgcgctggccaacaagctggcccggatcctctgggcgatgatgaagaccggcgaatgcttccgcaccgagatgtttgcgaaggcgtaaggaagccgttcgccgccgcaaggcgggttcacatgggaggtttactggttcgagtttggcaagcgcaacgaaacgtgatgaacgacacggtcgtcaccgaagaccaggaataacctgctgaaagtcatgagcgtaaagctcgcctggctgatagggatcccggttgtcggacttcatcagggccagcggatatatgctccgcaccaacaggccggacatatgaccgcagccgaccaaatcgttcaaagcgccaaaaaagtgcttgccagggagcgccgtccacata

SEQ ID NO: 1210 - DNA, 1374 bp, unidentified
  source 1..1374: mol_type = unassigned DNA; note = element_174074f
  misc_feature 1: note = core
  misc_feature 2..78: note = LE
  misc_feature 79..1083: note = CDS
  misc_feature 1084..1374: note = RE
  misc_feature 1150..1365: note = bridgeRNA
taatgggatggaccggccgtgcttaccggcgcacccttcaccaggggcggcccagcacgaggatctgagccatgcctaatgctccgcttcagcacgctgcccagtggcaagaacagcttccatctcatgggtttggatacccgaggtgccattgttctgcgccagaagctctcccgcggacaggtggagcagcgccttgccaacatgcccacctgcctgatcggcatggaagcctgcgttggagccaatcatctcagtcgccagttgctggccctcggccatgatgtgaagctgatgccagcgcagttcgtgaaacccttaagcaagagccacaagaacgatttccgcgatgccgaagccattgccgaagcggtccagcgtccaaccatgcacttcgtgtcgatcaagacgctcgaacggctcgacctgcaggcgcctcaccgcgttcgctcgcgcctggtgagccaacgaacagcggtgatcaaccaaatccgcaccttcctgctggagcgcggcatcgccgttcggcagggactgcgttcaccgcgccaagccctgccggatatcctcgccaaccgcaccgatgtcttcactccacgtatcgcgcgcctgatcgaaggcttggtgcaggattggcatcacctggatgagcgtattgatgcagtgaccgaggagattgaggcgctcgtggcggcagatgaggcctgccagcgcctgatgagcctgccgggcgtaggtccaatcatcgccagtgccatggtggcagccattggcaacggtacggcttttagccgagggcgcgagttcggcgcgcggtttaggctggtgccaaagcaaacctcgacgggtgaccgcacgatcctgcggccgcctgtcgaagcgcggcaacagttatctgcgctccttactggttcaggtcgcccgtgtgctcctgctttggcccgccaagtggcgccagcacagttttgggaactggctgacggccgcctctatgcgcctgcatcacaatgggctcgcggcggctctggccaacaagctggcgcggattgcctggagcgtgccgagccagaaccgcacctatgaaccatgaactgccgctgtgacgggtaagggcagtatcgcccctccccggccacaaggcgctttggatctcgccgaggtctgcgagaggaatacgagatggagaacggtcgcgccgtcgcgttcacgctccggtgacccggtgagccataacgggccgatccgcttatgagactgaatgcgcgcggatatccatggtggccaggagcattgctccgcaagggccggatacattagcgcaagaccaacctcaccatctccaaagcctcttgcgacccacggccggtccataca

SEQ ID NO: 1211 - DNA, 1584 bp, unidentified
  source 1..1584: mol_type = unassigned DNA; note = element_17569f7
  misc_feature 1..2: note = core
  misc_feature 3..251: note = LE
  misc_feature 252..1454: note = CDS
  misc_feature 1455..1584: note = RE
  misc_feature 7..226: note = bridgeRNA
ttcgtattataaggttaaccagtttttactggttgaccttttttagataggacctattatatcagtagccagggtaggacgtacggggccatgggacaatatgatcccgtcactgaaactgtccaccccctacgtgtagaaacatgtttgaggctggttgggactgtgatctcgtataacaagcgaagctatgatactgcatggaggaataggggttactggcaaaacaaatggagaggaagagatcaagaatgaatccagtaatcggtctggatgtttcaaaaggggaaagtcagattcaagcctttttagataaaggaaaaccgtatggaaagagttttagcgtatcccatacaacggagggactggatcgtttacttcattttttgaacgtggtagaaaatgaagctggtatgaaaccaagtgtcatattagaatcgacgggacattatcatactcctgtcattcagtttttagaagaacagaactacttatatattatggtgaatcccttactgtctcatcaggcaaaaaaattaagtttacgaaaggtgaaaacagatcaaatcgatgcctttcgcttatgcgaactgtattacaaggaagaacttgagccttataagaaaaggggaattcagcttttaaacctccgtcaccttacgaggcagcatgaagcactgacaggtctatatgtccaaactaagttacagtttcaagcgattttagatcaagtgtttccggaatataaaggggtattcggagatttgtattcgaaggtttctctacacacacttctggcatttaagacgtcagaatcggtgatacaggcaggagaaaatcaggtaaccgatcaaatagcgagtttatgtatgaggcgttcggaacgttgggcacaagaaaaggcaaaaaagctgtatgaagcagctcagcgtaacccatttaagagcatcgtttatcaaagtcatttgatcagccttgacatgtatattcagctacttctccaataccaagagcacctagcacagttagaggatcaaatagatgccctggcaggagaaatagaagaatataagatgattcagtccatccccggtattggagaaaaaatcgcggcaacgattatttctgaaattggagaagtcgaacggtttcatcatcctaaaaagttagttgccttctctggaatcgatccaagtgtacattcgtcaggaaaatttatcgcgacgatcaatcggatcaccaagagagggtcaagtcgactgcgtcatgccttatatatggctgttctctgtgggattagagcctctcgcaataagaagctaaaagagttctatgatcgcaagcgagaggaaggaaagccttttaaagtagccgtgattgcgtgtgcaaataagcttcttcattggatttacgccttactaaagcgcaaagagactttcctagatttagcataagagaaagcattcagtaataaaagaaaaaccttccagtatgaataaggaaggttatttggcatgaacatttttagtatatcactttatttataagatttttattgaaaaatgttgacatcctattagctgg

SEQ ID NO: 1212 - DNA, 1642 bp, unidentified
  source 1..1642: mol_type = unassigned DNA; note = element_175a0e4
  misc_feature 1: note = core
  misc_feature 2..556: note = LE
  misc_feature 557..1357: note = CDS
  misc_feature 1358..1642: note = RE
  misc_feature 1416..1637: note = bridgeRNA
caatgggatggactcctcccttctcaaacggcatcgaagtgccagactggaggaagttgccccccgtcgaattgaaagaaggagtccgaaatgaaagttacccgtgccggtattgatttggcaaaacaagttttccagttccacggcgtggatgccgaggaacagaaagtgacgcgccggcagctccggcgccatcaggtcttggcgttctttgcccgcctgccgccctgcctgatcggcatggaagcctgcgccagcgcgcaccactgggcgcgcctgctgatggcacaagggcatgaggtccggctcatggcgccgcagcatgtgaagccctatgtgaagggcaacaaaaacgacaccaacgctgtccgccaaggaagtgcgaagcgcgaggcggatagtccccggtaggcgcagggcgcgagcgtggccgccgccaggcgctatgcaaagcgcatcccgatacgccgtagcgccatttgtgggaacgccagtggacgcagggcagccggggcattatgagtagccgaagatcgagtgcgtttcggggactcggatgtcccaaaacgtatcacgagatcaaaggctcgccgacgatgccgaggccatctgcgaggcagtaggtcgtccgaacatgcgcttcgtcccgatcaagagcgcccagcaacagaacatccaggccttgcatcggatacgctctggcctggtacaggaacgcacggccaaggccaaccggattcggggcctgctgggggaatacggcatagtctttagtgcgcgaatcaatgtactgcgcaaggccctgcccgaggtattggaggacggtgacaatggattgctgccggcattccgctccttgctggaagggctgcgccaagatctggtctatttggatgagcgcgtgagcgaactggaccgttcgatcgaacaactggcgcgcgagcatgccgatgccagccgactgatgagcctgcgcggcgtggggccaatcacggccacggcactggtggcggccttgggagatggcagcgatttcaagcgaggtcgggatgtctcggcctgggccggcctggtcccgggccaacacagcagcggcggcaaggaacggctcctggggatcagcaaacgcggtgatgcctacctgcgcactttgctgattcatggggcacgagcagtcatccaaggtgccaaagacaaacaggacggcctaagccgatggatccaaagcctttgccatcggcgtaacaaaaacattgctgcggtggcgctggccaacaagacgttgcgcatggcctgggcgctactgagaacggagacggaataccaagcggattatgcggcaggaaggccggcctgaaagaaaccgggttgtcaaacaacccgcggatgcaacgaactaccggagtcacactccagacgattgcgcagcaaaaatcgttgatggcccccaggtcgaaccggcgtctgaaaaaccttgttcatccggagtgcccttgagcacgatagcccgatcaggatcagacgcgcgaatagcccatcatggcccaggcgaatgcgcccaacacaaaggccgaatatacgtgagcagtcgagcctaccgccaaaaacgaaaaatgctggcaaaacgggaggagtccatata

SEQ ID NO: 1213 - DNA, 1207 bp, unidentified
  source 1..1207: mol_type = unassigned DNA; note = element_176a64d
  misc_feature 1..2: note = core
  misc_feature 3..193: note = LE
  misc_feature 194..1174: note = CDS
  misc_feature 1175..1207: note = RE
  misc_feature 12..199: note = bridgeRNA
cttgtatctctctcgatatactgtttagctatcagtgtatcaggaagtgtgatgaacgtgcaccgctccggaggctttgagcctgaaacgtagataacgtctcacacttcaatttctcaatgaaactggatggtatccaagccccttcgatattgaagtgaggctgtatgaacaaggtaagtggagagagaagatgaatatgattggaatggatgtgagcaaagccaaactggattgtgcctggataaatgacacagcctccagcaaggtcaagaacaaggtatttttaaatacgcccaaagatcatcaggcgttgatggactgggcgatgaaacaatgccaggcaccgattgatgctatccattttgtgatggaggctaccggcatctatcatgaggcggtcgcctatgctttagagcaagctggagcgctagtctcggtggtaaaccccgcgcaaattcggaactacgccaggagtctgggcacacgcaacaagacggacaaaaaagatagcgtcgtgattacccgctttggcctcacgcaacggccccgtttgtggcaaccggagcccgaggaagtccgtgttttaaaagccttgatatcaaggctcgaagccgttgagaaggacattcagcgagagaagaaccgccgggagaaagctgaaattgcgtacgcctccgatgaagtcatcatctcaatccaaacggtactggcgcaattggaaaaagagaaacaacggctggaagatttaattaaccggcatattgatggccacccgcaccttaaacaggatcgtcaactgttggaaagtattcccggtgttgggcccgtcatctctcgtatgatggtcggcatgatacgaagtcgggactttgactcggccccgcaatgcgccgcgtttatcgggctgacaccggtacagcatgaatcgggcgccagcgtcagaggtcgcgcgcatttatcgaagacgggtaatccggttatccgagccaaactttacatggcggccgttgtcgcgattcaacacaacccggatattaaacgacaatacgaacgattactgaaacggggcaaagtgaagatgagtgcgttgtgcgctgcgatgcgtaagctggtacatatttgctttggtgttcttaaacaccagcaaccgtatcaacctcagggggggtaaacaccacttgtgatgggtggagggagatggtat

SEQ ID NO: 1214 - DNA, 1364 bp, unidentified
  source 1..1364: mol_type = unassigned DNA; note = element_176febc
  misc_feature 1: note = core
  misc_feature 2..72: note = LE
  misc_feature 73..1107: note = CDS
  misc_feature 1108..1364: note = RE
  misc_feature 1109..1354: note = bridgeRNA
tatggaatggcccgccctcctttgcggcatcggctaggatgccggtgtttggaaaacggagaaggacgagccatgacgatcatgatgctgggaattgaccttggcaagaacagttgcagcgttgccgggttggattcggacggaaaagtggtgctgcgccgccgcatgcagaccaagacggtggtgagcttggcctcaaagcttgcgccctgcaccgtagcgatggaggcgtgctgcggcgcccattatctcgggcgacttctggccgcacagggacacgacgtgcggttgatgtcgccggaatatgtgcgtccctacgtgaaggcgcagaagaacgatgaccgggacgcggaagcgatcgcggaagccgccacacgcccaacgatgcggtttgtcgagctcaagtcccaggcgcaactggatgtccagtcgctgcatagggcccgctcgcggctggtcggcgcccgtacgaccctgatcaatcagttgcgcgccattctgctggagcgcgggacgaccatcgcgcagcgccggcgcacgctcgagcgggcggtggatgtgttgcttgcagatccggacttcatgaccggcagccgcattcgccgcctgctctccgatatgcggcaggaatggatcgatctcgatcgccgcatcgaagcgctggaccgggaattcgtcgagctcgcgcgcgacaatgcggcggctcgccggctgacatcgatccccggcatcggagctctcaacgccactgcgctcgtcgccgctgtcggggatggagcgacattcgcaaaagcccgcgatctcggcgcatggctggggcttgtgccgcgacaacataccaccggaggcaagccgagactgctcggcatatcaaagcgcggcaacaaatacctgcgcacactgctgatccatggtgccagggcggcgttgccgtcgctggcccgaagcccgacgctgctgggcgcgtggctgcgcaacctgctcgccagacgccatcgcaacacggtggtcgtggcgctggccaacaagctcgcccgcatcgtatgggttgccctgagacaaagcgccacctttggtgtcggacaagccgcggtagcgactacctgaagtaatcggtcagaggcgtgttcagcgccgtttgacccatcatgtctgcgggaggactttgaaagatggcctgacggtcgaaccgacgtttcggaagcctggttcaaaagatggcgcgtcgacgccgtgagttttatgaggcccggaacgtgcggatctccatcttggcgacggcttcagccgacacgccgtatacgttgatgcagaccaacagttgccatcagaaataaacctcttgccgacgggcgggccatacg

SEQ ID NO: 1215 - DNA, 1440 bp, unidentified
  source 1..1440: mol_type = unassigned DNA; note = element_17773e5
  misc_feature 1..2: note = core
  misc_feature 3..216: note = LE
  misc_feature 217..1425: note = CDS
  misc_feature 1426..1440: note = RE
  misc_feature 1..212: note = bridgeRNA
cattgatgatggtcaagcgccctgaccgtcgtgcctctgccgccgactgtcgccctgctgggttgaccatcaattggtctggccggcggtcagggtccaacgctcgtcggccgggcggacatgacctaataagagcctggcaagcgcctcatcaatgtcctgtctgccgcccgaccgacgtcgacctaccgaatcgacgcggaaggcagatccatcatgacagcgacccgacccgaggcaacccaggtcctcggcggtgcggacacccatgccgacaccatccacgtcgcagcgatcgacgccctgggccgcgacctgggcgaccgcgagttccccaccacaccgaccggctaccgcgacgccctcgcgttcctggtcgccttcggtgcgctgacagtgatcgggatcgaggggacaagctcttatggcgccggcctcacccgcgcggcccaagcagccgggatcgccgtgcgcgaggtcatccgccccgagcggtcggtgcgacgcctgcagggcaagtccgaccccatcgacgcctaccaggccgcccgcgccgtgctgtcccagcgggccgcggcagcacccaaggacgaacacaccgaggccatccgggcgctgaacaacgcccgccgatccgcggtcaaggcccgcaccgcggcgatgaaccagatccaccacatgctcatcaccgcacccaccctcgtgcgggagaagtaccgcccactgaaggagaaagcgctggtcaacgcgctcgcagcctgccgccccagcaccaaggacccgaccagccacggcgtgctgaccgcgttgaagaccctggctcggcgccaccagttcctcaccgagcaagccgacgacctccaccagcagatccgcgacctggcccaagcagcgaacccccacctgatgtcgctgcgcggcgtcggcccggccaccgcagcccaactactgatcaccgccggcgggaaccccgaacggctgcgtagcgaagcctccttcgccgccctgtgcggcaccgcgcccgtcccggcctcatccgggaagaccacccgtcaccggctttcgcgcggcggcgatcgagccgcgaactgcgcgctgcacaccatcgcgctggtccggatgacctccgacccccgcacccgcgcctacgtccgcacccaacgagaccgcggccgcgaccacgccgagatcacccgtctgctcaagcgcgcgatcgcacgcgaggtctaccgatccctcacccggggcctggccgcccccgagctcaccgacctgcgacccgcgcgacaggccaagaacatcaccctcactgcggccgccaaagccctcggcacctaccccagcaaaatcgtccgaaccgaactcggcacctaccccgactgcgacctcgccgaccgctaccgtcaatggctactcgccgcttgacagccataggagcat

SEQ ID NO: 1216 - DNA, 1438 bp, unidentified
  source 1..1438: mol_type = unassigned DNA; note = element_177fbd6
  misc_feature 1..2: note = core
  misc_feature 3..230: note = LE
  misc_feature 231..1388: note = CDS
  misc_feature 1389..1438: note = RE
  misc_feature 10..223: note = bridgeRNA
tccctaccttgttgcacgggtccgggccagcccttcgtatggttggcgcgcccaggggtgtcgggtgtggctttcaaacttctgccgcttgtgcctgctaccgattggccgcccgacgccccacgacgactcggctgccaattaggaactgcgactcgatcgctccgtagagaatcgacagcgaggtcgtccgtagtacgtccgcacagcccgacgcacggagtaaccgagtggccgccatctgggccggtatcgacgcaggcaagacccaccaccactgcgtggtgatcgacgagagcggccgccggctgctgtctcgacgagtcgccaacgacgagccggaactcctccggctccttgccgacgttttggccttgggtgacgaagtgacgtggggcatcggcctcgccgacggcggggccgccctggtgatcgcggtgctcctgggtcacggccagcgcgccttctacatctccggccgagccgtcaaccgggcctccgagggctaccgcggcgagggcaagaccgacgccaaggacgcggcggtgatcgccgaccagacccgcatccgccgcgatctgcaacccctgcggaccggcgacgagatcgccaccgacctcaagctctcatcgcccaccgctccgatctggtcgccgaccgcacccgcaccgtcaaccgcctccgcgccctcctcaccggcatcttccccgcgctggaccgggccctgggcctcacccaacgccggaccgctgacgctgctgaccggctaccagacccctgccgccctacgtcgcctcggcgccagacggctggagacccggctgcggaaccgcggcgttcgcggcgccggccagatcgccgagacggcgttggaagccgcctccagccagcacaccagcgtcccgggcgagaagacggcggcccggatggtccacaccctggccacccaggtgatagccctcaaccagcaggtcgccgagatggacaagttcatcgcggcccggttccgcgaacaccgcgatgccgagatcctcgccagcctgccgggcctgggccctatcctcagagccgagttcctggccgccaccggaggcgacatggccaccttcgccagtcccgaccgcctcgccggcttcggcggagtcgcgcccgcgccccgcgactccggcaagatcagcggcaacctccaccgcccgcaacgctacaaccgcaagctccaacgcgtcttctacacctccgcgctgatcagcatccgctgctgcgaggaatcgcggcgcttctacgaccgcaagcgcgccgaggacaaacgccacacccaagccgtcgtcgcccttgcccgacgccgcgtcaacgtcatctgcgccctcctacacgaccaacgccgctaaccagccgaccccgccacaggccctcgcggcttgacatacagcattaggaa

SEQ ID NO: 1217 - DNA, 1657 bp, unidentified
  source 1..1657: mol_type = unassigned DNA; note = element_1781545
  misc_feature 1: note = core
  misc_feature 2..254: note = LE
  misc_feature 255..1478: note = CDS
  misc_feature 1479..1657: note = RE
  misc_feature 7..213: note = bridgeRNA
atactaatctagtgttggatgattactcgacggagtagtcgttcaacactttttcttttactatgtaaagtggagatgaagccaatgccgtgactgctttggacacatgatgtcgtaaacaaaactggcagcttcaccattcaattgtgaatctcgtctaagtatgttggctgttaaagtcctgttgagaaaattagatctgattggattagatggaggcagctcatctccaagtaaagcggaggtttattcttatggatttattgaaaactgtttttggtattgatgttagcagccggaagtctaacgtatgcattatggtcaatggccaaaaagttgatgactatgccatctccaacgatatggtaggcttcaatcagttgctagatgaccttaagcaggttactaaaccgcagattatctttgaagcaactggtgtctattccagaagactccaggcgtttttggacatgcacgaattgcgctatgtcatgatgaacccgctggaagccaaaagaaagacaaaggatgacctgcaccagaacaagaccgataagcttgatgccttgtaccttgccaagctgcagtctgagcacccgcaacggctggcctacgttcaaagcaaagaatatcaagaattgatggccaataaccgcatctatgagcaggcttcgcacgatctgataaccaacaggaatagactgcacaaagccattcagctcactttcccagagattgagcacttaatggttaacccgagagggaaaaactactggagtattgttctcagattcccacaccctgatatcgtattagaaacaaaagaagccgatatcatcgacttcttaaaaggcttatctggtattggtaaaaagcgcgctaacgacataatgcaaagtcttattcgtttggctaaagtcgcatgcccagctgtcaaaaaggacagtgcacatattcgtggcctcgaaatggccattaacaatattctgagcgctgaagaggcgtgccagacagctttaaaggagatgaccaagctcgctcccaagcgggatctggagatcctcacaagcattccaggcatcggcgaaaataccgctctaagaatcattagtgagcttggggatatcagacgttttaacaaccctagccaattaaatgccttcgttggcgttgaccctcaagtttatgaatctggcaacctcacggcccacctgtcaatttcaaagcgtgggacagctatcggcagaaaggtgctgtacttggcaatcaaccaaattcagtcggctaagaaagcgggaaacccttctcatattgcggattattacgagaaacgaaaacggtcttctgagactgcaagtcacaagaaggccgctatcgcatcgatccataaattattacggacgatcttcgctttaattaagaatgatcaattatatagctatgacgtagccaaacataaccaaagacttttgtcataaaaattgatccaatagatattataacagcctcttttttgaaattacagaaggtggctgtatttatcatgccctaaatcagatatttaactcgattctccgggagccatttcccgattaggcctgtatttcaaaataaaattgcttaaaatcgttgataacacttgacttagagtagaaaa

SEQ ID NO: 1218 - DNA, 1418 bp, unidentified
  source 1..1418: mol_type = unassigned DNA; note = element_178db32
  misc_feature 1: note = core
  misc_feature 2..92: note = LE
  misc_feature 93..1145: note = CDS
  misc_feature 1146..1418: note = RE
  misc_feature 1197..1413: note = bridgeRNA
caatgggatggactcctcctcacctcaccggcatctacgtgccaaaatggtgagtgatcagtcaaccatcatgaagatgaggagaagcccaagtgaacattatccgcgtcggtgttgatattgccaaatcagtgttccacgtgcacggcgtagaccgccacggccaaacccaatggcaaggcaagtattctcgaagccagtggcttgatgcgctcagccgaaaagtaccggcaggcgctgagattggcatggaggcttgtgcgtcatctcaccactgggctcgggagcttcagaagcggggatattttgtccggctgatcgcggcccagtttgtcaaaccttacgtcaagagcaacaagaacgatcgggtagacgcggaagcgatctgcgaagccatgagtcgtccgaacatgcggtttgttgcccccaagacggttgcccagcaggacattcaggcagcacaccgcatccgggaagagcttgttggacagcgcacggctaaagctaaccagatacgagggctggtgggcgaatacgggatcgtggccccggtgggcatccagcagcttcgccgcgccttaccagattggcttgaagacgctgagaacgggctcagcgatagcttccgaattctgctcaatgggctggctgatgatctccggcacctggatgatcgcgtcgcagcgcttgaccaacggatcactgacactgttaaccaggaccctgtggcgcggcgtttgatgacattgcgaggcgtggggcagctcacggccagtgccttgtcaggtgccctgggagacgggcaggcgttccgccgaggacgagacttcgctgcctctctcggattgacgcccaggcagcacagcaccggaggccgggaacgtctgctggggatcagcaagcgcggcgacagttacgtgcgcaagctgctcgtccacggagcgcgggccgtgttgcgccatgttaatggcaaagacgacggactcagtcattggctgaaaggcctggtgtcccgaaaacatgtcaatgtcgcaacggtggcactggccaacaaaacagcccgcattgcctgggcgctggtgcacaacggaacggcctatgacgataaactggcagcggggtcggcacatgagattgccgcctgaagtggcacgcgagtgagttaaacggaaaaccgcacaggagacatccaccaccacgattgcatggcattttgattgatggcgaacaggcgtcgggaaaccccttatgaacgtagagccacgagctcgtgtaagcgattgggaaccggcgcgcgaatagcccatcagggtccgatgcctacaaaaacggcatcattagagagaccggatacacgtaggcagtcgtaccttatcgcgatcaaacagagtgcttgcaaaagaggaggagtccataca

SEQ ID NO: 1219 - DNA, 1623 bp, unidentified
  source 1..1623: mol_type = unassigned DNA; note = element_17912cd
  misc_feature 1..2: note = core
  misc_feature 3..287: note = LE
  misc_feature 288..1505: note = CDS
  misc_feature 1506..1623: note = RE
  misc_feature 26..307: note = bridgeRNA
ctactacaataaaattatggttaatacctcctacaggaaatatcctgtaagaaattttccatcttgttgcttaagttgttagaatgatggtggctttaggtctggccgctccctccttggatttcacgtccgaaaaaaagtcagccaaccagcccctcattcgcaacattcgttttacgcaggttgaactattcgtcgttcgtgtgaaccctccagtagattgaacaggcaatgagtcatgctggtattgacctttcgctaattctctgttaaaggagttttttgttatgaacgctgttggtatcgacgtttctaaaggtaaaagcactgtcaccatccgtaaaccaggtgatgttattctcatgaagcctcgcgatattccccataccaggtcagctatctctgctctcatccttcagattcaatctctcgaaggtgatacgaaagtatgtatggagcacactggcagatactacgagcctattgcttcctgcctctctgatgctgggctctttgtctgtgcggtcaatccgctcctgaccaagtattataacgatggtacgctccgttctcccaaaacagacaaagctgattcaaaaaaacttgccaaatttactcttgccaattgggaaaatctgcaccaatatagtgttatggataaaacacgtacccaactcaaaactatgaatcgtcagtttggcttttatatggatcaaaagacggcgatgaagaataatctcattgctctgcttgatcagtcttttccgggagctaatgattttttcacaagtcctgtacgatgtgacggcagccagaaatgggtagatttcatctacacttactggcatgtggactgtgtgcgtggtaagtcgctgaaggcttttactgctcattaccagaactggtgtaagcgcagaggctacaacttcaacgctgagaaagcacaccagatctatgctttttctgaagatctgatcgcaatgtttcctaaaaatgagacgacgaagttactcatccgacagtctgtttctatgctaaacgctgtttctcagactgtggaagaactgcggattaagatggatcagcttgcctctacgcttccggaatacccaatcgttatggcgatggaaggcgtgggatcaacgcttggtcctcagctcatggccgagatcggtgatgtcacgcgcttttcacacaggggcgcacttacggctttcgccggggttgaccccggaaaaaacgattccggtcagtatgtccaaaaaagcgttcctacttcaaagaaaggatctcctcacttacgcaaaacacttttcctaatcatggacggactgattaagcgttccccggcagatgatcccgtgtatgccttcatggataagaaacgtacagaaggcaagccttacctggtctacatgacagctggcgccaataaattccttcgcatttactacgggcgagtaaaagagtaccttacctcattggaaaagcaccaggaaagctaacatttcaccatatatttttcagaccagcgcaaagcgatggtcttatttgcttgcttattttcaacctgtgttagattattaaatttttttacttaatgcttgactttttattagcagg

SEQ ID NO: 1220 - DNA, 1371 bp, unidentified
  source 1..1371: mol_type = unassigned DNA; note = element_1792e12
  misc_feature 1..2: note = core
  misc_feature 3..88: note = LE
  misc_feature 89..1111: note = CDS
  misc_feature 1112..1371: note = RE
  misc_feature 1135..1357: note = bridgeRNA
gatggggtggatggctcccgctcccggcatctaggtgccaaaaacgtggttgctgtcaaaagcaccacaatgagggaagccatccgcaatggaaattagcacgatcggcctcgatttggccaagagcgtttttcaggttcacgcgatcaacgatgcgggcgaggtcctcgtccgcaaggcgctgcgtaggtcgcaggtgctgtcgttttttgccaagctgtcgccgtgcctggttggcatggaagcgtgcggcacgtcgcatcattgggcgcgcgagctgatcaagctgggtcacgaagtgcggctgatgccgccggcgtacgtgaagccgtatgtgaagcgcgggaagaccgacgcgaatgatgctgaagcgatctgcgaagcggtgacgcgggcgacgatgcgcttcgtgccagtcaagtcgcctgagcagcaggcggcgctggcgctgcaccatacgcgcgatctcctggtcaagcagcgcacgcagctggtcaacatgatccgcggcgtgcttgcggagttcgggatcgagctcgcacgcggactgcagcatgcactcgcgctggcgaagcggctgacggacggcgatgcggccgaggtaccaacgctagcacagcgcgtcgtggcaagcctcgcgcagcagatcggcgccgtgcaggagcaactcgccaggctcgagaaggaactggtggcgtggcatcgcgcgagcgatctctcgcagcgcctggcgaccatcccgggcgtcggcgtgatcgctgcgaccgcgcttgcggcatcggtgagcgagcctgagcgcttccgctcgggccggcagttcgcagcgtcgctgggcctaactccactgcagcaatcgagcggcggcaaggagaagatgggacggatctccaagatgggcgatcgctatctacgacggctgctggtggtcggcatgacgtcgcttgtgaggcgggcgagaaccgcaccggagtcagtcgatccgcgcatcccggcgatgctcgagcggcgaccagcacgcgtcgtcaccgtagccgcggcaaaccgcaccgcgcgcgtcgcctgggcgatcatgaccaggggcggcagctaccgcaaaccggtcgctgcatgagagtagctgaggagaccagctcaacgaggttgtgaggacgatgagaagtgatggcgcaccggtcagaccgggagccgggacaccccgcgctaatgtcgaggctatcgaagcctgcaaagcagagtgggaccaggttcgcggacaccatcagggccagcggtcgagagaaaggccgcatcaacaggccggacacaagactgcacccgaccaagcgtcagaaaatcaaatcgtcacttgcaacgcgggagccatccacacag

SEQ ID NO: 1221 - DNA, 1495 bp, unidentified
  source 1..1495: mol_type = unassigned DNA; note = element_1796245
  misc_feature 1..3: note = core
  misc_feature 4..135: note = LE
  misc_feature 136..1167: note = CDS
  misc_feature 1168..1495: note = RE
  misc_feature 1206..1381: note = bridgeRNA
aacatggggtaatcgcggcgcgatcatcccagaccattttcgtgagagatggctggcaggggtggttgcccccgataagatggaaaaacgggctcacgattggaaccgggcccacacatcgaacggagagcaaccatggaccaatatatcgggcttgatgtttcattgaaagagactgcgatctcaatccgacaggacggtaagcggatctggcgggggaagtgcgcttcggaccccaaacttgtagccgagatgatccgcaaacatgccccgcacgccaggcgggttgttttcgagacggggccattgtcgacgtggttctatcatgagctgaccaaggaaggcttgccggcgatctgcatcgaagcgcggcacgcacaaaaggtcttgaacgagacgctcaacaagaccgatgccaatgatgcggatggcctggctcatctggccgaagccggcttctacaaggctgtccgggtcaaggctttcgacagcatgctgatgcgcacgctggtgacggcccgcaatcagctcctgaatatctcaacccagcttagcaaccagatccgcggtgtgatgaagacgttcggtcttatcgtcccccaaggaacaggtcgggtgtttgatggcaatgtgaggcaactcctggatgggaatgacggccttgcaaagatcatcttgccgctgcttgaggggtggcgtgacatacgcatgcgcgcggccgatcttggtcgccagctggtcgcagtcgcacgggagagccaggcgacgaagcggttgatgacgatcccgggcatcggtgccgtcacggccgtctcctatgtcgccgcgattgaaggtccagacaacttcaaaacgtcccgatcggtgggcgcctggctcgggctgacaacgaggcgctaccagtcaggcgaggtcgactatgacggccatatctctcgaagaggcgacccccatctgcgggggctgctttatgaagcggcgacggtgatcctcacaagaaccagtgccaggagcgagagccgtctcaaaagctgggggcttaagctgcgtgagcggctgggcttcaagcgcgctgcggtggcggtcgcccgaaagcttgcggtcatcatgcacagcatgctcaagacaggagacgtattcaacagattggccggcgcgacggcataagcgaagtgtcaggccttcttctctcagcgcgtcaaacctgatgtgaggcactgagcgtcccagctgcgggcgtgggtcggatcattccgctacagcggctgcagctcattgagactgcgcgcaaaacataggaaggtcctgcctgcggagacccattatgcggcgaccatgtgtcgaccgcgcagacaaccctgctcccggcgctggacagctttgaagacaacatcgcccaaccaatcgaatacaccgcgggtgcgcgttcctcaaaaacagagccaataccgaatggcaaaacaaaacagccttgactaaggcaatgcgattagac

SEQ ID NO: 1222 - DNA, 1574 bp, unidentified
  source 1..1574: mol_type = unassigned DNA; note = element_17a24c3
  misc_feature 1..5: note = core
  misc_feature 6..289: note = LE
  misc_feature 290..1564: note = CDS
  misc_feature 1565..1574: note = RE
ctcactgggccaccattctcgtgttgaggctctccgatagggcttcgatgcaccccgggtgccgccaggtcactgccctgctcgcttgacgccgaggacgtccactgtgagatctgcaggatctggtggttgcccgggacgtgtggaccgtcgatagggctgtgcgccaaggccgcgacgactggctgcgagcgccgatcagtgagcgaaccggcaggcacgtcccggcaccaacgacacccgaagaaatgggtgcctccccactgggtctagcagcgaggaggctgacgtgaagtctgccagcaaccccttgagtagtgaatgccctctggttctgcccgaggtcgccatcaatgacgtgaccgcgggcatcgactgggcccgcgacgaccacgccgcatgcatcgtggacggccgcggccacaagatcgcaacgatcacggtcgagcacaccaccgccggtctgcgcgacctggtcgcgttcctgggccggcacggtgtcggcgaggtcgcgatcgaacgacccgacggacccgtcgtcgacaccctcctggccgccgacctggtcgtggtcgtgatcagtcccaaccaggtcaagaacctgcgtggccgctacggctcggccggcaacaaggacgaccggttcgacgcctacgtcctggccgacaccctgcgcaccgaccgggcccgactccgaccgctggtccccgacaccgaggccaccatcgccttgcgccgggcctgccgtgcccgcaaggacctggtcaagcaccgcgtcgctgcggccaaccagctccgcgcccacctgcgcaacgtcctgcctggtgccatcggcctgttcaaagacatcgactccgagatcagcctcgccttcctggcccgcttcgacacccaggaccgcgccgactggctcacccccaagcgtctgggcgactggctggccaaacatggctaccccggccgcacgagcccggaactgctgcaccagcggcttctggacgccccccgcggggccaccggcgaccacgccaccacccaggcccacatcaccgccagctacgtggcgctgctgaagaccctggtcgagcagatcaaggcactctccacccagatcgaccggcagctcgacgcccaccccgacgcccacatcttcaccagcctgccccgctccggtcgggtccgagcagcgcggctgctggccgagatcggcgactgccgagcccgattccccacccccgaatcgctgacctgcctggccggtgcagcaccctcgacccgtcagtccggcaagctccgcaccgtcgggttccgctggtcctgcgacaaacaactgcgcgacgccgtcaccgacttcgccaacggcagcagagacgccaacccctgggccgccgacctctacgaccgcgccagagcccgcggccacgaccatgcccacgccgtccgaatcctggcccgcgcctggctccatgtcatctggcactgctggcaagacagagccgcctacaaccccgaaacccaccgagcactccaacgcgtcctcgcgacccaacccgaggcggcttgacatagggctt

SEQ ID NO: 1223 - DNA, 1359 bp, unidentified
  source 1..1359: mol_type = unassigned DNA; note = element_17ac832
  misc_feature 1: note = core
  misc_feature 2..300: note = LE
  misc_feature 301..1323: note = CDS
  misc_feature 1324..1359: note = RE
  misc_feature 118..281: note = bridgeRNA
cactaagtttgcagcgagttccgacgagtcgtgaaacggcgaagtcggatagctacaaacaagaagaaaaagtatagttcatgccgaggttgtttcttacttttgttgtgtaaaagaaagggacaaccatcccgacaggtaaaataatgagtcaacggatacatagataccaactccggttacatacctgctcgggatatggctgctataagacgagatagattgttagtattcgagactatttagtgtttcagtctaacgcagtcatcggttgcctttttaaattgaatatacaaagttatgattaaattcttcattggaatcgatttctcaaaaaaaacattcgatgctacaatcatcgaacggaataagttggatgacaaaggcattcattgtacatttacaaactccttgtctggtatgaagcggtttcttagttgggttgcaggacatacatatatggcaacatcagatgatttgttgttttgtgcggaagataccggactttatagcagggtgatcagcgatgctctttcagaaagtggatattttatctggttggagagtgcacttcgcattaaacgtagtctgggcatatcacgtggaaaaaatgacaagaaggactcccgtgacattgccgtctatgcctcacgctatcaagacaaggccacacgatatgtagttccggatgaacgtttggaagccatcaaagcactttttatgcgtcgcagattcttgaaggaacaactaagggctcttaaatgtcgcaacaaggaaatgcaaccgattttaaaaagaaataaactgctggggaaatcattccgttcagatgacagattgggggaggcttatcgtaaagaaatcacttccattgaaaaggagataagggaattgatcaattcttcaaaagaactgaaacaaaccttcctgattctgacttccatgaaagggattgcgttggtgaatgctacggcattgattgtctatacggccaatttcaagaagttcgactatgatgcccgccgaatcgcttctttttggggtgtcgctccctttggacaagcctcaagaacaagtctgcatgtcacaccacatgtttcacattatgcggataaatatcttaaatcgttgttgacggaagccgtattatgtgccatgaaattttgtccaattattaaatcttatgcagaaaaattactcgccagaggcaaacatccgaatattgtcaagaataatgccaagaataaaatgctacatattcttgttgctatggtacgtgacggaaaagtttttcaagacacaaatgaaagaaagattgcataaaaaaataagattttacttgcatattaacatagattg

SEQ ID NO: 1224 - DNA, 1545 bp, unidentified
  source 1..1545: mol_type = unassigned DNA; note = element_17aeb3f
  misc_feature 1..2: note = core
  misc_feature 3..212: note = LE
  misc_feature 213..1469: note = CDS
  misc_feature 1470..1545: note = RE
tctacgatcggaatttgcaggtgacagaacaggagagcttaaggtataagtgatcctgacgagggtgtggctcttggggtcagtggcctgtttattcaggctcgcacggcctgaaatgccgccctcgtcacctgcatcatccgaggggtcgaccgggatggtgccatattctcaccagaatacgtggctctgtaagtagacgagaccgaaggatgatgaatcgatcttgtttacggaaggaggagctacgtgtcagagagaaaatctttagagcttcgagtcagtgtggatgtggggtcacggcgccacagcgtggcgcggagggctttcaagagtttttctcccgcatcgagaaacatcaaaaggcacaaggctgtggggtggcggtagcgatggaaggctacaacggctacgcccggccgctcgatagcctggtccggcagcgcggctatcggctttataacatcaacaatctgaagctagcgcgattcaaggagatctttcctggggcagccaagaaggatcggattgatgcgcgcaaaggattagagctgtttcagctccgcgatcacctgccgttagccaagaaagtcttgcaggaggttacgggaacgcccaaggagaatgaaatccttaagcggctcacccggcgccggcgcaggctgatcaacgagcgagtacgggtggtcaataatcttcaggcggacttgcaagccgtctgtcccgggttgttagagatcaccactgaggcaagcaatcagtggtttttaaattttcttctcagcgccagcacacttccccaactggctcggcttcgaaaatcgacgttactgacgatccctgcggtaggcagaaaatacgcaagtctgatccaggactggcagaagcgggcgcattttagctcagaggttgagtgggtcggcgaaatgattcacgaagacgcgcagcgctgtcttgagctcgaagagaagatcaaaacgttggggaccaagattgaacaagttgccaaggattccaagatcgccaagattttattatccattcctggctttggaccggtctgcacttcggagttagctggggagatcggcacggtggagcgcttcggtaaggaaggcagtttagctctgtacctgggcatgtctaccttggacaatagttccggcaactatcacggcaccaaacaacccaagcatgtcaacacgcgtgctaaggcggccatgatgaccgctttggatcggcatcgaaagtatgtgccggagtcgcaaagatattacgaaaagaaacgaagcgagggaaagaagcacaatcaggcaatccgtgctttgggccgacacctctgccgcatcatttacaaaatgctcacggaagaacgcgactatcagattcgccccgaaaaggggaataccaagaccaaggtcagctcgagatcgtgcgttaaaacgaaaatacggaggccgaaattttagccaacagctaaaaatccaaaaatttaacagagcccgtgaaaactggcttgtctgcttgaaatttgcagcgggatga

SEQ ID NO: 1225 - DNA, 1608 bp, unidentified
  source 1..1608: mol_type = unassigned DNA; note = element_17b9f06
  misc_feature 1..2: note = core
  misc_feature 3..275: note = LE
  misc_feature 276..1478: note = CDS
  misc_feature 1479..1608: note = RE
  misc_feature 16..295: note = bridgeRNA
ctgttacaataagtatagtcggtaaatccacagcaaaccagctatggtttacacgcactcatttttgagctacaatgaaagcagtgattggaatgacggatgtcctccttgggacaaagcgcccgtgatcgagactgtcatccatgctttcattgtagtgttcgtttttgcaggttgagccgccagatcggtgcgttcgtgtcacccaacagattgaatagggaatgagaaaaagcgtggtttccgattacaaatccaaacaggagtgatattttatgaacgcagttggtatcgatgtttccaaaggcaaaagcacggttgcggtgctcagaccattcggagaggtggtggcttccccttttgatgtgattcataacgacaatgaccttaaacggcttgttaagcttatccgatcactgccgggagaatccaaggttgttatggagtacaccggtacatattttgaacccatagcacagtttctccataacaacggtatctttgtttccgtagtcaatgcactcttagttcatgactatggcggaaactctttgagaaaggtcaagacagacaagaaagatgctttgaagcttgcttcctatgcactcgaccgctggacggaacttgatgaatatgttcctgccgatgaacagcggaaaatcttaaagctgctgaacagacagtacaatcaatccatcaagatacagaccatgatgaaaaacaatctgatttctttgactgattctgtatttccaggtatcaaccgactctttacttctctggaaagacaatcagacggtcatgaaaaatgggtggattttctgcatgcttttccgcataaagactgtgttgctaagctgtacctgtccgctttcaaagcgaaatacaaaagctggtgcagcagaaacaaataccgatattcagaatccaaagcggaaaaaatccattcttatgcaaaatcagtcattgctgttcttccgctaaacgagagtgtaaaattgattgtgacacaagttgtttcccaactgaacacaatactggaaactgctttttctatccgaacggagatgaatagaattgcttcttcgctgcctgaatacgataccgttatgtccatgtttggtgtcggaaaagtgtatggtcctcagctcatcgctgagatcggcgacaccagacggttcagaaacagaagagcaattacagcttttgcaggacttgatgctccgccgtatcagtcgggacagcttgatgtatcctccaggcatatttccaaacgtggttctgcagctctcagaaaagttctctttcaaataaccgaagtatttatcctgagcaaaccacaagatgaaccggtgtatcagttcatcatcaagaaacgctctgaaggaaagcattattattcctacagaatcgctgctgcaaacaaatttctgcgaatatactatgccaaagtgaatcagattttgaatgcgacgtaacgtttctacgcatcttttcatcaggctgcttctttttttaagttggaagcggcctttttgtcatgccattttttatcttgtgaattgtttgtaaattcactgaattgtggcttgacttttatttgcaggt

SEQ ID NO: 1226 - DNA, 1594 bp, unidentified
  source 1..1594: mol_type = unassigned DNA; note = element_17bd441
  misc_feature 1..2: note = core
  misc_feature 3..249: note = LE
  misc_feature 250..1428: note = CDS
  misc_feature 1429..1594: note = RE
  misc_feature 3..226: note = bridgeRNA
ctcgtattatatagtcatagccaattctttaccttttctacaggttaggctatgctgtttaagatactgtggattggtgagtaccccctaccactcgatggtttaataaaggctccaaccacagtctctttgtatatttgttaatcagttagataccgcatgacggtttatttagaacgaggttacaatcgcaaggggaacctgtggctctaaaacagtatcaaaaactttttgcaaaggagatttgttatgatctatgtcggaattgatgttgccaaggataagcacgactgttttatctctaactcggacggggaagtgttatttaacgcttttactatccccaacaatcgtgaaggctttgattctttattccaaataattaaagccgcatcggaaaacttaacccaagtaaaagtaggacttgaagctaccggacactacagttacaaccttctgggattccttcttgataaaggtctgaccaccttcattatcaacccgttacatacgaatctgtacagaaaaagtctaagccttagacagaccaaaacggataaagtagatgcccatacgattgcttccatgctcatgtctgatgtgaacttaaagtcctactcagacacatcttaccacaatgaagaattaaagtcactcacccgctaccgttttgataaggtaaaagaacgggcaaaactcaaaacttctgtttcaagacttgtgaatatccttttcccagagttggaaaaacttgttccctcacttcatatgtcatccgtctatgcacttctggctgaattcccaggctctgcagatattgcttccgcacaccttaccaggctcacacatcttctggaagagacttctaaaggacgctatagcaaagatacggctatcctttttcgtgaagccgccaagacctctatcggctctcatatgcctgctaaatcattggaactgagacataccatcagacttattcaggaattgagcgctgagattgatgagattgaaacacagatcagacagatcatggatctagagatcaagtcccccatccttaccatacccggcatcaactaccgcatgggtgctatgatcattgctgagatcggtgatttcaatcggtttgattcccccgataagatacttgcttacgcagggatgtcaccttccacataccagtcgggacagcttgataactgttatgcccacatggagaaacgcggctcccgttacctgcgctatgccctttacaatgcaactaaatatgtctgcctctgggatgaaactttcgctgcttaccttgcaaagaaacgggcagagggcaagcactataacgtcgccatatctcatgcagcaaagaaacttgtaagggtgatctatcagcttgaaagatccggacagacataccgcacatcctcttaaatcttttttctgtaagtatctccttcttgagtgccgctaacgacactctgtttgtcatgcagttttcaaggttctaagaactaaatttcagcgcttctgtatctgaaatgcttttaagcaattcattctaaaaatttcatttaaggcttgacttttaatagttagt

SEQ ID NO: 1227 - DNA, 1338 bp, unidentified
  source 1..1338: mol_type = unassigned DNA; note = element_17bf5a0
  misc_feature 1: note = core
  misc_feature 2..101: note = LE
  misc_feature 102..1106: note = CDS
  misc_feature 1107..1338: note = RE
  misc_feature 1115..1332: note = bridgeRNA
gaatgaaagggacttcccctactcgaagcgggttttggcccgcacggcatcgaagtgccaagattgagtttgcgtgttcaatctgaacgagaggggaagtcatggaaaaggttactacgttggggatcgatctggcaaagagcgtgttctcgctgcacggggtggatgagaaggggcaagtgatgctgcgacgcacggtgcggcgcgatcaactggtgaaggtggtggcgggcatagcgccgtgtctgatcagtatggaggcgtgctcgggggcgcacgagtggggccgacggttccaggagtttgggcacacggtgcggctgatggcaccgaagttcgtggtgccctacaggaagagcggcaagaacgacggcaacgatgctgaggccatctgcgaggcggtgagccggcccagcatgaggtttgtgccggtgaagagcgctgagcagcaggcgctgctggcgatgcaccgggtgcggcaggggttcgtggtggagaggacggccaccatcaaccggctgcgagggctgatgtcggagttcggtgtcgtgcttcctcttcgctcgatcacggtgcgccgccaggcggccacggcggccgagaacttgcccgagctcgcacgccgcgcgatcggtgatctgctcgatcagttgcgcgtactcgatgaacgtatcggcggctacgaccgggagatcgaaacccaggccaagctctgcgagccggcgcagcgtctgatgaggatccgcggcatcgggcccaccactgccctggccatcgtcgccaccgtgggcaacgcacgcgaattcaagaacggccggcagttcgccgcctggatcggcttggtgccgggtcaatactccaccggcggcaagacccgcctgggccacatcagcaagcgcggcgatgcctatctcagaaacctgctcgtgcagggcgcacgttcggtgctgcacacggcggcggcgcatcgcgaccccatctcacgctgggcgctcgaactgcagccgcgctgcggctactaccggacgctggtcgcaatcgccaacaagaacgcgcgcatcgtctgggcgctgctcgccaagaacgaatccttgcgcacggtctgaacaccaacggcttccacacctgcaatcgacgatgacgaatcggtcaaaccggcgcccggggaacctgatcatatttgacggcgtctctcaatgccgactaacgagtgaggaccgggcgtgcggctttcatcggggccagagcattcattgctcaaaaacaggccgattatagtgacgcagtccgttcttccatcgtcaccaccaccgttgcgaaaacggggaagtccttata

SEQ ID NO: 1228 - DNA, 1332 bp, unidentified
  source 1..1332: mol_type = unassigned DNA; note = element_17d8d1a
  misc_feature 1: note = core
  misc_feature 2..66: note = LE
  misc_feature 67..1098: note = CDS
  misc_feature 1099..1332: note = RE
  misc_feature 1113..1326: note = bridgeRNA
taatgaaatggacgccccttctatactgtgagtaccgaagttacttttggaaatcggagggccattatgaacacagtagcggtagtaggtatcgatctggcgaagcaggttttccagatacattttgcagatgaatttggaaataagcttctcaataagcaagttcgaagaagtaagttattgtcggcactaaatcaattgccgccatgtttggttggtatggaggcctgtggtagctcgcattattgggcaagagaaatcagagctttaggccatgaggttaagctcataacaccgcaatatgttaaggcttatgttaagaccaacaaaaatgattctgccgatgcagaagcgatcgccgaagcggtgaccagaccgggcatgcgcttcgttgatataaaaaatgcagatcagcaatcagttttgttgctgcacagagagcgtgaagggttaacgagggagcgaacatcactcataaatcggattagaggcacactgagtgagtttggggtcattattccgaaagggcctaataaattaaaagtgtggttcagggatgaatattcccgccacgaggcagccttaccaagtattttgcagcggcatacccagcgcttactgcagcgtctacggagtcttgaaggctcgatagcggcacttgatgaggaaattgatgctgagagtcaaagtgatgaggcatgtcgtcgactggaggaagtgcctggtatcggaagattaacggcttcagcgcttcgggcctcaataggcaatgcgcgatcatttaaaaacggaagagaatttgcggcgtggctagggctggtgccacgacagtattcgagcggcggaaagcagcggctgctagggataagtaagcgcggtgatgcctatttgaggcgaatgttaattcatggagccagagctgtactccggcacatgaacccgaaacgtagtgtcacgccgtggttagactcgctgtcgagacggcggcatcgtaatgtagtaattgttgcgctggcgaataagttggcgcgcatagcttgggcgctgctattccatcagcgtcgatatgaggagcagtatctcgttactgcaatgtaaacaaggatgacgtcagtttgtgcgtaggtgaaatagtattgatggcaagacggttgcaccgtggtctggtaaatctgatcttaactttgttcttcgagaacgattcaaatgtttagagccagatcagcggaattcattagggacagaggcagtgcttcaattaaagtccgaatagatggctgcaccaccaaattgtttcaatattttacttgcacaaaatggggcgtccataga

SEQ ID NO: 1229 - DNA, 1375 bp, unidentified
  source 1..1375: mol_type = unassigned DNA; note = element_17d9073
  misc_feature 1..2: note = core
  misc_feature 3..48: note = LE
  misc_feature 49..1119: note = CDS
  misc_feature 1120..1375: note = RE
  misc_feature 1143..1373: note = bridgeRNA
cgatgagatggtcttccccctccttcacggtgtgcaggatcttttgccatgatggataagattcaaccaaaatcaacagaagggggcatcatgtctgcactgaaaataatcgggattgacctggctaaaacaaatttttatctcttcattatcaatgagtttggtaaacccgcagagagagtcaagctcacgcgtgcccggttgcttaactggctggctcaaaaacctcaaatgatcgttgctatggaagcttgtggggcttctcatcactgggcacgtgaaatccatgcgcttggtcatcaggctgttttgcttccggcccagcatgtcagggcttaccagcgacgtcagaaaaatgattataacgacgcacaggcaatcgctgaggcctgtcagcatggaacgatacgaccagtgccagtaaaaactcttgaacagcaggatctgcagactttcttaaaaatgcgccagttgatctctctggaaaggacgcagttgatcaatcatgttcgggggctccttgccgagtatgggattgtactgaataaaggcgcaacagaactacgccagcgcctgccttcgttgctcgaggatgcgaaaaacggtcttacagatgtaatgagagcattactgcaccgacaacttatccggctgacagccctggacgacgagctggaatggtacaattctgagcagaaaaaatatgtccgtcatgacactgtctgccagcgcctcctggagatccccggattcggtccactggtaagccaggcaataaagagctggatgggcgatggtaagcagtttaatcgtggaagagacgcttcagcagcgcttgggctggtaccccgccagttcagtaccggtgggaagcaggttctgctgggaataacaaagcgaggaaactcttatgttcgctcgatgctgatacatggagcaagagccgtactcttcaggtccggtgggaaaacggacccgctcagcgtatggataaaccgcatcagggacaagcgcgggtttaaccgggctgtcgtggctcttgcaaacaaacttctgcgggttgcatgggtgattattgcccgtcatgaagtgtattcgccagtaatgtcgaaaagttagcagtaattattacggctgtaaaacttaccctgaaattgcgaagaatgcacaaacgatgaaaaacaggtcagaccggcgttccgaaaacctgcaatatgtgacaggcctgctcaggccgtgtaagcgataagggcggaatgcgcgaatgtctcatcggggccagaagcgagagcttcatcaacaggccggatataagaaagcaaacctgtcattttcaccgtaactgcagtcttgcaatacgggggaagaccatata

SEQ ID NO: 1230 - DNA, 1411 bp, unidentified
  source 1..1411: mol_type = unassigned DNA; note = element_17da502
  misc_feature 1..2: note = core
  misc_feature 3..120: note = LE
  misc_feature 121..1161: note = CDS
  misc_feature 1162..1411: note = RE
  misc_feature 1176..1406: note = bridgeRNA
agatgccgtaatgggccggcaccaggatcaactatcgctgattttcggttcaggtctcttcaaagtggtggaatgacgagcgggatcgagtggttcgacccggccaccaggaggacggctatggaacactatgtcggaatcgacgtgtcattggagctgagcagtctgtgcgtcctcgacccgaccgggaaagtgatacgggaagctaaggtcgcgagcgagccggcggcactggttaccttcctacgcggcctagacttgatgatcgtgcgtgtcggcctggaggctggtccattatcgcagtggctttatgacgggctgctcgaggcaaatctctcaccggttctgctggagacccggcatgtgaaggctgcgctatcagcgatggcgatcaagactgaccgtcgcgacgcgcgcggtatcgcgcagctgctgcgcatggggtggtatcgacccgtgcaccgcaaatcggtgccctcgcaggagatcagagcgctcctggctgctcgcaagcagatgcagatcaaggcgatggatctggagcaaaccatgcgcgggctgctgcgtgggttcggactgaaggtcggagaggtgagccgaggcaagctcgccgcccgcctgcgcgagctggtggccggacatgccatgctggaacgcattgtggagccgatgctggctgcacgcgaggcgctctggcgcgaattcgtcaagctccatcgcgaggttctgaccatagtcaaagaggacgaggtctgccgtcggctgatgaccgttcccggtgtgggcgcggttgtgtcactgacctaccgctccggcgtggacgatcccgcgaggtttgtgaaatccaaatccgttggtgccttcttcggtctgacgcccaagcgctaccagtccggcgaaattgacgtttcgggcgggatcacaaaggtcggcgatgccgccgttcgcacggcgttgcatgatgcggcaaacgtgctcctttcgcgagccaccaggttcagcacgctcaagcgctgggcaatggaagtcgccaagcggcggggcatgcggagggcaaaggtagctctggcgcgcaagctcgcgactgtgttgcaccgcatgtgggcggatggaacggacttcgtttggggcaaggatcctgcggtcgctgccgcggtctgacagaaaaggcataaggttcggagcagggccggacggctcagctcccacgatgtcccgtcgccgggacgcggagatggtgaggcaggttccgctgcagtggccgggagaaattccgagactacgcccggtagattgctccaccgctccctccgacagcatgaagtggcgaccccgcgtcgaccacggacagaagcacgaaaccggcgattggacccactttggagcttgacgaccgaaggcccattacaga

SEQ ID NO: 1231 - DNA, 1436 bp, unidentified
  source 1..1436: mol_type = unassigned DNA; note = element_17e017a
  misc_feature 1..2: note = core
  misc_feature 3..223: note = LE
  misc_feature 224..1426: note = CDS
  misc_feature 1427..1436: note = RE
ctcctaccatcaattcatagtataaagactgtatggaatctattaaacatggaaaggcaggaggactcattacttcctgggtcatagaatccttatttcagtctgtcccctgcctcccaagccataataggttgattggatcatagaatccttgtcacgatggaggattggccgggaggcaattcctgctttgaccatgccaagagggaaaggaggattggatatggacgaaagacagcggttcagatggtttctgggtatcgatgtttccaaggagacattcgatgcctgttgtctccccaatcagggggaaaggctttttaatctatcagcctcgatggatagaaaaggctttggggagctagtcaagcagctttctgccttgtctatgacccaagcgtctatcttggtgggcatggagtcaacagcatgttaccatattaacctttattctttccttgtttctttggggtatcctgtcgtggttatcaatcccctgcttatttctaatttcgtcaaacttcaactcaggaagaccaagacggacaagaaagatgcctttgtgattgcacagtttctccttttgaatcgagattccctttctcaaaccctcctctcttctgagatctcagatcttagagatctctccaggcaacgagagagcctggtggatcagatgagttcgatcaagagtgagataaagcggttgctgactatgacctttcctgaattggaacatatttcgggtatatttaccaaatccatgctccgcctgctctgccactatccttctgctatcttgataaggcaagtcaagcgctcacaaatagctaagctattgatcccgggatcctatgggaaacagaccgatgcatcggtggaccgaattctaaaggcggcccagggatctatagggacgtcaagcgctaccaaggagatcattctcaaacagaaagcgtccttactgatccagttggaacaacatctccaagagctgacggacatcctcatcgaactctgccgagggaagatacaggatgaaatggagatcctcacctcgatgaaaggaatcggggagaagagcgcagtgaattttctgatcgaggtagggggagatatgaagcagtttgaaactcataagaaggtgattgcgatggccggactcgatccggctctgtaccaatcagggaagattgacaggaaagggaaaatctctaaacggggaaatagacatctcaaacgggtcatctggcttatgaccacgaaggtcatccagttcaacgaaagattcaaacaatactacttgaagcgaataaaggacggactaccttacaaaaaagctgtgctgccaacggcccataaactaattagagtaatatttgcaatgctgacaaataaaacattattcaatccaaaaatgaattgatgatagttga

SEQ ID NO: 1232 - DNA, 1364 bp, unidentified
  source 1..1364: mol_type = unassigned DNA; note = element_17e7f82
  misc_feature 1: note = core
  misc_feature 2..81: note = LE
  misc_feature 82..1095: note = CDS
  misc_feature 1096..1364: note = RE
  misc_feature 1105..1351: note = bridgeRNA
tgatgaggtggatggctccctcttccggcgccatagtgaaagagcggtcacgatgatcgctctaacggggagatgtcatccatgaacgaagtaacgacgataggcctcgatctggccaagagggtttttcaggttcatggggcggatgcaaagggccgtcctgtacttcagaagaagcttcgccgcgaggaggtactcagcttcttcgcaaagttgccaccgtgtgttgtcggaatggaggcatgcgcctcgtcgcatcactgggcacgcgagattcgcgctcttggccatgacgcccggatgatccctgcgtcgtacgtgaagccctatgtcgcgcgtcaaaagaacgacgcagcggacgccgcggccatctgcgaagcagtgacgcgaccggcagttcgcacagctccgatcaagtcgctgacgcaacaggcgttgcgtgtcctgcatcgcacacacgaacttctttcgcgacagcgggtttcgttgatcaatgcgatccgtagtcatatggctgagttcggtgtgatcgcgccagcaggccctcagcatgttggttcgctgatcgagcggatatccgatccgaagacgccgatcccagatgcggttcgagcgcctctaggtatcctggtcgatgagtatgtcgccttgaacgcgcggatcaacgctctcgaagctgagatgcggaagagttgccgcgaagagcctgaatcggccaggttgctcagcatccccggcgtcggcccaatcaccgtcagcgccatattggctggagtgccgaacatccgcggttttcgatcgggtcgcgacttcgccgcgtggcttggccttgtgccacgtcagaactcgagcggtggcaaagagcgattgggccgaattaccaagatgggtgatcgtaccatccgacgtctcctggtcattggcgcgatgtctacgatacgctggtcgaggagtaagcagaacttcgctcaaagttggctgggtcgcattatcgctcgcaagccgatcaaactcgcggccgttgccttggcaaacaaaatggcaaggatcatttgggcggtgatgacgcgcgaggagacctaccgaccggcataggtatcgatcgccaggaacagccgggtcctggtggttgtggtgcaacggtgctgaatgggaagatgacgcgacagttgatagacgagatcgggacacccagtagacctgtaggcgcttcgagcgcgtcagtttgttatggacccgatccgcgaatctcatctgggccggcggccaaatatgccgcctttacgtaggccggacacatgcaagccgccgactatcgcgcatcagtcaaataagcctcttgcatcacgggagccatccacaca

SEQ ID NO: 1233 - DNA, 1631 bp, unidentified
  source 1..1631: mol_type = unassigned DNA; note = element_17f6ef4
  misc_feature 1..2: note = core
  misc_feature 3..290: note = LE
  misc_feature 291..1460: note = CDS
  misc_feature 1461..1631: note = RE
  misc_feature 45..271: note = bridgeRNA
ctcgtattataaagtagtagtgtttacagaccctctccaaggtcttaatactatttctttcatagccactctttaccttttctacaggtatggttatgatatataagatactgtggactggtgccacctcgctaccactttgatggtttaggaaagtgtccagacacagtctctttgtttgattgttaatcagttagataccgcatgacggtttatttagaacgagtccacaactgcagggggcatctgtggttctaaaacagtatcaaatatttttaaaggagattattatgatttacgtaggaattgatgttgccaaagataagcatgactgctttatcactaattcagatagtgaaatattatttaatgtatttaccatccctaataaccatgaaggttttaacaccctgtttcaaagaatcgaatctgtatcagatgattttacaaatgtaaaagtaggactggaagccactggacactacagttacaatcttctgggatttcttcttggtaaaggtctggccaccttcgttattaacccgctacataccaatctttacagaaaaagtctaagccttagaaagacgaaaacggataaagttgatgcccatacaatcgcttctatgattatgtctgatgtggacttaaagtcctactcagatacatcttaccacaatgaggaattaaagtcactcacccgttaccgttttgataaagtaaaagaacgggcaaaactgaaaagttctgtttccagacttgtttgtattctttttcctgaattggaaaaacttgtcccgtcacttcatatggtatccgtatatgctttgctctctgaatttccaagcgcatctgctgttgcatcagcacatcttacaaggctttcaaatctgctttctgatgcttctaaaggcagatatgggaaagatactgctgttatcttccgtgatgctgcaagaagttctattggttcttatatgccagctaaatctttagaactgaaacataccataaaactcatttctaaactggatgcagagattaaagaaatcgaaaaggaaatccaatccattatggataaaataaattccccaatccttaccattcctggtatcagttaccgtatgggtgcaatgattattgctgaaattggcgatttcagccgctttgattcacctgacaagatactggcttatgcaggaatgtcaccatctacttaccagtcagggcagcttgataactgttattcccgcatggagaaacgtggttcaagataccttcggtatgcgctttataatgctacaaaatatgtctgccactgggacagtacatttgctgcttaccttgccaaaaaacgggcagaaggcaagcattacaatgttgcactgtcccatgccgcaaaaaaacttgtgagggtaatttaccatcttgaaaaatccaaacaggcatatataaaataatcctgacttttttgtaaataatttccttttttgagtgccggtaacgacactctgtttgtcatgcagttttcaaggttctaagaattacttcttaactcttttgtacctaaaatgttttttagtaatctattaaaaaattttcattttaggtcttgacttttaatagttaga

SEQ ID NO: 1234 - DNA, 1381 bp, unidentified
  source 1..1381: mol_type = unassigned DNA; note = element_17f717d
  misc_feature 1..2: note = core
  misc_feature 3..85: note = LE
  misc_feature 86..1111: note = CDS
  misc_feature 1112..1381: note = RE
  misc_feature 1088..1368: note = bridgeRNA
tgatggattggatgccccctcccaacggcatcgcaatgtgccaacgtggtgatctgcaggtcattcacgagaggaggaagcatccatggacaacattagcatcatcggccttgacctcgcaaagcgggtcttccaggcgcacggcgcgcgagcggacggtagcgtcggcttccgcaagaagctgggtcgctcgcaggttctcggcttctttgccaagcagccgcgctgcatcgttgctatggaagcgtgtgcgacggcccacgagtggggccgcgcgatcggcgagctcggtcacgaggtccgcctgatcccgccgatctacgtcaagccgttcgtcaagcggcagaagaacgacgcggccgacgcagaggcgatagccgaggcggcgggtcgcccgaccatgcgcttcgtcgcggtcaaatccgaggcgcagcaggcgaaggcgatggctttccggacgcgggacctcctcgtcaagcagcgcacgcagctcatcaacgcactgcggggccacctcgccgagcacggcctcatagcgccgcaggggccggctcatgtcaaggtgctggcggacgcgctggaggcagccggctcgcgtctcgagacgctcgtgatcgagctggggcgcctctatctcgagcagatcgaactgctctccggcaggatcgcggatctcgacaaggtgctgaagcgcgaagcggcgcgggaagaagacaccgcacgactgatgaccatgcctggcgtgggcccgctgactgcgatggcggtccagaccttcgccccgccgatggagacgttcaggcgtggacgcgacttcgcagcctggacggggctcgtccctgtccagcgatcgaccggtgggaagcagatcctcggacgaacgtccaagatggggcagcgcgacatacggcgtctcctgatcatcggcgcgatgtcggtggtccgctgggccgtcaggaagggcgcgccggaaggcagttggctcgcacgcatgctggcccgcaagccacgcatggtcgtcgccatcgcgctggccaataagatggcgcgcgggatctgggcgatgtcgacgcggggagagaacttcaggggtccggtcgccgcggtctgatgacgacatcagccgaggcagccgggccgttgggcgtgtgaggaagtcgacagcaaggtaagggcaaacgatcggtcagatcgggatcgagaaaagcatttgaacccaaagagcctcgagctcgcgctgttgatgtgcactcgatccgcgtatctccatactggcccgcggtccgttcagagccgcatctcaaggcctgatacatgaccgcacccgatcacgcgcttgagccgagcagaaacctcttgcacgaacgggggcatccataca

SEQ ID NO: 1235 - DNA, 1338 bp, unidentified
  source 1..1338: mol_type = unassigned DNA; note = element_17f81c0
  misc_feature 1..2: note = core
  misc_feature 3..77: note = LE
  misc_feature 78..1094: note = CDS
  misc_feature 1095..1338: note = RE
  misc_feature 1073..1326: note = bridgeRNA
tgttggggtggaacggcccacggcatcgaatgtgccaagatgaggtcgctaaatgaccatcatgaaagggccgtcccatggaatttaagcgcatatcgatcgatatatcgaagcatattttcacactacacggcattgatgagcaggaccgcgtcgttctccggcgggagttgcggcgcgggcaggttgaagccttttttacccggctgcctccggctgaagtggctctggaagtctgcgctggggcccatcattgggggcgcacgtttggcgcaatgggacaccgggtcaaactgattcccccacaatacgtgaagccattcgtcaagcgcagtaagaacgatcgcaatgacgcggaggcgatcagcgaagcggcgtcccggccaagcatgcggattgttcccgtgaagacggtagccgaacaagcggggacggtcatagtgaaacatcgcgagatgctggtcgggcagcgaacgcaggcgatcaacgccttgcgcgggcacgcagcggaatttggcgtaattgctgcaaagggtacaagtaatatcgacggattggttgcggctctgaaggataatcccgccataccggaagctgctcaggagatgttcgagcaaatgggacggcatgtggccgatctcgatttgaaaatccaggccgtgaacaggcagttgctggaacagcacaagacaaacgttgtcagccagcgcctgggggtgatccctggcattgggccgatcaccgcggtcaccatggcgctatcggtcaatccggcgaatttcaagagcggccggcattttgccgcctggctggggctgacgccgcgagagcactcaacagggggaaagcatcgcctggggcgaatcagcaaggccgggaatgaacggttgcgtcagctgctggtggtgggggccatggcggtggtccgacacgccaaagctggcagcaaatcggccagtgcgtggttactgcaattgctggagcgccggccgcgcaaggtcgcggcgatcgctctggccaacaagatcgcccggattatctgggcgatgatggcacgcggtgaggtctaccggcgacagccggcagcagcctgaccgcggccggtgccaaggaggcaagagcgataagagaagatggcgatcggtcgaaccgacgaacggcaacaatcctgtatagattcacggcacatcaaggccgcagttctgtttggaggccattcgcggaacccatctgggctggcggtcatgaggccgcgtacgaaagccggacacatgaccgcattcgtgccgccgtcaaattctcgttacatcgctcttgaatccagggccgttccacaca

SEQ ID NO: 1236 - DNA, 1541 bp, unidentified
  source 1..1541: mol_type = unassigned DNA; note = element_17fbc0e
  misc_feature 1..2: note = core
  misc_feature 3..241: note = LE
  misc_feature 242..1360: note = CDS
  misc_feature 1361..1541: note = RE
  misc_feature 3..218: note = bridgeRNA
cttgtattatagagtagtagttattagagcccctctccaagggcttgtgctacactgtaagggatgctgtggattggtgaagtgctcctaccacaagatggttcaagaaaggttccaaccacagccctttgcagttttgttaatcagttaaataccgccagacggtttatgtggagcaaggctacaaaagcaaagtgttctgtggaacagcatcacaaatttaccgttggaggttttagatatggtagtttctgttggtattgatgtagcgaaggacaagcacgactgctttatccagagttctgagggcgaagtcctggcggatgtatttaccatctctaacaatatggatggattcaatatcctgctggagaaaatccggacctgcacctccccccaggacaaaataaaggtagggcttgaggctaccggacattacagctacaatctgctggggtttcttttggacaatggtctggccacctatgtcttgaaccctttacgcacaaacctctaccgcaaaagtctcagcctcagaaagaccaaaaccgaccgggtagatgcacgaacgattgcggctatgctgttatccgatgcaggcctcaaaccctacacagatacagcataccacaacgaggaactaaagtcactcaccagatatcgttttgacaaagtaaaagagcgtgccaagctgaaaagctcggtttccagactggtctgcatcctgtttcctgagttggagaagctggttccaatgctccacatggcctctgtctatgccctgctggaggagtttccgggagccaaacagattgccggagcacacctgacaaggctgagatcccttctcgcgaatgcctcaaagggacgctacaagcgggatatggcggtatcgattcgggatgccgcacgaaactccattggttctaaaatgcctgccaagtccctggaattacagcacaccatccggctcatccgggaactggatgctgagatcgacgagatcgaagcggagatcgagactatgatggaggaaatccattctcccatcaccaccattccaggcattggctgccgcatgggcgccatgatcctggcggaggccggggatttctctcgctttgactctccggataagctgctggcttatgctggtatgtcgccgtctacttaccagtctggacaactgaaaaactgttacccacacatggagaaacggggctccagatacctgcgttacgcacttttcaacgccacaaaatatgtctgcctttgggatcctacctttgccgcctatctcgctaaaaagcgagcagagggcaagcattacaatgttgccatctcccacgcagccaagtagctggtgcggcttatcttcgccatggagaaatccaggcaaccctatcgctctgtaacctgagcggcaaccacttgaattgccagcaggggtctgacaagacctcagctttgctatgccctttttgaaccagctgtgtttgaccaccaccattcattttgagggttgacttttaatagttaat

SEQ ID NO: 1237 - DNA, 1486 bp, unidentified
  source 1..1486: mol_type = unassigned DNA; note = element_1801629
  misc_feature 1..2: note = core
  misc_feature 3..78: note = LE
  misc_feature 79..1227: note = CDS
  misc_feature 1228..1486: note = RE
  misc_feature 1214..1473: note = bridgeRNA
tgttggggtggacggcccccgacggcatcgctgtgccagaatgaggtcgtagtgattcctcatacaagggagccgtccgtgaacaagattatccgcattggcatcgacacgtccaagagtgttttcgtgctgcatggggtggatgcggccgagcaaccggtgctgcgccggaagctgcggcgcagccaagtgctggagttctttggcaagttggagccgacgaagatcgggatggaggcctgtggaggggctcattattgggcccgcgagctgcaggcactagggcacgaggtcgttctgctgccgccgcaatacgtcaagccgtacgtgaagcgcaataagaacgatgccgccgatgcggaggcgatctgcgaggcaatgagccggccgacgatgcggttcgtgccggtcaagacgaccgagcagcaagccgcgttgatgctggcgggcacgcgtgacgggctgattgggcgccgcacgcagttgagcaacacaatccgcggttatgccgccgagttcgggctgaccactgccaaggggctcgacaagatcgagctgctgctggctggcattgcggcgagcgcggaactgcccacgctggcgaaagaactgttcgccgcctacggccgcgaatacgctcagcttcagcggcagatcatcaagatcgaagccagactgatggcctggcacaaggacaacgagctgagccgccgcctggtggaggtgccgagcatcggcccgatcggcgccacgctgctggtgatgaaggtgaccaatccgcacgctttccgctgcggccgggacttctccgcttggatcgggctgacgccgaaggatcactcgactgccggcaagacgcggctcggcgtcatcacccgtgccggcgacgaggcgctgcgcagcgtgctggtggccggcgccacagcggtgatccagcaggcgcagaagggacgaggatatgccccgccctggctggtcgagcttctcaagcgcaagccgcgcaagctcgccgcggtggcgctggccaacaagatggcgcgtgtcgcctggaagctgatggtgagcggcgaacgttacaaccccgcgcgcaccgcggcgcagtccgcagcccgcgaggggcgcggcgctgcgccgcgtgggggctccgcgccgcgcccctcgcttgcatcgcgtatcacgcctctgggaggtggttgccatgaccgaggcgtaacgagttcggcgtgagagcggcgcaccgcctcgcgccgaggccggagcttgctcgagaaggagcagatggtgtgatcggtcgatccgagacgcgagacactccgcggaatcctgtggcgacactcgaagccgccgttatgtttggaactcgcgtcgcgaaacccatcttggcagcggtcatgtgcgccgtacgaccgttagaccggacatatgatcgcaagcgatccgatccgcacgctgcgccacctcttgcaggcggggggccgtccacata

SEQ ID NO: 1238 - DNA, 1453 bp, unidentified
  source 1..1453: mol_type = unassigned DNA; note = element_1801d83
  misc_feature 1..2: note = core
  misc_feature 3..565: note = LE
  misc_feature 566..1438: note = CDS
  misc_feature 1439..1453: note = RE
  misc_feature 12..201: note = bridgeRNA
tccttacctttcttgaagggtggtttttgccctcggccgtaggcttcggactgcccagggacgtcgggtatggctttcatgcgtttgcggtgtttcatggccgaaggagattggccgcccggcgtcccgcgacgactcgaccgctaattgagagatgcgattcgatcgctgtgtaaggacacgtcggcgtggtcgtctgctgggctgaaagaaacgacaacgatcgcggaggtggttgtgcgccaacaactgtgggccggcgtcgacgctggaaaatctgaccactactgcgtggtcatcgataccgacgggcagcgcttgctgtcgcaacgagtcgctaacgacgaggcggtcttggtcgaattgatcgacgaggttatggcattggccgacggcggtgaagttacgtgggcgatcgacctgaacgccggcggcgccgcgttgctgattaccttgctcgtcacttccgagcagcggctgctctacattcctggccgcactgtttaccacgcctcgtccggctaccgcggcgacggcaaaaccgacgccaaagacgccgcgatcattgccgacaggcccggatgcgccgcgacctgcaaccgctgcgaccggcgatgacatcgccgtcgagctgcgcatcctgaccgctcgacgcaccgatctggtcgccgatcgcacccgggcgatcaaccggctgcgcgcccagctgctcgaatactttcccgccctggaacgcgccttcgactacagcaccagcaaggccgcgctcatcctgctcaccggctaccaaaccctcaacgggctgcgccgcgccggcgccgcccgcctgacagcatggctggctaaacataaggcccgcaacgcctctgctgtcgcaaccaaagctatcgaggccgccaacgcccaacacaccactgtgcccggccaaaacctcgccgccaccatggttgcccgcctggctaaggaggtgatgaccctcgataccgaaatcgacgcgaccgagacgatgatcgaggaccgatttcgccgccaccaccacgccgaaatcatcctgagcatgcccggcttcggcgtcatcctcggcgccgagttcatcgccgccaccggtggcgacatgagcgcctttgactgcgccgaccgcctcgccggcgtctccgggctggccccagtaccgcgagattctggccgcatcagcggcaatctcaaacgcccccgccgctacaaccgacgcctgctgcgcgcctgctacctgtcggcccagatcgccatccgcaccgacatcgcctcgcgcacctactacgaccgcaaacgcaccgaaggcaaaacccacacccaagccgtcctcgccttggcccgccgacgcctcaacgtcctgtgggccatgctgcgcgaccacagcatctatcaatccaccgcacctaacgccgcggcggcttgacaacttcattgagaa

SEQ ID NO: 1239 - DNA, 1464 bp, unidentified
  source 1..1464: mol_type = unassigned DNA; note = element_18020d6
  misc_feature 1..6: note = core
  misc_feature 7..241: note = LE
  misc_feature 242..1450: note = CDS
  misc_feature 1451..1464: note = RE
  misc_feature 24..236: note = bridgeRNA
gtccttaagttcgtaggtgcagttacttcgtgttgttacgttgtgctgtgacccgggtgggtcgggtgaggcgaatgagtcattgccggcctttgggtgcggcttgaaaggactggccgcccggcctgcttggacttcctcgggccgctgattgagatctgcgatgtgatcgcttgtttaaggaaatgctggcggggttgtccgtggggattatgttggcagacaagcgaagagaggttcgatgacagcgggccagttgtgggccggggtggatgtcggtaaagagcatcactgggtggctgtggtcgacgacaccggtgcggtggtgttgtcgcgcaagttggtcaacgatgagcaacccatccgaacgttggtggctgaggttgacggattggccgagcgggtgtcctggacggtggatttgaccacggtgtacgccagtctgctgttgacggtgctggccgatgccggcaagccggtgcgctacctggcgggacgcgcggtgtggcaagcctcgacaacctaccgcggcggggaggccaagaccgacgccaaagacgcccgggtgatcgccgatcaatcccggatgcgcggcaccgatctgccggtgctgcatcctgacgacgacttgatcaccgaactgcgaatgctcaccgcccaccgcgctgacctggtggctgatcgcacccgcacgatcaaccggctgcgccagcaactggtggcggtatgcccggccttggagcgagctgctcaactgacacaggaccgcggttgggtggtgctgctgggccgttaccaacgcccgaaagccattcgacagagcggtgttacgcggctgacccggatactggccgatgccggagtgcgtaacgccgcgacgatcgcggccgccgcggtggccgccgctaaaactcagaccgtgcggttgcccggcgaagaggtcgccgccggcctggtcgcacagttggcgcagggggtgatcgccctcgatgaacgcatcaagaccaccgacgccgacatcgagggacgatttcgccgccatccactggccgaggtgatcatcagcatgcccggcatgggtttccggctcggcgccgaattcctggccgccgtcggtgaccccgcattgatcggatcggccgaccagctcgccgcctgggccggactggctccggtatctcgagattcgggcaagcgcaccggacgactgcacacgccccggcgttacagccgacggctgcgtcgggtgatgtacatgtccgccctgaccgcgatccgctgcgacccgcactcccgcgcctattaccagcgcaaacgagaccaaggcaaacgcccgatcccggcgaccatctgcctggcccgacgccgcaccaacgtcctctacgcactcatccgcgacagccgcacctggcaacccgattcaccccccatcaccacgacggcggcttgacttcttcattgaga

SEQ ID NO: 1240 - DNA, 1158 bp, unidentified
  source 1..1158: mol_type = unassigned DNA; note = element_180757b
  misc_feature 1..2: note = core
  misc_feature 3..242: note = LE
  misc_feature 243..1148: note = CDS
  misc_feature 1149..1158: note = RE
  misc_feature 19..198: note = bridgeRNA
gccgcttgtgtcttggcttgccgttaggatgaaggtgagagcagcagggggcaggctgtagggccgcagtgttcgagcacgtgtaggagccggtcccgccccctgctgacctctgacgtcctagcccgaacagttgatcgagcttctacctcgaaccgcacaagcgtgggccttcgtcagaggcgctctcctcaccagtataggaggacctgacgatgaaggcagcctaggtaggaatcgatgtgtccaaggacatcttggccgtttgtgtattgccggataaacggcaacgcgactatgccaataccctcgaaggctggaccgagctgctcgatgagctcagcgggtatgaggtccagcgggtgctgctcgaagccaccgggggctacgaggctggagtgttgcgttacctggcggcggtaaacctacccgtggtgcggatcaatccgcgccaggcccgggcttttgcccaggccatgggtcgccaggccaagaccgaccggatcgacgcggctctgttggcccatcaggcccaggtgatcgaggggacggcgtatcagccgcagagcgcacaagccttggcgctccaggagctggtcaagcgtcgtacccacttggtcgcccaacgtgacgacgaccggcgtcgcctcgctaaagcgtcacttcccgccgtacaggccaatattcgccaatgcctggacttcctcaaccaacagatcgcttcgttgaaccaagccatcgcccaggcctgcaaggcactggacggcagccgtgcccagcgtctggccagtgtgagcgggatcggtccggtcagcgtggcgaatctcttggcttacctaccagagttgggccacctggaccgccgccagatagccgccctggtgggcgtggcgccctacaatgtcgacagtggcgccaagaaaggcataagacgcatctcgggcggtcgctctgcgatcaggcgcgtgctgtacatggcggcctggtcggtggtgcggcaccaggctgatttcaaccgccgctaccaagagctgcttcagcgtggaaagcccgccaaggtcgccctgatcgcctgtttgcgcgtcctgctgatacggctcaatgccatgctgagggacggcacgccttggcgatcagaaccggtgtgagaagacagtt

SEQ ID NO: 1241 - DNA, 1343 bp, unidentified
  source 1..1343: mol_type = unassigned DNA; note = element_1808287
  misc_feature 1..3: note = core
  misc_feature 4..78: note = LE
  misc_feature 79..1098: note = CDS
  misc_feature 1099..1343: note = RE
  misc_feature 1084..1332: note = bridgeRNA
tgatgatgtggacgccgctgccagcgcagcgccaggtatggtgctaagagagagtgcagcaaaacaggagcgttcgaaatgcatatcaaaacaatcggccttgatctggcgaaaagcgtctttcaggctcacggcgtcgacgaagctggcaatgcagttctgatcaagaagctgcatcgaaagcagatgattcccttcttctctaaattgccgccctgtctgatcggtgtggaggcttgcgcgacggcgcatcattgggcgcgcaccttgacagctatgggacatgaggttcggatcatgccgccatcatacgtaaaagggtacgttaaaaggggaaaaagcgacgcaattgatgctgaggcaatctgtgaggcagtagagcggcccacgatgcggttcgttcccatgaagacgatcgaacaacaaagcattctgatggcgcacagaacccgggcgctgattgtgcgccagaggaccatggcagcgaatgcgctgcgagcacatttggccgagttcgggttggtcgcaaaccccggtatcgccaatctcgtgaagctggccgacaaagcgtttgcagatgaaacactaccaccttttgcgcatcgggcgcttgaaatcctgatccggcgcatggctgaattgactgacgagatcgggatgctcgacgaagaactgaaggcttggcacgtcagcaacgaagcaagccgcaggcttgcggccatcccaggtattggcgtgatcactgctactgcaatagccgccacagttacagacccagagcaattccgctcgggaagacagtttgcggcatggctcggattgacaccacaacaacaatcaacaggagggaaaacccgcttgggtggcatctcgaaacaaggcgatcgatatctccgacgattgctcgtggtcggcgcgaccgccgtcatgcgacacgcgaagcgcaatccgaccccaatgaccgactgggtcaataatttgctggagaaaaagccattccggcttgtctcggtggctcttgccaacaaactcgcgcgcgtcgcatgggcgatactcacacgaggagaaacctatagaccttatgggctcgccgcataaacgcgcgacccgatccgaattggcaaaggcagtcaatgatgcgtaacgatcgagccaacggagagccaaacccgtctgattcaccgcgccccacaagcgcgctagattgattagggacctcttcagcggatttccatcagggccagcggcgctttcgaagccgcataaacaggccggacatatgaaagcaaccgattacccgcacctcgacaaaatcagcccttgccaaaggcggcgtccacata

SEQ ID NO: 1242 - DNA, 1453 bp, unidentified
  source 1..1453: mol_type = unassigned DNA; note = element_180b40e
  misc_feature 1..2: note = core
  misc_feature 3..221: note = LE
  misc_feature 222..1433: note = CDS
  misc_feature 1434..1453: note = RE
  misc_feature 7..220: note = bridgeRNA
ctaataggggtagagcggctcaagatagggccgttgtccgagccctcgatgggtgagcactttggtcggcggagctcgtgagctctaaggctagagagtgcccccatcgggaggcgaggagaggggacgaccggtgggatgttgtgcctcgagcactgctctattagctcgtcgtgactctccttggctcgggtccgcgcgtgcccgcagaggagatggcgatggtctttgtcggaatcgattgggcggaggcccatcacgacgcttgcctggtcgacgagatcggccgggtgctggccaagcgccgggtcgcagaagggctcgagggtgtaggcaagctgcacgccttaatcgccgagcactctcaggatccagcgtcggtggtggtcggcatcgagactgaccgcgggctgctggtgggctccctgctggccgccggttaccaggtttatgcgatcaatcctctggccgcgagtcgatatcgagacaggcatgcgacctcgcgtgcaaagtccgaccctggcgatgctcgggttctggctgacctggtgcgcaccgaccgtcaccaccatcgaccggtgtccggagacacggagcttgccgaagcggtcaaggtcctggctcgagcccatcagggtctgatctggagccggcagcgacaggtcaaccagctgcgcaatacgttgcgcgagttctacccgggtgccttggtcgcgttcgaagacctcgattcggcggatgccttggccatcctggagcgggcgccgacaccgagccagggccgcggacttgcccgggccaaaatcgtctcagctcttcggcgcggcggacgtgagcgcaatctggagaccaagggggccgagattcagaaccgactccgactgcctcagttggaggcgccgccgctggttgctcaggcctacggccgcagcgtcagcgccagcgtggccgtcatccagcagctcaacctgcagattgccgctctcgagaaagaactggccgcgaattttgagatgcacccggacgccgagatctacctcagtcttcccggactcggtcgcgtcctcggcgcccgggctctagccgagttcggtgacgaccggactcgattcgcacatcctaaggcgcgcaagaactacgccggcaccgctccgatcaccaaggcctcgggcacccgcaaggtcgtcctcgctcgggtggcccgcaaccggaggcttgccgacacctgctaccagtgggccttctcagccctcagcacctccgtaggcgcccgccaccgatatgacgtcttgcgtggtcgcggccagacgcaccaccaagctttgcgagcactcggcaatcggctggttggcatcctccacggctgccttgtcaaccgaaagatctacgacgaggacttcgcctggcgcagggctgtcgaagttgccgcttgacttttcagcccgtgggatgt

SEQ ID NO: 1243 - DNA, 1406 bp, unidentified
  source 1..1406: mol_type = unassigned DNA; note = element_1813a6e
  misc_feature 1: note = core
  misc_feature 2..222: note = LE
  misc_feature 223..1392: note = CDS
  misc_feature 1393..1406: note = RE
  misc_feature 13..240: note = bridgeRNA
ctacttaagacttgatggcagggctcgttcccggccaggatcgggtccaggtgcccggtgaggcgctctcgcagcggctgcccgccgtcgtcattggtgtggctctcacatggcttgcatctcatcgggcatcgtgccgggaatggctgaagaggggtctgcccagctcgaagtagcggtgccttcccgcacgacaccatcgatgtcgaatcgggaagggatgtgctggtgacggtcatcatcggaatggacccgcacaaacgatcggccacgatcgagatcatcaaccacaccgggaaagtgctgtccaaaggacaatacggcacagacaacgctggatataccgcaatgatggccactgccacgcagttccgtgatcgggtatgggcgatcgagggatgcaacggtgtcggccgtcatcttgcccaccgcctggttcacgacgatgaaatcgtggtggacgtgccagcgaaactgtcggcgcaggtgcgagtgttcgccaccggcaacggccgcaaaaccgacccggtcgacgcgcacgcggtcgcgttagcggcgctgcggtcaccgaatctacgtcgggtgcaggtggattcggaccttgtcgcactcggtatgctggccgaccgccgcgatgagttgggccgggcccgcaccgatacggtcaaccgattacatcggctgctgctggaattgctgcccggtggagcgaagaaattcctgtcagcgatgcaggcccgcaagctcgtcgcgaccgtgaaaccacgcgatcccgccggcaaggtctgccgtcgcctggccgtcgaggtcatcgaggacctggaacggatcgaccgcaagatcaaagccgcggacagagaactgcgtgagctggtcggcgaacgcagcccgatcttgctcgagctcaatggcatcggaccgtccggcgcggcccggttgctggccgatgtcggtgatatccaccggttttccgaccggggccggttcgcatcctggaacggcaccgcgccgctggatgcgtcctcgggtgagcagaaacgccaccggctctcccgcgccgggaaccggcggatcaaccgggtcctgcacaccatggccatcgttcaactacgcaatcccagctcgggccgcacctattacgacggcaagaaggccgcgggcaaaacgtcgatggaagcgatgcgggcgttgaaacggcggctgtcgaacgtggtctacacggccatgctggccgatcaacgacatcgtgaaacggcaagtccgggagggcaatcgggggcgactgctgactccagcgcgaccggcgcgaccccgaaaccggtccttcggacaagccacagcccggacctaccaaaacccagcctaacccctgacccgccaagcacaccttgacacgagaggggagc

SEQ ID NO: 1244 - DNA, 1413 bp, unidentified
  source 1..1413: mol_type = unassigned DNA; note = element_181dc08
  misc_feature 1..2: note = core
  misc_feature 3..105: note = LE
  misc_feature 106..1122: note = CDS
  misc_feature 1123..1413: note = RE
  misc_feature 1175..1410: note = bridgeRNA
taatgacatggccccagccttcttcccacgatgcctcagacgaggcaagatgggtgctgttgaccgcgtaacgcacacgcatcggcaggaagaagggagggccttatgtgtctcacgatactggggatcgatttggcgaagaatgtcttccagttgcacgggacggatgcgcgcgggcgagcggtgttcagccgacgcgtgaagcgcagtcagttgttggacgcggtggcgagcctgccaccctgtgtgatcgggatggaggcgtgcgggagtgcgcatcactggggccgggcgtttgaacagctcgggcataccgtcaagctgatgagtcccaagtatgtccggccctatgtcaaaaccaacaagaatgatgggcgggatgcggaagcgatctgcgaagcggtaagccggcccaccatgcgttttgtctcgatcaagacagtggaacaagccgacaggcaggccttgcaccggacgcgatcgctcttcgtgaaacaccggaccgccgtcatcaatcagattcggggcttgttggccgggtatgggttggtgattgcgcaatccccggagaaggtacggccagccgtagtccgttttctggatgacgcggagtcgggattgaccgcatttgcccgcgacaccttttccgagttgtacgagcaactgaaggatctcgactcgcgcatcgagcgggtgactcaccgggtggagcgcgtgtaccgggcgcatccggtctgccggaaactggcggtggtgccggggattggtccgttgacggccacggcgctgttggcgaccgtcggtcagcccgaggcgtttcacaacggacggcatctggccgcctggttgggtctcgttccgcggcaatactctagtgggggcaaggagcggttaggcgggatatcgaaacgaggcagtcggtatgtgcggacgctgctgattcatggggcgcgcgcggttgtgcagcgtgccgaacggaggaccgatatgcaggggcgatggcggtgcgcgctcaaacgccgcaaaggcaccaatgtggccgccgtggccttagccaacaaaaatgcccgggtgatctgggccttgttggcccatgatgagttgtatcgaccacccgcctaggcgcaggaagggtcggaaacggtttgtgaggagtagcgaaccgcatcacaccaaggagtgccgcgcagatgatccgtgatgacaccagagggacacccagcgcgttcagaccctggacaaattgtcggccgggacaaggccgttgtgctaatgaggagaacgcgcgcgtatttcatcaaggcccggacacatcggttgtccaccaagaggccggatatatagacgcagcccggcattttatgggttcatcgcgtgacacgacgccgttgcaccgaaggctgggtccatata

SEQ ID NO: 1245 - DNA, 1388 bp, unidentified
  source 1..1388: mol_type = unassigned DNA; note = element_1820274
  misc_feature 1..3: note = core
  misc_feature 4..264: note = LE
  misc_feature 265..1287: note = CDS
  misc_feature 1288..1388: note = RE
  misc_feature 35..238: note = bridgeRNA
tctcctatgtttgcaaagttaatttagaagtttttacttttttaaatttgcattattaaagtgaaaaagaatgagagtgcattcgcgtctaaatagttcgtagaaacatattctcgcaaagaaattacctcattcttttttatcttttagagtctgaacagaatgtaaggaattaagcagtgcttaatatccagaatatccaatcaggagaaaagacgaaggaagattcatcactttatatattaaatttaagacaagtaaatgatgggtaaaattgtaaaacaagtagcaggaattgatgtagctcaaaaagaattggtagtgactttaggacatcttttagatgatttttcgatagaattatttgcctataaagttttcaaaaacagtgattctggttttaaatcattggttgaatgggcaaataaattaacagacaatcaagttgatgttctgtatgttatggaagctacgggtgtatatcatcaaaagtttgcttatttcttaactgacaataattataagttaagcattgtactgcctaataaaatcagtaattacatgcgaactttggaattaaaaaccattacagacaaaagctgttctcaggcaattgcccaatttggtttagagcgaaaattggataagtggtccaaaccaaaacctacttataaggaattgcagcagttaaccagagaaagagatcagattgttcaggaaagaagcattattaaaaatcaaatacatgctgaaatcacagaagctgaaccaaatcagagaagcatggagagaatgcaggcaagaatacgttttttgaattcacaggagaaagaaattaaagaggatattgagtggatcgtaaaagaaaatccggatataagacaaattatagacaggataacaaccataccgggagttggggaactgacagctgtaattgttctggcagaaacaaatggttttgagctaatcaggaataaatctcaattatccagttatgcaggaatggatgtaaaagaaaagcagtcgggcacatcagtaaaaggaaagcccagaatatctaaaaaaggaaatagagccttaagaaaatcaatgcatctgccagctcttactgcggtaaaatgggatgacaattttagggagacatatgcaagattggtatctaaacacggaattaaaatgaaagccttggtggctattcaaagaaaaatattgcaattgatatatgtcttattcaaaaatgaaacaatttatgacaaagattattcgataaaaaaaatagcgtgaaaacacataaggtttaacacgctatagagactagctcaatgactgtcttgaaaaacaaaattaagaaaaattaagatttaaaattggaaatcaacacagaa

SEQ ID NO: 1246 - DNA, 1375 bp, unidentified
  source 1..1375: mol_type = unassigned DNA; note = element_1824463
  misc_feature 1..3: note = core
  misc_feature 4..86: note = LE
  misc_feature 87..1121: note = CDS
  misc_feature 1122..1375: note = RE
  misc_feature 1144..1362: note = bridgeRNA
tgatgctgtggacggcgcccactctacggcatcgatgtgccaaagggtggttgcgttgaagcgaaccacaatgaggggagccgtccatgggcgaggttagcacaattggtctcgatattgcgaagtcggtgttccaggttcacggggtggatgctgatagcgcggtcgtgatccgcaagcggatcagccgcgtgaaggtgttggagttctttgcggctctgtcgccatgcctggtgggtattgaggcgtgtccgagcgcgcatcattggagccgcaagcttcaggcgctcggccatacggtgaagctgatgcccccgagctatgtgaaggcctatctcaagcgcagcaagaatgacgcgaacgatgctgccgcaatctgtgaggcggtgacgcggccttcgatgcgtttcgtgccgacaaaatccgaacagcagcaatcaggtctgatgctgcatcgcagccggcagcttctcgttcgtcagagaacgatgctgtcgaatgcgatccgcgggcacatggcagagctcggcatcatctcggccaagggtcgcaatggcacggccgagctgttggaggtcattgcgaatgcggatgacgaccgcattccagcggttgcgcgattgagcctcgatgctcttgctcggcaatacgcaaatgccacggcagagatcagagccatcgagaagcatatccatgcctggcaccgatcgtgtgaagaaagccggcggcttggggatgttcctggcatcggtccgatcgttgccactgcactggttgccgaggtgggcgattggaaagcgttctcgtcgggccgcaatcttgcagcctggatcgggctagttcccaagcagcattcgacgggtggcaaagatcgactcggcgggatctcaaagcagggcaatcgatatttgcgatggctgctcgtcacgggagctatggctgtcatccgatacgcgcgccagcacggcacaaagcggctctggctcgcgcgtatcatggaacgccggccaatcagggtcgctgccgtcgcgctggccaacaagatcgcacgcatggcctgggccatgatggtccgcggggaacgcttcaaggagccaagattaatctcggaagcggcatagctaagagtagatcgagagcttcaacgaattggcgagggcatgacgacgtaatgcagatacggtcgttccggggatcgggagaacccgcttgggtcatcgcatactcgaatgcgtgttcgcgattgggacccgatccgcgcagagcattagggccagcggccatacctgccgcataaacaggccggacacgtgaccgcacccgaccaatgctgcacctacgtcaaaaaagctcttgccagggcgccgtccacacg

SEQ ID NO: 1247 - DNA, 1380 bp, unidentified
  source 1..1380: mol_type = unassigned DNA; note = element_1829bde
  misc_feature 1..3: note = core
  misc_feature 4..85: note = LE
  misc_feature 86..1114: note = CDS
  misc_feature 1115..1380: note = RE
  misc_feature 1089..1367: note = bridgeRNA
tgatggagtggatgccccctcccgacggcatcgcgatgtgccaaagtgatgtttgcaacaacgtcactcagaggagagagcatccatgaatgaagttagcattgtaggccttgaccttgcaaagcgggtatttcagctccatgctgccagcgccgatggcggtttggtatttcgtaggaagctatctcgcgttcacgtcttggctttcttctcggaattgccgaggtgtgtcgttgcgatggaagcatgtgctaccgcgcattactgggctcgcgagatcgggaagcttggccatgaagttcgcttgctgccacccgcttatgtgaagcctttcgtcaaacggcagaagaatgacgcggcagatgctgaagccattgtggaggccgccttccgcccctcgatgaggtttgtcgtgccgaaaacggagaagcagcaagcttcttccatgatctttcggacgcgcgatctattcgtgcgtcagcggacgcagctgattaacgcccttcgtgctcacttggcagaacatggggtgattgcaccgcaggggcttgcaagcctggccgcgttgagggtgatcgtggaagacgatgatagcggccttgatctcctggtcgtggaaactgcccggatttatttggagcagattgatcttctaactgcccgtatctccaatctggagaaggtactcaaatctgaagctcagcaatcggataataccgctcggctgatgtcaatgcccggcataggaccgatcacggccatggcgatcgaggcttttgctccaaccatgacgacgtttcagaagggacgcgattttgcagcatggctcgggcttgtacctaaacaacattcgagcggtggaaagcaggtgcttggccggacgtcgaagatgggacagcgcgatatccgacggcttttgattatcggcgcaatgacggtgatccgatgggcatgccgaaagcccccctccgagagctcgtggctggggcgtatgttgacgcgcaagccgcgtatgctcgttgctattgcgttagccaacaagatggcacgatccgtctgggcgatgatgacgaagaaggagaattacaaagattccggtctcgtaaccgcgtaagcaaagctagcgatatagcgagaccggatcgtcggcgtgtgaggagatcagcgaacggtaaggacaagagattggaaagaggggtgggaaatgccgccggctcagtgagcctcgagctcgtagaactgatttgcgccagccccgcttagctccataccggccagcagtaatatccagactgcatcaaaggcctgatacatgaccgcatccaatcacacgttcaaaccgctcaaagaaaaacttgcatgaacgggggcatccataca

SEQ ID NO: 1248 - DNA, 1108 bp, unidentified
  source 1..1108: mol_type = unassigned DNA; note = element_1832472
  misc_feature 1..2: note = core
  misc_feature 3..164: note = LE
  misc_feature 165..1097: note = CDS
  misc_feature 1098..1108: note = RE
  misc_feature 1..166: note = bridgeRNA
cctgtgtgtggcgcctatggcatgatggttgcgggcgggagatcgtggggtccctggtcgtaagaccgtgagccggcgtgatccccgcccgcacaccaaaccacccaacctgaacagttgaccgaggccgacgcaacggacctcgcagcacagggataggcaccatgattatacaccctggctttgtcggaatcgacgtctccaaacccatgctcgatgtttttgatgccgcgatcgggcgcagcgagtgcatcgataacacgagcgcgccgatcgcggctctggtcgcgcgctggcgttccaaggacgtgttcgtcctgttcgaggcgacgggcagctatgatcgcctcctgcgagacgctctgactgaagctggtattcgcttcgcccgcgtcaatccagcacgggcgcgcgatttcgcccgctcggcaggttttctcgccaagaccgatgcgattgacgcacgaatgctggccgccatggcgcaatgcctggctcccgagccacaggcggcggccaatccagtccgcgagcagctcgcgcgtgcccataagcgtcgtgatcagctcgtctatgctcgccagaaggagcgcacccgccgcagcgaatgtgtcgatccggacatcgcggccgatatcgacgatcatttggattggctcgatcacaagatcgtcgcctgggaccgcgagatcgaccgcctcatccagcaatcggaggaactcgcgcaggcagcccgtcggctgcgctcgatgcccgggtttggccccgtcgccacgacgactctccttgccttgatgcccgaactcggcacgctgtcgccaaaggcggcggcggccatcgccgggctggcgccgttcaatatcgacagcggtcagttccgcggcagccgcagaatcaaggggggacgcaaacgggtgcgtgatgcgctctatatggccgctctagcagccgcccgctgcaattctcgcttcagagctttctaccgctcgcttcgagccgccggaaagcctgccaaagtcgccatcatcgccgtcgcccgcaaacttctgatcaccgcaaatgccatcctgcgagacaagtctgcatatcaacgctaacaaaacagttg

SEQ ID NO: 1249 - DNA, 1422 bp, unidentified
  source 1..1422: mol_type = unassigned DNA; note = element_183ad02
  misc_feature 1: note = core
  misc_feature 2..80: note = LE
  misc_feature 81..1112: note = CDS
  misc_feature 1113..1422: note = RE
  misc_feature 1195..1413: note = bridgeRNA
taatgagatggtccgcctcttgatcaaccgctgggagtggttggtcttgtggcaggttttatccaaggaggatcatcgacatgcagattcgttcagttggcatcgatcttggcaagacgacctttcatctggtgggacttggcgacggcggcaaggtgctgttgcgaaggacgttcacccagaagcaactccttacgttcaccgctaacctgcagacctctctgatcgggctggaggcctgctcgggggcgcacttccttggccgggcgttgcgcaagcaaggccatgatgtgaagctgattccggctcagttcgtaaagccatttgtgaagtcgaataagaacgacttcctcgatgccgaagcgatcgccgaggcggttgatcgtcagaacatgcgtttcgttccgattaagacggacgaccaactggatctgcaagctatacaccgcgtgcgcgaccgtctgatctcgcgccggacggcagtcatcaaccagctgcgtgccttcctgctggaacggggcatggtcttcgccaagagcccagctaagctgcgcagggagcttcctgatgtgctggagaacgccgaccagaacctgacgccgcgtatgcgcgacctgctcgctctgctgtggggtgagtggaaggaactggagcagcaggtggaagggctgaaccgagaagtagagcagatcgcatgtaccgatgcggcgtgccagcgcctgcggcagatcccgggaataggcccgttgatcgcaaccgccatcgtcgctgccatcggcaacggtgctgcgtttcgcaagggacgcgagttcgcggcgtggatggggcttgtgccgaggcagtactccactggcggcaaggcgaagctgttcggcatcagcaagcgtgggaaccgttatctacgcaagatactgatccatggggcacgcgcagcagtcattcgtctcaagcgcgagcgagcgccgatgggctcatggatgactgcgctcgaagccagggcaccgcgtaacgtgctgatcgttgcgatggcgaacaagctggccaggatcgcatgggccgtgttgtcgaccggcgaagattaccgagcgctctcaagcccaactaccgcgtaagcaagcgtggaaaagacgcctccggcttggaaagcgctcacgctctttccactttcccacccgacgacgacgacttgagttttcccaccaaggtctgtaccggaagagtcaggatggaagaacagtcacaacggcgtgcctgaaccctgcgcccgaaaatggtcttcaacgaccgaccgacttatcaggacaggcacgcgcgtatctcatcatggccaggagatcgcactccacacgtaggccggatacattgacgcagactttcttcatccaccaactcttcccttgcagtcaaacggcggaccataca

SEQ ID NO: 1250 - DNA, 1328 bp, unidentified
  source 1..1328: mol_type = unassigned DNA; note = element_183ed6e
  misc_feature 1: note = core
  misc_feature 2..253: note = LE
  misc_feature 254..1312: note = CDS
  misc_feature 1313..1328: note = RE
  misc_feature 16..244: note = bridgeRNA
cagtgaagattggacgggtcctgatcatggacctggtcttgccggcgggtctgacccgaacctgacctgacccggagtgtcttcaagggagctgtcggcccgtccggcaggaccacgcgtgctgcacgcgaccggacgggctcgtgtgacctgatacgagcttgcgcgaccaagccttgtcactggtgtgtccgcccgcccggccggtgcgtgcctgtcctgcccggtcgtcgagcagaaaggccaccccagcatgcccaagcgcaccaggattgtcatcggcggtgtcgacacccacagtcgcacccaccacgctgccgtgctcgatgagcaaggacggctcctcggtgaccgggagttcccggcagaccatagcggctaccgccagctgctgagctggcttggtcgccacggccaggtcgaggtggtcggggtggagggcaccggcagctacggcgccggcctgacccactacctgctggaccagcgggtacgggtggtcgaggtcgactggccggaccggcggacccgccgccagcgtgggcggtctgatccgatcgacgccgaggccgccgcccgcgcggtgctggctggcacggcgaccgcggtccccaagcgccgcgacgggatcgtcgaggcgatccgggtgttgcggaccgcccgccggggtgccagcaaagcccgcaccgcagccatcaaccagctcaaggcgctgctggtcaccgcaccagcctcggtccgcgaggcgctcgacgacctctcggtgtcgacgttggtcactacctgcgccaggttccgacccgacgaggctgatctggccgacccgctgcacgccagcaaggcagcgctgcaagccgtcgccaagcgcatcgagctgctcgaggccgagctcgagctggctgaccggcggctggccaaactggtcggtcgggccgcgcctcggctgctggcgctgctggcgatcggcaacgaccacgccggccagctgctcgtcactgccggccagcaccccgagcggctgcgcggcgaggccgccttcgcccacctgtgcggggtcgcccccatccccgccagctcgggcaagacccgccgacaccggctgcaccgcggcggcgaccgcgacgccaaccgggccctgcacctggccgtggtggtccggatgcggttttgtccccgcacccgcgcctatgtcgaacgacggaccaaagaaggcctgtccaaacccgagatcatgcgctgcatcaagcgctacctggcccgcgaggtctaccacgccctcgtcgccgacttcgaggcacttcacgccacttgacgatctatacgagcat

SEQ ID NO: 1251 - DNA, 1357 bp, unidentified
  source 1..1357: mol_type = unassigned DNA; note = element_1844399
  misc_feature 1: note = core
  misc_feature 2..76: note = LE
  misc_feature 77..1105: note = CDS
  misc_feature 1106..1357: note = RE
  misc_feature 1109..1347: note = bridgeRNA
tatggatggcccgcccctcaccgggctgccctgctagccttgcagggtcgctaagttgaagggacggagcgggacgatgacgatcgcggtgctggggatcgatctgggcaagaacagctgcagcctggtcgggctggacgggactgggcgggtcgtgctgcgccgccggatgcggcgcgagacggtgatcgccttcagcgcgaagttgccggggtgcgtcgtggcaatggaggcgtgctgcggtgcgcaccacatgggccgagccctcgtggagcaggggcacacggtccgactgatgtcgccggaatacgtgcgcccgtacgtcaaggcgcagaagaacgacgaccgcgacgccgaagccatcgccgaggcggccacccgcccaacgatgcggttcgtggcgctcaaatccgaggcgcagctcgacgtgcagaccctgcaccgggtccgcgaccagctcgtgggcgagcgcacggcgctgatgaaccaggtccgcgccatccttctggagcgcggctatgtcgtagcgcaggggcgggccaagctggctgcctgtctaaccgagttactcgacacggaggcgggctcctccctcacagcgcgcatgcgcacccttgtggcggagctgcgcgagcgctggcagagcctcgaccggcgcatcgccgcgctggatgccgagttcgccgagcaggcgcgcacggacgagaacgcgcggcggctgacgaccatcccgggcatcggcgcgctcaacgcgaccgcgctggttgcggccatcggcgacgtggccaccttcgcgcgcgggcgcgacctggcagcctggctcggcctcgtaccgcggcaggtcacgaccggagggaagcccaagctcgtcggcatcaccaagcgcggcagcaagtacctgcgcaagacgctcatccagggcgcccgggccgcgatgccgacgctccggcagggtgacacgcggctcgggcagtggctgcgcgggttgctggcgcgagcgcacaccaacacggcggtggtggccttggcagccaagatggcgcgcatcgtctgggcgctgctgcgccacgggcgcgtctacgaggcaacggccgtagccgcctgatccgagttcggccggcgcggcgggcgccggccttccgatgtctgcgagcggtgagaggaagatggcctgacagtcgaccggtgttctggaagcctcccggcaaaaatggcgcatgacgccgacccctttatgaggcccaggacgcgcggatctccatcttggccaacggctctgccagaaggccggatacgtttatgcagactgctcagaccagcggatccagagccacttgcggacggggcgggccatacg

SEQ ID NO: 1252 - DNA, 1308 bp, unidentified
  source 1..1308: mol_type = unassigned DNA; note = element_1849135
  misc_feature 1..2: note = core
  misc_feature 3..192: note = LE
  misc_feature 193..1152: note = CDS
  misc_feature 1153..1308: note = RE
  misc_feature 32..202: note = bridgeRNA
cttgtgtccccgaaatctgccagaatgtgacaacgggcggttctcgcaaagccgcccgttgccggaactgagcccgttgcgcccaaaggcgacagagcctgtaaacagagcaagggacagctccggtgtcttcctcaacccgaacagttgcaagggcttcgagcccgaaccaggcaaggaagggagtggatgatgacacaaaacaatccggttgtcgtcggtatcgatgtagccaaggacaaggtggatgcatgcattcgaaccgtaacggagcggaagacctgccgcacgactgcagcgggacaacgcggtttgattgtatggcttcgcaagcatcaggtcggcaaggcggtgatggaggcaagcggcggctacgagcgggtctgggtcagagcgttgcgccaagccgatatcgaagtgcgaattgtcgatccaaaacgggttcgcagtttcgcggaatcggctggacgccttgcgaaaaacgataagatcgacgcagagatgattgcctggttcgccgagacattcagcgaggcgccaagccaggtcgacgatcccgcacatgaggagatgaaggcgcttgtgaagggacgcaaaagcctgatcgatgtcagagctcgcctggaaatgcagaaggaacacgagttgccggctcttgttcgaaaggctcacgcgcgtcttctgaagaagttggctggcgagatcgccacgatcgagactgcggtcgtggcgaagatcaagacaacgccggcatttgccaagcgcgctgagatcatccagagcgtgccgggctttgccgaagcgaccgctattacgctacttgcgggactaccggaactcggacaggtgagcaacgaagtcgccgccgcgctggtgggcgtcgctccttatgacgatgacagcggaaagcgtcacggccaacgctgcatcaaaggcgggcgccgctgggtccgaaatgccctctatatgccctgcgtcggcgcagcgacgctgaacaatccggtgttcaaggtcttctatcagcgcctgattgccaaggggaaggcgccaaaggtcgcgctcgtcgcctgtatgcgcaagctgctcgtcatcctcaacaccatgatcgcccgcgccgagaagtgggatacgaaacgataccagatgctttgacgagcgcgccgatcatgcgctcggacctcggccgagcgcatgccaagctcaaagaccggcgaactgacggggtcaaggcccgcgccgccgaaggcgggggcgcgccagcgccagccttgaggccggctgatcgacggtcttcttccaacccagttg

SEQ ID NO: 1253 - DNA, 1355 bp, unidentified
  source 1..1355: mol_type = unassigned DNA; note = element_1849e95
  misc_feature 1: note = core
  misc_feature 2..74: note = LE
  misc_feature 75..1100: note = CDS
  misc_feature 1101..1355: note = RE
  misc_feature 1124..1352: note = bridgeRNA
taatgagatggtcacctccacaccctgccagggctaggctttggcagggtgttttattcagggagaccatcatcatgagcactgcatcgctggtagggatcgatctcggcaagcacagttttcatttgcacgggcaggacaagtccggacgtgcggtcttccgcaagaaggcaacacgccaacagatgatgcggctgctgggtaacctgcccagttgcatcgtggtgatggaggcctgcgcgggcgcccatttcaccgcacgtcagttggtggaattcggccatgaagtgaagttgatcgctccgcagttcgtgcgtcctttcgtcaagggcaacaaaaacgacttcatcgatgccgaggcgatctgtgaagcggcctcccggccaacaatgcgtttcgtaacgccgaagacagaggcacagcaaacgctgtccgtcttgcaccggatacgagaatccttggtgcgtgatcggacgaagaccgcgaatcaggtccatggcttcctgctggagtttggtatcagcctgccgaaaggattgtcatcagtcaggcgtcttccgagcacattgtccgagcgtgagttaccgtcgcgtctatccatgctgctgatgcggttgcacagtcatttctgctacctggagcagcagctcgtggaactcgataaagaacttgcaaacgagctggctgaggacgaccttggcagccgcttgatgagcgtccctggcgttgggccgatcacggcaagcctgctgtcggcagagctgagtgatggcaagcagtacggctgtagccgtgatttcgccgcctcgctgggactggtcccgcgccaatacagcacaggcggacgaaataccctgctgggcatcagcaagcccggcgacaagaacctacggcggctgctggtgcaatgcgccaggtcctacctgcagcgagtggatcgtcatcagggggccttggctgactgggttcgctcgttacgcgaacgccgccactcgaatgtggtggcttgtgccttggcgaacaagctggcccgtattgtctgggccatagcggccaatcactcggagtttgaggcaaggccaagcgtctgcagcgcctgaccttgcatttaccgctgtaccaaggaacaccctttcaggttttgcgatcactggacaactgatgacgtgaacggcacaccggcctggtggacaccctgaagcaaagactggccttcgaggccgcgctttttcttaggaccactgggcgcgattctcatcgtggcgcggggcatgccccatgcagacgccggatagattcaagcgagcccaacactcgtcgttgaacggtattgcagaaacgggggtgaccataga

SEQ ID NO: 1254 - DNA, 1646 bp, unidentified
  source 1..1646: mol_type = unassigned DNA; note = element_184fe4a
  misc_feature 1: note = core
  misc_feature 2..269: note = LE
  misc_feature 270..1520: note = CDS
  misc_feature 1521..1646: note = RE
  misc_feature 13..289: note = bridgeRNA
cctgttacaataaaattgtccctaagatatggtaagcagccataggcaagggacatctcgttgcctaagctgtagaatggagaggtaatggtctgaccttcacctccaagggcatcctcgcccgtgagtaagtcagtcagccatcctcccattcgcagcgttcgatttgtgcaggttgagcctgagcgttcgtgtcagcaaacagatggaatcggcaatgggaaaagatggccttcgtccattgcaaattgatttcaggagtgttgaacatgaacgcagcaggtattgatgtttccagcagaaagagcaccgtagcagtactccgtccttttggtgaagtggttcgggtaccttttgaggtaaaccacagcgccgagggccttgccagtctagtccagcagttgaaaggcattgaaggggaaacccgcgtggtcatggagcacaccgggcgctactacgaagcagtagccaatgtgctgcatgaagctggtttctttgtcagtgctgtcaaccccctgctcattaaggagtatggaggcaattctctgcgcagggtcaaaacggataaagcggacgctgtgaaaatcgctcgatacgctcttgacaactgggccgatctgcgggattatactcctatggacaggattcgttacgacttgaaaaccctcaaccgccagttccatctggcctccaaacataaaaccgccactgccaacaacctgattgccctgctggagcagtccttctccggcgtccgcaagtgctttgacagtccggtccgcagggatggcacccagaagtgggtggactttgcccatgacttctggcacgctgactgcgtccgaaagcacagcctggctgcctttacagagcgctaccgcaaatggtgcaagcgccacggttacaacttcaagcagagcacggcccggcaggtctatgaccttgccaaatccgtggtagtgttggtgcctaaaagtaatctgaccaaggtgctggtacaggaagccgccaaccagctcaccattatttccaagtctttggaaacttaccgggctgagatggaccatctggcctctcagctgccggaacaccccgtagtgatgggaatgtatggtgtgggagactccctgggtccccagctcatggcggagattggggatgtgcgccggtttgagcggaaacaatccctcgtggcctttgcaggcgttgaccccatgcccaaccagtccggggagaaaaacgtccgcagcaacaaatcctccaaacgcggttcgccctatttgcgcaaggcattattcaatgtgatgacctgctacttacagaaggcgccggcggacgagcctgtattccagtttttggaccgcaagcgtgcggaaggaaagccttactacgtctacatgactgccggggccaacaagttcctccgccgttactacggcaaggtcatggagtatctctccactctggaggatctgctgccggtagatatggattccaccggattaccgaaacacccttaatctcttcccaactcctctggccggcgctcggcggcggcctttttgtgttgcccatttttactcaccctctccctgcaaattttcttctgtcaagtcctcttgggggcttgactttttatttgcagg

SEQ ID NO: 1255 - DNA, 1534 bp, unidentified
  source 1..1534: mol_type = unassigned DNA; note = element_1860e04
  misc_feature 1..2: note = core
  misc_feature 3..206: note = LE
  misc_feature 207..1421: note = CDS
  misc_feature 1422..1534: note = RE
  misc_feature 3..220: note = bridgeRNA
cttgtattataaagtagtagttatcagagcccatctccaagggctatgtgctacactgtaagggatgctgtggattggttatcatctcctaccacaagatggttcacgataggttccaaccacagccccttacgattttgttgatcagttaaataccgccagacggtttatgtggaacaaggctacaaaagtaaggcgtactgtggatgcagcatcacattttttcgctggaggtatttgtaatgatgatttctgttggtgtcgatgtttcaaaggataagcacgattgttttatccaaagttcagagggagaagtcctggcagatgtgttcacaattcccaacaacgcagaagggtttcacttcctgctgcaacgaatccgggattgcaccacaccacaggacaaaataaaggtagggctcgaggctaccgggcattacagctacaatctgcttggattccttcttgacaatggtctggccacctatgtcctgaaccccttgcgtacaaacctttaccggaaaggcttcagtctcagaaagaccaaaaccgaccgggtggatgcacgaacgattgcggctatgttgttatccgatacgggcctcaaaccctacacaaatacagcatatcacaacgaggagctaaagtcactaaccagataccgttttgacaaggtgaaagaacgggcaaaattgaaaagttctatctcccgactggtctgcatcctgtttcccgaactggaaaaactggtgccttctctgcatattacctctgtctacgctttgctggaagaatttccgggagccaaacagattgccaacgcccatttggcaaggctgaaagcacttcttgaatcttcttccagaggccgttacaaacgagatatgactgtagagatccgggatgcagcaaggaactctattggctctcgtatgcctgccaagtcccttgaattacagcacaccatccgcctcatccgtgaactggatgtcgagattgctgaaattgaagagcagattcagtccttgatggaggaacttaattcccctattaccactatccccggattgggcttccgcatggccgccatgattttagctgaggtgggagacttcacccggtttgactccccagacaagctgctggcttttgccggaatgtcgccatccacttaccagtccgggcaactcaaaaactgttacccacacatggaaaagcgtggttcccgatacttacgctatgcactttacaacgcaaccaaatatgtctgtcactgggatccgacctttgccgcctatcttgccaagaaacgggctgagggcaaacattacaacattgccatttcccatgctgccaagaagttagtgcgtttgatttttgctatggagaaatccagaacgacataccacttggcaacttaattccttgcttgatagttagctgggacctctctgggtctctgctttgctatacctttgtaaaccatctgattttcaccacccttcatttttagggttgacttttaatagttaat

SEQ ID NO: 1256 - DNA, 1200 bp, unidentified
  source 1..1200: mol_type = unassigned DNA; note = element_186877e
  misc_feature 1..2: note = core
  misc_feature 3..207: note = LE
  misc_feature 208..1188: note = CDS
  misc_feature 1189..1200: note = RE
  misc_feature 37..213: note = bridgeRNA
cttgtcttatgcattccgtgtcgcggcgtgcgacaaaggactgatttttccggggtggccaccccggaaaaatcaggaaggggacgggtcggcaacaggcagaccgtaatgggtcgtcttgagagtatgaccaccccttcttttccttgtgccctgaacggatacccgaggttcggcctcggatgacaagcataggacatggaaaagatgacgcatccagttgcggcttccaaggccgagttgccacccgcatcgatcacaattgggatcgatgtatccaaggatcatctcgacgccgcccgtcaccccggcggtgataccgtccgtgtcgccaacacccgcaagggccagaccgctcttctgcgctggatcggcgacatcaaagccgctgcccgggtggtgttcgagccaaccggcccctatcaccgcacactggaggaacgcctggcggccgttggtatcccgcaggtcaaggttaatccacgacaggcgcggcgtttcgccgaagccaccggcaaactcgcgaagacagatcgcgtcgatgcgttgatgctggcacgctatggtgccctgctggatccggtggcgcgtccagtccgcacggatctacagaaccgtctggccgaactgatggctgcgcgccgcagtttgatgcgagaccgcacggcaacgctcaatcgtctcaggaccctcacgatcggcttgctgcagcgccacgcgcgtcatcgcctgcggcagatcgaggcgcaggtcacatccctcgatgcggcaactgacgcgctcgaggcggaagatgcgcatctgtctcgacgccgggacgtgctggccagtattccgggactgggaagggtcacggctcatgcgcttctggccgacatgcccgaactcggcatgatggaagaaggtcaggcagctgcactggccgggctggcacccatcacgcgccagtccggcacatggcgaggccgcagcttcatccagggtggtcgtgccaccgtaagacaagctctctacatgccggccatcgtcgccatgcggttcaacccagacctcaagcgtgtttacgatcgccttatcgcaaagggaaaacacgccaagatcgccattaccgcaatcatgcgaaagctcgttgtcctcgcaaacgccctgcttcacaaagatcggctttggacgccaaaagccgcttgaccacaacggata

SEQ ID NO: 1257 - DNA, 1180 bp, unidentified
  source 1..1180: mol_type = unassigned DNA; note = element_186a74e
  misc_feature 1..2: note = core
  misc_feature 3..220: note = LE
  misc_feature 221..1165: note = CDS
  misc_feature 1166..1180: note = RE
  misc_feature 3..198: note = bridgeRNA
cttgtatgtttacaggtgtcggggtgagggaccagagccgctatcggctgttggcgcagaccgaccgtgttagacccctctcaccccacctcatagcgtcgataaggaactgtgcagcacgcagccgtcaggctgcgtgactgccgatctgaaggcaagccaacgcacgtaggtggagcagcaccccgacaggaccattgtctttgttggaggtgcttttatgcaaacaagcttcatcggagtggatgtctccaagtcggagttggtcatcagcgtagatgatcagccgcctctgagcgtagccaatgacatggcgtatatcactcgctggctagctgcaatgccccgcgattgctgtatcgcaatggagtccacagggcgctatcacctgctgcttgctcagcttgcctcgcaagcgggcttggtggtctatgtgctcaatgcacgggatgtgtatttctacgccaaagcccttggggcgagggccaagagtgatgcactcgactgtgcagtgatccgacgctacgtgcaggagcactatcagagcctgtacccgtggcagccgagtacggaggttcagcagcagttacatgcattgctgagacggcgtgcgcaagtcagtgcccatcaagctgcaatcaaacaaacactcaaacacatctcactacccgggcagcaactagccagcctgatgcagtcactcaaagacttgctggaagcaatggacaggcaggtcattgacctgattgccaaggacgatgtgatgcaacaaggctgcacccgattgcagacgatcacgggcatcggcccgcaaaccggagccttgctcaccgagttactgagccgcttgcactttgccaattcggatgcactggtcgcctatagcgggctggatccgcgagccaacgattcaggcaccaagcgaggaagaaggcgtttgagtaagcgaggcccggctttgctgcgcaggcagatgtacttggccgcattcgcggccagtcacagcaaagctctcaagcctctctatgcgcacatcagagccaaaggcttctccacgacggaatcgatggtgattcttgcgcgcaagcttttacgagtggcatttgcaatttggagaggccagaccacctttaatccggagcaactattgccgaaagtcgcttgacgcaaaacatagaac

SEQ ID NO: 1258 - DNA, 1610 bp, unidentified
  source 1..1610: mol_type = unassigned DNA; note = element_186ebc5
  misc_feature 1..2: note = core
  misc_feature 3..289: note = LE
  misc_feature 290..1501: note = CDS
  misc_feature 1502..1610: note = RE
  misc_feature 13..309: note = bridgeRNA
ctactactatggttatagggagatatacttaacaaaccagttaggttgttttccttcttgttgcttaagctgtagaatgaaaggagcaataggtttatcgagaaaattcttggactaagcgtccgtccttaagtcagatgaccagctcctcattcgcagcgttcgttttatgcaggttgaactgcctgccttttagggtacgttcgtgtcacgccacagtagattgaataggcaatgagtaaagctgtctattaaccattgctaaattcattttgggggtgacaaggttatgaatgcagttggaattgatgtttcaaaaggcaaaagtgtagttgctataatgcgcccaggaggagaaatggtttacaaaccttttcctgtaaagcatgattctgacgggataaatgcattgattaaatgcatcaagtccgttgatggtgaatctagaatcgtgatggaacacacggggcgatattacgaagtcttagcgcgtaagctgtctgaagctgatctttttgttagcgcagtaaatcccaaactcataaaagattttgataattcatcacttagaaaagtcaaatccgataaagcagattccatcaaaatagcccgctatacgcttgacaagtggaaagaactaaaacagtatggagttatggatgaactacgtgaacaattaaaaacaatgaatcgtcaattcaatttttacactaagcaaaaaagtgctatgaagaacaatctgatagcaatcctggatcagacatatttaggagctaacaagttctttgattgccctgcaagacctgatggaagccaaaagtgggtcgattttgctacaacttactggcatgcagattgtgtgaagaagatgtcacttaatgcattcatagaccactataagaaatggtgtaagcgtaaaggctatggattcagtaaagtaacagctacggaaatctatgaagtaacaaaaaacatcgttagcgtgctcccaaaggatgaaactacaaaactaatagttaaacaggcaattgatgaactaaattctacatcaagaacagtcgaaaatcttcgtaccttaatgaacgatacagctgctaaattgcctgaatatcctgtcgtaatggccatgaaaggagttggaccaacgttagggccacaactgatgtcagagattggtgatgtaaccagattccattcaaagggtgccttgaccgcttttgcaggggtggatccaggtgtgaatgaatcaggatcgtttgaacaaaaaagtgttccaactacaaaaaggggctcttcagaactaagaaagacattatttcaggtaatggatgttttggtaaagaccaagccttctggcgatgcagtttaccaatttcttgataagaaacgatctcaagggaaggaatactatgtctatatgaccgcaggtgctaataagttccttaggatctattatggacgagttaaagagtatctaaactccttagactctcaagaataacaatcaaaacatattatccagaccggcacaaatgtggcggtctagttgtgattaattaagcgcatcacataaaaatattctccaatagacttgacatattattagcagg

SEQ ID NO: 1259 - DNA, 1216 bp, unidentified
  source 1..1216: mol_type = unassigned DNA; note = element_187539f
  misc_feature 1..3: note = core
  misc_feature 4..230: note = LE
  misc_feature 231..1208: note = CDS
  misc_feature 1209..1216: note = RE
  misc_feature 41..206: note = bridgeRNA
catcctatgtttgcaaacagacaagtatagagtaaattaaacattgcagaagaaagggtaaaggctaagactgcttcccgtcattgggcaattagcctgttcgcaatgttagtccctttaccctctgcttacagcttggacagttcattaggcgtgcgagcctgtatgcaggattgataagccataagcagttatttcttcagcaactttttatctgtaaatacaaatgtatgcaaagcactaaaaactatgtaggtattgacatttctaaattgcattttgatgcagccattgagctatctggcaagtatgtacattataagctatctaatgatgctacaggttttaatacgctgatggaactattaccggatgactgcatgctggttatggaagcgagcggtccgtattatttaaagcttgcttgtttttttcatgaccggcagatcagtgtaagtgttataaatccgttggttatccgtcggttttgccagatgcgtttaagccgcaccaagacagacaagaaggatgcaaaaatgatagcagaatatggcaaagcagaacacccatctgagtggcatccggaggctatacatactcaagagttgcgtcagatgcaggctacgacagatttgctggacaaacatcgtacatcccttttgcgccatcttgaagcagcaagccaaatgcctgttgtgaataaacaggtattaaagactttaaacaaaaccatcaaatcaatagagcatcaaatagcagagctggaactgacaatggatatactaatcaagcaataccacggtgaattgtatgagcagatacagagtattccaggccttggtaagaagacctctttgttactgattgtaataagtggtggatttacaaagttcgctgatgcaaggcagcttagttcctatatcgggttatgtcccaggatatttgaatcgggtacaagcgtccgagggaaggcaagaatcaccaaaatgggaatgagcagaataagaggaatgctttatttatgcgcatggagtgctaggaggtataaccataagtgtaaagatctgtacgacaggttggtggcaaaagggaaatctaaaaagcttgcgctcatagctgtagctaacaaacttttaaaacaagcctttgcaatcgctaaacaaaaaacatgttatcagcaggattacgcaaaaaatatttgtttttaaacacagtt

SEQ ID NO: 1260 - DNA, 1589 bp, unidentified
  source 1..1589: mol_type = unassigned DNA; note = element_18762e6
  misc_feature 1..3: note = core
  misc_feature 4..307: note = LE
  misc_feature 308..1474: note = CDS
  misc_feature 1475..1589: note = RE
  misc_feature 10..233: note = bridgeRNA
aaacatactaagattagagggacgaatcagtgacggctgattcgtccctctatcttttctttttggattatagtgagaagtgagagaaagctcggacataacctcatgggcggcgtataagcccgcatttaaaaacgagcttcttcacttacattcttgaatcaggtttaagtatgttggggcttcgagcccgtgtataggaaattggaatcggaatgagtagtgaagaactttctaaaacagaaagaaggatttgtatggcaacgattgtcgcactagatgtttcaaaaggaaaaagttttatgtgatgtatcaagaaatgacgtgtctttatgaaggtgaaatcacgcataccaaaagcggttttcaagaattacatgctcttattaagaatttacctgaagtgccggaaattgtctttgaatcgacaggtatttactctcgaccagtagaaactttttgtcaaaagaatcagttgatttattatgttttaaatccacttcaagccaaacaacagatggaaaaggaatctttgagaaaatggaagaccgataaacgggatgcgcatcgattagcacaaactcattggaataattcaaggacgaagtctgtttcagctgaacctctctataaagaacttagagacctttcaagattctatcaagaaatcatggatgaaatcggacgtatgcgcatgcatttgcacaacgccatccaactaacctttcctgaactggaacaagtcttgtctaacaggcttacgccatatgggttgacgatgatcgctcaataccctcatccatcattcgtactgaaacaatctaggacaatcattaaaaatcgtctaatggcctctaccgcaaagaaaatctcagagaatcgtgcaagaaacaaagcagatgaactgattgcttatgccaaagattcctatccagctgtttctgaaacggcgatacccgtcgcaaaaacacgctattatgcggagcagctccaagctcttttaaatcagaaagaacgcttagcgaaccaaatgattgaaacagccaaacagttggaagaattttcagtgatcgctagttttcctggcattggtgaactcagtgctgcccagttcattggtgagctaggagaccttcgacggttttctgatcccagaaaggccaacgcttatattggtattgacataaggcgctatcaatctggaaactatttagcacaagaccacatcaataaacgtggaaatccaaagggtcgaaaaattctcttttttattgtcaagaatatgataaaagcacaacacgctgctccaaatcacattgtcgattactattacaaattaaaaaagcaacccctcccgaaaaaagaaaaggttgccatcgtagcttgtatgaacaagctgctaaagtgtctccatgccatgattaggaatgggacaaagtacgattactcgtacacggtctcaacggaccattaatatagggtaattataccacgattttccctcctttaaaaaaaagcaaagtgagggctatttgatgtgggtaaaaataaatagaggctcttcttcgtttctcttgactaatcgtagg

SEQ ID NO: 1261 - DNA, 1605 bp, unidentified
  source 1..1605: mol_type = unassigned DNA; note = element_18773ba
  misc_feature 1..3: note = core
  misc_feature 4..274: note = LE
  misc_feature 275..1483: note = CDS
  misc_feature 1484..1605: note = RE
  misc_feature 12..294: note = bridgeRNA
tctattacaattattttggttggaagtccagcatccagctgggcttctttccatctcatgcctaagctacaataagaggagcaactggctggcctctcctttcttgggctttcaggcccgaataaaagactgtcagccatcctcttattgcagcgttcgatttaagcaggttgagctcgccgccatggccatgttcgtgtcacccaatagattgaatcggcaatgagaaaacgatgggttccggttgcggattatttgaattggaggtatgacaatgaacgctgttggcattgacgtttccaaaggaaaaagcatggttgcaatcatgcgtccctttggcgaggtggtgcgctctcccttcgaggtgtctcacaccggaagtgaactgagcgagttggcaaagctgctcaaaagccttccgggtgagacccgtgtcgtcatggagtacacagggtactaccatgccccggtcgcctattccctctgcaaggccggaatctatgtttccgccgtcaatgcaattctggtgcatgattacgggaacaacaatttaagacgggccaagaccgacaagaaagacgccgtaaagctggcaaactatgccttggatcattggctctcgttgccacgctacattccggaggaagacgcacggctcatactgaaaacctgctaccgtcagtatcagcaaatgagtaagatccagaccatgcaaaacaacaatctggtttctctgctggataccactttcccgaatgtaaatcggctgttttcaagccctccgcgtccggacggcagcgagaagtgggcggattttgtatcgcaattctggcattgcggttgtgtcggaaaactttccttgaatgccttcatcgagcggtaccgcaagtggtgcaaaaagcatggttacaatttcagcacagagaaagctgccaagattcatgaagccgctcggaatcatgtccccgtaatgcccatgaacgagaccaccaggtttctggtccaacaggctgtgtcacagcttcaaactactcagaaagctctggcttccatgagagaccagatgcagtccctggcgtccgctctaccggaatatcccgtggtcatgaacatgtacggagtaggcaaaagcatcgggccacagctcatggcggagatcggcgatgtgcgccggttccattccaagaaagcgctggtcgcctatgctggcatcgatgctcctccgtatcagtcgggccaatacgaactcaaaagccggagcatctccaagcgcggatcttcttccttgaggagaacgctgttcctggtcatgagcgtgatccttcggaactcaccggaggaccagccggtttatctgttcatggacaagaaacgctccgagggcaagccctacaaggtctacatgatggcttctgcaaacaaattcctccgcatttactatgcatcagtgaccaaatacttggcttccttagaagacgcctaactttaatttgatcccacttggccagccgccatttcgaatttgaaatgctcagcggctcggatgactgcgtcatctttaccccgagaagaatctcatatttctacttgacttttcttagcagg

SEQ ID NO: 1262 - DNA, 1398 bp, unidentified
  source 1..1398: mol_type = unassigned DNA; note = element_18832ec
  misc_feature 1..2: note = core
  misc_feature 3..117: note = LE
  misc_feature 118..1149: note = CDS
  misc_feature 1150..1398: note = RE
  misc_feature 1161..1393: note = bridgeRNA
agatgccgtaatgggccgggcctcgcgagcatagccagatgggtggctgtccctcagaatgatggtgttgaaacggagtccgagcgatcggctccaagcatcaagtgaggaacagccatggaatattatgcaggaatcgacgtgtcgttgaaagacagcagcgtctgtgtcgtggacggggcgggccagctgatgcgtgaggtcaaggtcgcgagtgaacccgaggcgctcgttcggttttttgacgagcttggattgccggtgagccgcattgggcttgaggctggcccgttatcgctttggttgcatgcggggcttctcggggccggactcgatgccgtgttgctggaaacgcgacacgtgaaggcggcgctctccgccatgacggtgaagaccgaccggaaggacgcgcgggggatagcccagttgctgcgaatgggatggtatcgaccggttcacgccaaatcggcgccttgcaaggacacccgtgcgcttctcgttgggcgcaagctcttgcaaggcaagcttctcgatgtcgaactgagcatccgagggattctgcgcgggtatggtttgaaggtcggcgaagtcagtcgggggcggttcgaagcccgcattcgggagctgataaccggacacgcgatcttggagacggtgatcggagcgatgatgaccgcgcggacggccttgtggaacgagtttaccaggctgcaccgcgagatgctgaagattgcgcgtgccgacaggatatgccgcagattgatgagcgccccgggcgtcggagcgttggtcgcgctgacgtatcgctcggcggtggacgatccttctcggttcggaaagtccggcacgatcggcgcgtatttcgggctgaccccgaaaaaatatcagtcgggcgagaccgaccatgatggtggcgtcagcaaggtcggcgacgccatggtccgaaccgcgctctttgaagcggctcacacgatgctgacgcgcgcagttagcttttcgagcttgaaacgctgggcgctcgacgtcgcaaagcggcgcggcatgaagcgcgccaaggtcgctcttgcgcgtaagctgggcgtcgtcctgcatcgcatgtgggtggacgcgaccgagttccgttggagcaatgcggttccggccgcataggggataggtagagtttggagcgggtcgaaaccgaccccttcttccgaggtcccgtcgccgggacgaaggcctggcaaggtcgtgcgtaatgctgtgaatgctacggcacatcacgcgtcttagattgacctgccggctttggatctgatggcatggtgtggcggccctcgtgccgaccacggacagaagcatgatcctggcgacgagatttgttcagaggggacttgacggggaacggcccattacaga

SEQ ID NO: 1263 - DNA, 1322 bp, unidentified
  source 1..1322: mol_type = unassigned DNA; note = element_18854b4
  misc_feature 1: note = core
  misc_feature 2..288: note = LE
  misc_feature 289..1284: note = CDS
  misc_feature 1285..1322: note = RE
  misc_feature 72..277: note = bridgeRNA
cctttagattagcaaaatgaaataatcgtttaaaataaaaatataataatgatgatgaaatttctttttttgcttctttttttctttgttaataactcgtattatgttgataactaaaaacacaaaagaacggagtgaactttagcggccagctagctttttagagccatcccccgtattagtctccgttctttttcaaagttacttagaaccatatagaatttcagtttctgtccttattaaaggtcttagtttaagtaactattattaatatctaatcacaaaattatgaaaacaaatgaaattatcggaattgatgttagtaaacttcttatagatgtttgtatttattctaaacaaattgttgaacaatttgaaaacaacaaatcagggtttaaatctatgctaaaatgggtttttaaaaattcgtctttttctaaagaagaaaccatgtttatctttgaacatactggaatgtactctcacttattatctgtatttttaactgaacaaaaaacatctttttttatagcttctggtttagaaatcaaaaggtctattggaattgctcgtggaaaagatgaccaaattgacgctaaacgtattgcacaatatggctataggttaaaagaagaattaaaacctagtaatctacctaatagcaatatattacaactaaaaagtctcttatctttaagaacaaaacttaacaaacaaagagctggttttaaggtaacactgaaggaacaaaaaagaatttataaagcaaaagagtataaaataatctttgatgttcaacaaaaaatgattgtagagttaaccaaacaaataaacaaaattaatactcaaatgcaatctattattgaccaggatataagcttaaaagaaacttataaacttgtcactagtgttaaaggtataggaatgcaaactgctataatgataattgtatttactgacaatttttcaaagtttgaaaactggagaaagtttgcttcttattgtggaatagctccttttccttaccaatctggaactagtattaaaggaaggacaaaagtatcacatcttgccaataaaaaacttaaagcaattattaatatgtgtgctatttctgctatacaacataacccagaaatgaaagtatattaccaaaaaagagtagaacaaggcaaaagtaaaatgagtaccgttaacattatcagaaataaactaatagcaagagtctttgccgtagtaaaacgacaaactccttatgtagatatcttaaaatatgctgcttaaaaaatttaataacttttacttgtttttatcatagaata

SEQ ID NO: 1264 - DNA, 1596 bp, unidentified
  source 1..1596: mol_type = unassigned DNA; note = element_188a338
  misc_feature 1..2: note = core
  misc_feature 3..262: note = LE
  misc_feature 263..1474: note = CDS
  misc_feature 1475..1596: note = RE
  misc_feature 12..282: note = bridgeRNA
ctattacaataaatttggacaggaaagccgggcatccagtctggctttctttccatctcgtgcctaagctacaataaggggagcaactggctgaccatatgctccttgggcttccatgtccgtttgaaagactgtcagccatcctcttgttgcagcgttcgatttgagcaggttgagccatagagttcgcgtcacccaatagattgaatcggcaatgagaaaagatggattccggttgcaaattcgtattggaggaatgcaaatgaactctgtaggcatcgacatttccaagggcaggagtacgattgccgtcatgcgtccttttggagaggttgtcatctcaacctttgaagtctgtcacaccgatagtgaactgagcgcactggcaaggcggctcaaaagcctgaacggtgagactcgtgtggtcatggaggccacggggaactaccatgcgccggttgcaaagctgctccacgacgcagggctatatgtttccgtcgtcaatgcaaagctggtgcatggctacgggaacaacgatttgaggcgtgtcaagaccgaccgaaaggatgccgtaaaactggcaaactatggccttgaccgctggctcactttgccgaggtacgttccagaggaagatacccggctgctgttgaagaactgctaccgccagtacaggcagtattccaaggtacagacagttttaaagaataatctgatttccttactggatacggtgtttccaaacgccaaccgtctgttttcaagcccaatccgtggagacgggagtgaaaagtgggtggattttgttgctgaattttggcattgccgctgcgtcagcgagaagtccgaaaaggcgttcacaaacaaataccagcgttggtgcaaaaagcatggctacaatttcagcgaagcaaaggcgcatgccatttacgaagaagccagcaggcacattggtgtcatgccaaagtccgaaacgacgaggctgctcgtggaacaagctgtatcccaactcagggcaacttctgcggcgcttgctgctctcaagcaggaaatgcaatcattggcttccacgctgccagaatatcccgttgtcatggatatgttcggcgtaggtccgtctttgggaccgcagctcatagccgaaattggcgatgtacgacggttctactccaagaaagctctcgttgcctttgcaggcattgacgctcctccgaacgactccggcgatgtgaccggtaggcacaagagcatgagcaaagttggtgcgtcgtctttgcggcgaacgctgttcctcgtcatgagcgtctatttacagcgtgccccactggatgagccggtctaccagttcatggacaagaaacgcgccgagggtaagccctaccgcgtctacatgatggcctctgccaacaagtttttgcgaatctactacgccactgtaaaagcctatctggagtcgctggaacacaccgcctaatcttgccatacaacattggctggccgccatttcatttttgagatgcaaagcggctcaatttggtgcacccttttgccccctaacattaccttgaaattcctacttgacttttcttagcaggt

SEQ ID NO: 1265 - DNA, 1416 bp, unidentified
  source 1..1416: mol_type = unassigned DNA; note = element_188b65d
  misc_feature 1: note = core
  misc_feature 2..94: note = LE
  misc_feature 95..1126: note = CDS
  misc_feature 1127..1416: note = RE
  misc_feature 1177..1408: note = bridgeRNA
caatgggatggactcctcctcatcccactcggcgccgatgcgccaagatggcaggtgtgagtcgccagccatcttcaggttgaggagaagcccaatgaacattacccgggtcggtgtcgatatcgccaagtcagtgttccatgtgcatggcgtggaccgccatgaccaggtccattggcagggtaaatactcccgcgagacgtggctggaagccctatcgaagcgggtccccaccgaggctgaaatcggcatggaagcctgtgcgtcctcgcatcactgggcccgggaactccagcagcgtggctatcgcgtcaggctcgttgccgctcatttcgtgaagccctacgtgaagagcaacaagaacgatcgagtcgatgccgaggcgatctgcgaagcgatgagccgccccagcatgcgcttcgtggcggtcaagaccgccacccagcaggatatccaggccgcgcatcgtatccgcgaggaactggttgggcagcgtaccgcgaaggccaaccagatccgtggcctggtcggcgagtacggcctcgtcgccccaaccggcgtccagcggctgcgatgtgctttgccacgctggctggaggatgccgaaaacggcttgtccgaggctttccgtgcgctactcgctgggctggccgaggatctccgctacctggaggaccgcatcgccatcctcgacgagcgtattgccaggagcgtcaaggacgatccggtggcccagcggctgctggccttgcggggcatcgggccgctcaccgccagtgccctgtccggcgcactgggcgatggccgggccttccgccgagggcgtgatttcgcggcatccctggggctgacgccaaggcagcacagcactggagggcgagaccgactgctgggcatcagcaaacgcggcgacagctatgtacgtaagctgttggtccacggcgcccgggcggtactacgccatgcagccgccaaaaacgatgcgctcagccagtggctgaacgccctggcggcacgcaagcacatcaatgtcgccattgtcgccctggcgaacaagacagcacgggtggcctgggcggtaacgcgacacgagacgacctacgatcctatcttggcggccgggtaagcgaagatcggtatcgtgccgccgagagagcccccgagagcaaggaggtcaccaccacgattgcagggcatgctgtgagatggcgaacaggtcgaaccgacgtcgggacaccccttgccggacgtggagcataagagctcgtgtaagcgaatgggaaccgacgcgcgaatagcccatcagagtccgatgcctatctgaaacggcatcctcattgagaccggatacacgtaggcagtcgtacctgcgccaccatcgaacatcgtgcttgcaaacgaggaggagtccataca

SEQ ID NO: 1266 - DNA, 1403 bp, unidentified
  source 1..1403: mol_type = unassigned DNA; note = element_188df72
  misc_feature 1..2: note = core
  misc_feature 3..85: note = LE
  misc_feature 86..1129: note = CDS
  misc_feature 1130..1403: note = RE
  misc_feature 1103..1390: note = bridgeRNA
tgatggcgtggatgccccctcccgacggcatcgtaatgtgccaagctggtgatctgtaaaatcgccagaaaaggaggagacatccatggctgaggttacaataataggcgtcgatcttgcaaagcgggtttttcaggcgcacggcgcggccgcagacggctcggtcatctttcgtaggaaactgccgcgcgaccggttcctgtcgtttctggccgaccagcctcgctgtatcgtcgcgatggaggcttgcgccacttcccacgactgggggcgcgagatcaagcggcttgggcactcggtacgacttatccctccggtctacgtgaagccgttcgtcaagaggcagaagaatgatgcagcggacgccgaagcgattgccgaggcggcctcgcgaccgaccatgcggttcgtgacgatcaagacggaggcgcaacaggcgcgtgcgatgctgtttcgcacacgagacatgctggtgcgtcagcgaacgcagacgatcaatgccctgcgtggtcatctcgccgaacacggcgttgtcgcgccacagggtgctgttcaggtgaaacggctggctgacgcgataaacgaagatacgtcccgattgccgacgatggttcgagacctcggccagctctacctcgaacagatcagttcgctgacggcgaaaatcgtcgatctcgacaaacggcttcgtacggcagcctttcaagcggaaacgacgcgccggctgcagaccatgcccggcgttggtcccatcaccgccgtcgccatggaaacttttgcaccgccaatggaggagttccgccgcgggcgggacttcgcggcatggctcgggctcgtaccacgacaacattccaccggtggcaaggcgcggctcggcaagacgtcgaagatgggccagcgcgacatccgccgactgctcatcatcggcgcgatggcggtcgtaaaggccgccgtgcgtcgcggcggggccagcgacacccagggcgaaaacgcctggctgtcacgcatgctggcgaagaagccgcggatgcttgtcgcaatcgcgctcgccaacaagatggcgcggggcctgtgggcgatgatgacgaaggagcaaaactatcggaatccggcagtgacagccgcctgatcgaccagatcaggaagctgcgctccggtacgtcggcggtgtgaggaggtcgatgaacagtaaggacaaatgatcgataagatcgagatcggacaaagcagggtcacccagagagccagaaagctcgtgaaaatgatctgcctccgatctgcgtatcgccataccggcccgcggccatgaccagtgccgcaactcaaggcctgacacatgaccgcacccgatcacatgttcgaaccgttcagaaaccgcttgcatcgacgggggcatccacaca

SEQ ID NO: 1267 - DNA, 1425 bp, unidentified
  source 1..1425: mol_type = unassigned DNA; note = element_189363c
  misc_feature 1: note = core
  misc_feature 2..196: note = LE
  misc_feature 197..1414: note = CDS
  misc_feature 1415..1425: note = RE
ctacttaaagagaattgatgtacgaccgcggcccggccaggcttggtcgaggtgatcggtagggattctcaggcccgcgctgcccactcagatggcggggtgtggctctctcccggcttggaccctgccggtcaccgtggcgcggagtggctgaagaggggtttgcccagctgtaagtagcgttgccctcccgccggtgtggttctgccgcgacgacgggaaggtcaacgggtacatgggtcagctgatcattggggtcgatccgcacaagcggtccgcgacgatcgagatcatcaacgagcgtgaacaggtcctgggcaccggccggtacggcaccgacaccggtggctaccaggcgatgctggccgccggccggcgccatcgtgaccgcgtgtgggcggtcgagggttgcaacggcatcggccggcacgtggcgcagcggctggtcgccgacggcgaaaccgtgctggacgtcccggcgaaactcgccgcgaaagcccgcaccttcgacaccgggcacggccgtaaaaccgatccgcacgacgcccaccacatcgccgtgaccgcgctacgcaccccggacctgcgccgcgttcacgccgacggcgccaccgtcgcgctgcggctgctggccgaccggcgtgaccagctcggtgtcgcccgcaccgagaccgtcaaccggctgcaccagctgctgctcgaactgattcccggcggcgcgaagaagaacctgaccaccgaccaggcccgcgccctgctcgaacgcgtcagcgtcccggccggcgacatcgccgcgatcacccgccaccagctcgccgccgaactcatcgacgagctcaccgttctggacgctcgcatgaaaaccgccacccggcagctgaagaccgtcctggccaccaccggcacccagctgatgagcctcaacggcatcgggccttccggcgctgcccgtctgctcggcgacatcggcgacattcaccgcttcccgacccgcggacacttcgccacctggaacggcaccgcccccatcgacgtgtcctccggcgaccatcaccatcaccggctcaaccgggccgggaaccggcgcatcaaccgggccctgcacatcatggccatcacccagctgcgctacgacacccccgcacgcgcctactaccagcgcaaacaaaccgaaggcaaaaccgcgatggaagccatgcgcgcgttgaaacgacgcctgtccgacaccgtctaccgccaaatgatcaaagacgaccacacggcacaacagacagcgacgggtccgggaggacacacgggggcgactctgaactccagcgcggccgaccccaaccccaagatcgacacttcggaaaagtcacaacccggacccgccaaccaccaccctaaaacatcccccacaccaaccccttgacagaggggtgc

SEQ ID NO: 1268 - DNA, 1572 bp, unidentified
  source 1..1572: mol_type = unassigned DNA; note = element_1896d27
  misc_feature 1..4: note = core
  misc_feature 5..290: note = LE
  misc_feature 291..1478: note = CDS
  misc_feature 1479..1572: note = RE
atcacgtataatattgaacataaagatttcaagtttaacattttgatttctttatgttttttgttattataacaaacatcggtaaagacggattataccaggtacttcgagtacgtttttatgaatgtctgccatataattatttattaattcggttgtagataatggaaactaattttaatattaaagttcggatgattaagcgtgtaggaatatcggatgattaagcgtgtaggaatataggtaattcaatatggtgttaaccgaaatatttatgaaaggagaaattgatgaaacatattttaagttttgatgttgctaaaggcaaaagtgtttattgttttattgatgaatttaaaaatattattattgagcctactttaattgaacataataaaaacaagtttgacaatttattaaatttagtcaaagattattctaatttaattgtagttatggaatctacttctatttatcatctaccagttgaaaattattttagatcaaaaggtattgaaactattgtcatgaatcctaaacttgttaaacaatttaaagatactttaaataaatctaaaactgataaattagattgttttaaaattgctagatgctacttaggtacaattgataatttttaccaaaagcaagatgaatattttatgtataatcctttagctagacaatattggtctttagtagaaggacaaactagattaaagaatagatataaacaattaattgaaattatttttcctgaattttctttaattttcaacgatttatatgatgatttagctttggattttattcatgattttcctcatcctacgttttttattaatcgtagaattgattatttaatgaattatttgaaggaaaagaatggaactactcaagcttatagattcaaaaataaagttttaaaaatgaaagaattggcttctaattctttgtgttatgtagcatttgattcttttcaagttcaaaatctagttcaagtaattgaaatgattcaatttcataaaacagaaattaataaaattaaaaatcaattgattaatgaaatgaaaaataaaaatctatttaaaataataaattcaattcctggttttggagaattctctacagctttatttttggcagaagttggagatattactagatttgatgataaatatcagttcatatcttttataggaattgattcagtaacttctcaatctggagtttctgcatatcatggaccaatttcaaaaacaggatgtaagtttggtagaacaattctattcaatattgtaacaactataattcaaatatctgcccatgcagataaaactaatccaatttatttgttttttagaaaaaaacaatccgaaggtaaacatcattacaagtgtataatcgcatgcgaaaccaaattatgcaaaattatatacaagttatgttcttcgaattgtttgtatgaaaacaaatagctgaattaccaatttttttaaaaattgaggcaactcagttctttttgtcgtgattataatatcacattttttttgatttgacaaaacttagata

SEQ ID NO: 1269 - DNA, 1381 bp, unidentified
  source 1..1381: mol_type = unassigned DNA; note = element_189a07a
  misc_feature 1: note = core
  misc_feature 2..80: note = LE
  misc_feature 81..1112: note = CDS
  misc_feature 1113..1381: note = RE
  misc_feature 1143..1373: note = bridgeRNA
caatgggatggactccctctccccgaaagggtgccaaactggagtttccacacaaccagttgtagcagaaggagtccaccatgaagcttatccgcgttggggttgatttggcaaaaaatgtctttcaagtacatggcgttgatcgctcagaggacgtcatctggcgcaagaaattggggcgcgatgagtggttacaaacactgctggcaaagatagaacccggctgtgaaattggcatggaggcatgtggaggtgcgcatcattgggcgcgacaattgcagcgacatggctatcgcgtcaaactgattgcaccgcaatttgtaaagccctacgtcaaaagcaacaagaatgatgccaatgatgcggaagcgatttgtgaagcaatgagtcggccaaatatgcgcttcgtcacagttaaaacgattgagcaacaagatgttcaggctgtacatcgcattcgtgcagaattaagtagccaacgtgttgcgaaggctaatcagatccgtgggttggccgccgagtatggactgacggcagctcgggaactacttcaattaagagcagcaattccttattggctggaagatgcatcgaatggattaactgatcgatttcgccgcctgcttgcgggtctctggcaggatttactcggactcgacgaacgcatcaaagaactagatcgggagattatttgtattgcacagacagatccggttgccaggcgtctgcaacagctcagaggtgtggggccgatcatcgcgacagcaatcgttgccaatgtcggtgatgcaacacagtttgccaatggccgacagatggctgcatcgtttggtctgacacccaggcagaatagttctggcggcaaggagcgattgttgggaatcagcaaacgtggcgatgcctatttacgcactttgcttatccatggtgcgcgatcaatgatacgaacggccaaagctaaagatgaccatctgagccagtgggtgatgcgcattgccggcacgcgacatcacaatatcgcggccgtggctctggccaacaagaccgcccggatagcatgggcgatgataactaaaggtactgattatcgagctgagttgagcgcagcttaaaatagcaagagcaaatctgttagcaggaaatccaaccgcgattgcaaaacaacccgcttgatggcaaaacaggtcgaaccggcgctggctgaatccgagaaagtccgtggcagaaaagcccgaagaagcgataggaaaccggcgcgcgaatagcccattatggtcagaggcctggattcaggcactgtagtcaaagaccgaatatacgtgagcagtcgcacctaatagtcaaagaacggagtgtttgcaaatgagggggagtccatata

SEQ ID NO: 1270 - DNA, 1395 bp, unidentified
  source 1..1395: mol_type = unassigned DNA; note = element_189d446
  misc_feature 1..2: note = core
  misc_feature 3..84: note = LE
  misc_feature 85..1119: note = CDS
  misc_feature 1120..1395: note = RE
  misc_feature 1136..1383: note = bridgeRNA
tgatgaggtggaacgacccgctaccacagcatcaacgtgctaacgtggtcgttgttttgaacgccacaaagtaggagccgttccgtgaagcaagttatcactatcgggttggatttggccaagcagatttttcaggctcatggcgccgacgctgagggctctccactcttcacccgaaggctgcgccgcgccgaggtgctgcctttctttgagaagcagcccccatgtttggttggtatcgaagcctgcagcggttcgcactactgggcgcgggagatcggcgaactcggccacgaggtgcgtttgattccgccggcctatgtcaaaccgttcgtcaaacgggggaagacggatgcagccgacgctgaggcgattagtgaggcagtgacgcgcaagacgatgcgcttcgttccggtgaaatcccccgaacagcaggcggcggcgatggtcttgaagacacgcgcccttctggttcgtcagcaaactcagacgatcaacgcgctacgtgctcacctgtccgaactggggatcattgccggcatcggcacggcgaaaattgcaagcctgatcgcgatcgtgcgtgttgaaaccgatgcgcgtctcccgaacgcggcccgcttcgctttgacggcaattgcggatcaaatcgacgcgctggcgctgcagatcaacaaactcgagcgagagcttgtcgccgaagtgaagcatgacgaagacatgcggcggctggccacaatccctggcgtcggagccattacgtcggcctccatcaaggcgcttgtcccagacccgggtgggttcaaatccgggcgccatttcgccgcatggctgggattaacgccgagatcccattcgagcggaggcaaggagcgattgggcaaaatatcgaagatgggcaatcccgagcttcgcactctgctcgtcgccggtgcaacctcggtcctgcgacatgcaagaggcaaccacaaagccccacggtggctagtcgcactgttagcgcgacggcctttcaaggtcgttgcgatcgcgctcgccaacaaaatggcgcggatcatctgggcgctcctgaccaagggcggaacatatcgcggtctcgagagcagtgcggccagctcataagctgacaacgaacatcacgaactgcgcggcacggtagccgccagtggcaaggtgcacaaacaagcgatgattccacaacaggacgaaatcccgaggcgagagaggccagcgcgacattgcgcttcgagcgcgtttggttgatcagtcactcgtttcgcggacttcatcgaggccagcggtccacagaaccgcgctgataggccggacatatgaccgcaccgttcccgcgggatgaatcgctgaaaaatgcccttgccaagcgggtcgttccacata

SEQ ID NO: 1271 - DNA, 1327 bp, unidentified
  source 1..1327: mol_type = unassigned DNA; note = element_18a0108
  misc_feature 1..2: note = core
  misc_feature 3..66: note = LE
  misc_feature 67..1104: note = CDS
  misc_feature 1105..1327: note = RE
  misc_feature 1096..1312: note = bridgeRNA
agatgtatggactccctatcctcaccatagtacggttattttgcatacaattaatggagcgtaaaaatgttcaagaacccaactattgcaattgatttagctaaaaattctttccaagtttgtaagatgaacagacaaggaaaaattgaatataaccgttccattaatcgtaaggctcttattgaattattagggaaacatgaaccagtattggtagctatggaggcatgtgctggctcgcactactgggggcgccttgcacgcaaacatggtcatcaagttaaagtaattcagactcgattcgtcaaaggtcttcaaataaaacaaaaaacagataaaaatgatgcaaacgcaattgctatcgcagcacagctcgaccaaattcaatcctgtattgtattaacagaagaagaacaagggcttcaatccttagaccgtgtacgttctttgcaagtagaacaacgaaccgctttgattaaccaaattagagggttacttttagaatttggcattgttattcctcaaggctggtcatcattagcaaaagcattaccagacatacttgaggatgctgagaacaatcttccttccatattcaggcaaacattgcacatgcaaagtaatatgctgcgatgttataacgaacagattgaatgctatgacaaattaatatctgaatcagttcgtcataatgatacgtgcaagaaactacaaaaactcgaaggagtggggccgctagttgcgttaggtttaactatccgtttagggaatgccaatgaattcactaatactagggatgcctcagcttgtcttgggctaacacctaaacaacattcaacaggtggtaaagagagaattggacatatatcaaagtattccgcagataaaagactaagaagcttgttgtttcaaggagcaatgtcagtggttctctacgcaacgaaaagagagccaaaaacacaaaaggaaaaatggcttaaatccataatagagcgacgtggtaaaaaaattgcggcgattgctcttgccaataaaacagttagaacagcagtggcactgattaaaaatgacagtgattacaatccaatacctttaacaatttaattacccatcatgaacgtcatcaacagatagcattaataaatggttagaccaaccagtaaaattccgaagtctcctcaagtacaatttgatactgatcatgagaattgaactactggtgcgaattcatctttgggcagaggtagctcctcaagtagcccgtatataagaacgcatctggcatttatttaaacaaatctgttgataactatagggagtccatata

SEQ ID NO: 1272 - DNA, 1307 bp, unidentified
  source 1..1307: mol_type = unassigned DNA; note = element_18a10f6
  misc_feature 1: note = core
  misc_feature 2..63: note = LE
  misc_feature 64..1074: note = CDS
  misc_feature 1075..1307: note = RE
  misc_feature 1084..1304: note = bridgeRNA
taatgagatggacgcccttctatacttccgataggccggtataaattagcagagggtgcagcaatgaaacagttatctgttattggtgttgatttagcaaagaatatttttcaaattcatgctttagataaattggggcactgctgtttgaagaagtctttgagaagaagtcagtttctatcgttttttgccaaattacagccttgcttaataggtatggaggcttgtggaggttctcattattgggccagagagttgatcagtttagggcatgatgttcgccttatgcctccccaatacgttaagccatatgtaaaaacgaataagaatgatgcagcagatgcggaagccattgctgaggccgttactcgaccaaatatgaggtttgttgatgttaaaagtgttgaacagcagacaatattattgattcatcgggagcgagatggattagttaaagagagaacatcattaataaatcgattgagagccacattatctgagtttggtatagcaattccgacaggaagaagccgactaaagaactggttcaaagagcagtacggaaactatgaagactccttgccagaggtgctgaagtcacatatctgccagataatgcttcgttggcaacagaaagaagagcaaattattgagttagaaaaggtacttgataagcagagatgctcaagtgagccttgccagaggttaacagaagtgacggggatcggtgctttaacatcatcggcactggtcgctactgtaggtaatgcaaagtcttataaatcaggcaggcagttatccgcatggcttggaatagtcccgagacaaaattcaagtggcgggaaacaggttctgcagggtatcagtaagcggggaaatacttatctgcggcgcttatttatacatggtgccagagcgttacttcgacatatcaaaccctcacacccatggtatgaatgggttcagaatctggaatgtcgaatgcacagaaataaagtgattgtggctatagccaataagttagtccgtgttgcctgggcgatcttgcacaagggcacacgttatcaaccgtaaaatggagtctggttttgcgcaggaaagtactttgatgacaaaacaggtcggaccgtgattgagaaactctgtgcctaacatcgttcaatattagaacgttaaaatgattagagctcaatcagcggatctcatcagggatagaagcttagtgcttcataaaaaatccgaatagatggctgcaaaccttaacttgtcggaaagaaactacttgccaaaaacggggcgtccataga

SEQ ID NO: 1273 - DNA, 1487 bp, unidentified
  source 1..1487: mol_type = unassigned DNA; note = element_18ae8b2
  misc_feature 1..2: note = core
  misc_feature 3..84: note = LE
  misc_feature 85..1179: note = CDS
  misc_feature 1180..1487: note = RE
  misc_feature 1195..1413: note = bridgeRNA
agatcccatgggtgtgtggatggcgaccggcgctctgacagagtgcggttgctcaaccccccactccggaggcgacgatgcacgatgacgcacctcggcccgcacgggccgctatccgtaccgatcttggcgcggtctttgtttccatggaactgtctcgctcaaactggctggtcacatccctgtcccccggtgccggggagaagatgtccaagcattcggttgcggcgagcgatgtcgcgggcttgcgcgagcggttcgcccggctcaagcagaaggcgctggatccaccgcgtgctggaaagcgaagggatcgaaagccacgtggtcgacgccgcgtcgatcttgacttcgcgccgacggcggcgggcgaagaccgacaagatcgacggcgagacgctggtccgcacgctgttggcctataagcgcggtgaaccgcgggtgtgctccatggtcaaggcgccgacacccgaggaggaggatcgccggcggatctgccgtgagcgcaagatcctggtggccgagcggatcgagcacgtcaaccgcatcaaaggtctcctcttcgctcaaggaatcttcgattaccagccgctacgccgcaatcgtcgagagcggctcgaagtcttgaagacgggagatggccgccccgtgcccccgcgcctgaaggtgcaaatcagccgcgaactcgatcggcttgagaacgtcctgacgcagctggaggcggtcgagacggagcgggacgccttgatcgagcaggcgagccaagacgcctctgcaccggcggcgatgctgacgcagctgaaggggatcggcccggagttcgcggctatcctctggtctgaagggctattccgcagtttcgacaaccgaagacaagtggcggcctacgccgggctggcgccgacaccctggcaaagtgggtcggtcgatcgcgagcagggggtgtccaaagccggcaatccgcggctgcgaacggcgatgatccaactcgcttggctgtggctgcgacaccaaccaggctcagcgctcagttgctggttccacgagcgggtcaaacgtaatggcggccgcttgcgaaagacgacaatcgtcgcgttggcgcgaaagctcctcatcgccctttggaaatatgcaactaccggcgtcgtcatcgaaggcgccctggcgaaggccgcctgaggacagaggcccttgacccaatccccaggacctgatcagtcctgacggatccaggtggacgaaccgaacaactctatggcttgaacagccgatcggcagaatggtctcgtcttcctgagccctacccgccgcaagcgggatattggtgcagccacttcgtgcggcgaccgaatgtgaggttgatctggtatggaaacgatcaggtcatggaatcgggctcagaccgtggataccgaaacagttcctacagttttaccggtcgcggcgcgttggtgaaactaaccccttgatccgaacatgcccatgtg

SEQ ID NO: 1274 - DNA, 1381 bp, unidentified
  source 1..1381: mol_type = unassigned DNA; note = element_18b4efd
  misc_feature 1..3: note = core
  misc_feature 4..260: note = LE
  misc_feature 261..1298: note = CDS
  misc_feature 1299..1381: note = RE
tctcctatgtttgcgaagttattgattataaagataaaagtcaataaatttgaaaaaataaagtgaaaaggaatgagagaagatatgtcccaaaatagttcaaagaaacatattgacacatagaaaaatcctcattcctttttatcttttagagtctgaacagaatgtaaggaattaaacaagaattaatatccagaatatccaattaggagacaagacgaaggaagattcatcactttataaatttaaactttaaggttatgaaagaattaaaacaagtagttggaattgacgtagctcaaaaagaattggtggttactttgggcagaatgtttgaagatttatcaattgaattgtatagatacaaggtttttaaaaacacagaaaaaggatttattggattaacaaactgggtaaaaaagttaactaaagaagaagtaaaagttctttatgtaatggaagctacaggggtttatcatcaaaaaattgcatattatttggataagaataactttgatgttgctgtggttcttccaaacaaaataagcaattacatccgaactttagatattaaaaccattactgataaaacgtgctcgcaagcaattactagatttggactagaaaggaaactagatttatggaaacgtcccaaaagtatttataaaaacttacagcaattaactagagaacgtgatcaaatagttgcagaacgggttaccgcaaagaatcaattgcatgcagaattatcagaagcagaaccgtatgagaaaagtataaaacgtataaaggcaagaatcaagctattgaatactcaagaaaaagaaataaaaaatgatatagctgtaattgtagcaagtgatgaaaatataagaaaagaaatagacatcatttgtacattacctggtgttggagagttaactgccgtaatcgttttggcagaaactaatggatttgaattaatacgaaacaaaaggcaattagccagttatgcaggattagatgtaaaagaaaaacaatcaggcacctccataaaaggaaaacctagaatatcaaaaaaaggaaatagaagcttacgaaaagcaatgcattttccggcattgactgctgtaaaatgggatgaaaactttaaagaattgtatgcaagattagtgtcaaaacatggaataaaaatgaaagcgctagtagctgtacaaagaaaattattagaaatgatttttacattgtataaaaaccaaacatcttatgacaaggattatttaaataaaaaaaatagcgtgaaaactcaattggtttaacacgctatagagtctagctctatgactgacttagcacaaaattataaaaaaaatataaattttaattggaaatcaacacagaa

SEQ ID NO: 1275 - DNA, 1376 bp, unidentified
  source 1..1376: mol_type = unassigned DNA; note = element_18bb14b
  misc_feature 1: note = core
  misc_feature 2..89: note = LE
  misc_feature 90..1121: note = CDS
  misc_feature 1122..1376: note = RE
  misc_feature 1143..1368: note = bridgeRNA
caatgggatggactcctcctcccctaatcggcatctaagtgccacactggtaagcgttaccaccagtcaacggaaaagaggagtccaccatgaagcttagtcgcattggaattgatttggcaaagaatgtgtttcaactacacggcgttgatcgccacgggaaggcggtatggaagcggcgtctgtcacgtaacaaatggctcacggcattgttagaccaagcggagcctggttgcgtgattggtatggaagcctgtggcggtgcccatcactgggcacgcgagctgcagtcgcgaggttacacggtcaagctgatcccaccacagttcgtgaaaccgtacgttaagagtaataaaaacgatgccaacgatgctgaagcgatctgtgaggccatgagccggcccaacatgcgctttgtggcagtcaagagtgtcgcgcaacaggacatccaggccacccaccgcattcgctctgaactgatgacgcagcgcaccgccaaggccaaccagacccgcggcctggtcgctgagtacggtttagtcgcaccactgacgatgtgcgcactacgcgcagccatcccatgttggctggaagatgccgacaacggcctgactgctcacttccgctcactactgcaaggcgtgtgggccgatttggtggcgctggatggacgactactcgaactggaccggcagatagacaagcttgccaacagcgacgaagtcaccaggcggctacaacaactgcgcggtgtgggtccgatggtggccaccgcactggtggcaacggtcggtgatgcccggcagtaccacaaaggtcggcagatggctgctgcactcgggttaacacccaggcaacacagctctggcggtaaagaccgattgctgggtattagtaagcgcggtgatgtttacctgcgcagcctgctgatacacggtgcccgatcggtggtgtctcacgccaagcacaaagatgaccggctcagccggtgggccaccagcatagcgcagcggcgccatccgaacgtggccgccgtggcactggccaacaagaccgcacgcatggcctgggccatgttgcgcaatgaaacagattacgatcctgacttcgcgatcaactgagtcaggatcaacgaggagcagttcaactgcgattgcttaagcaaactgcataatggcaaacaggtcgaaccggcgtcagtcaaacccgtgaagggctgcgtacctaaagtacgtgaaagcaattgggaactgacgcgcgaatcacccattatggcccggcatcaacgtatgccaactttagaggccggatatacgtatgcagtcgtgccatgtctgccatcaacagattgcttgcaatgaggaggagtccatata

SEQ ID NO: 1276 - DNA, 1472 bp, unidentified
  source 1..1472: mol_type = unassigned DNA; note = element_18c1a26
  misc_feature 1..4: note = core
  misc_feature 5..247: note = LE
  misc_feature 248..1462: note = CDS
  misc_feature 1463..1472: note = RE
ctcactggtgcaccctgagggagtcgcgggcaccatagccagcggcggaagcctggtgatcaccggtccatcgccagcgacgcttgccgcttgacggccagcatgagttacgcgagggccggtgacccaggacgtgccgactggcgttagggctgagcgtcagtgaacgccgatcagtgagcgaccagcagacgcgtcccggaatcaccgagtgctcccccaccgaacgacaagcagggagggcaccatgcaggatgccacagcgcgcttcggcagtgtcgattgggcgaccaggggccacgccgcgtgcgtcgtcgatgccgccggacagatcgtggatcagttcaccgtcgaccacaccgcgctcgggctggctacgctcgtgcgtcacttccagcatcagcaggttcggcgagtggcgatcgagcgcccggatggccccgtcgtcgaggcgctgctggccgctgatctggaagtggtcgtcgtctccagtcgcgccgtcaaggcgctgcgcacgcgctacggcctggccggcaacaaggccgatcgcagcgatgcctacgtcctggctgactgcctgcgcacagatggccatcgctggccggcgctgcagaccgatacgctccagacgctggccctgcgtgctgccgtgcgtgcgcgcaaggacctggtcgctacgcgcgtcgcgagggccaatcagctgcgcgcccatctccaggtggtcttccccgccgccgtcggcgtcttcgcggagatcgattccgggatcgcgctgcgtttcctcgaacgcttccccaaccaggacaaggcggcctggctctcggagcgtcgcctggcagcctggttgcaggccaatgcctactgcggccgccgccccccaggtgacctgctgcagcgcctgcacagtgctacacccggcgtgcgcggtcaggccgctgaagcactggcggtggtcacgctcagcttggtgcgcgtcccgcgcacactcgcggccgagatcgccgagctcgaggcccacatccgtgagcaactggcgctgcaccccgacggaccgatcttccagagcctgccgcgcgccggcagtgtgcgtgccgcggcgctgctggccgagatcggcgactgctgtgctcgctttcccagttccgagtcgctggccgccctggctggtgcggtgccgtcgacacgcgcctccggtcagcaccgcgtcgtcactttccgctgggcgtgcgacaagaagctccgcgacgccctggtcgacttcgcccaggacacgccacgcgccagcccgtgggctgagcagctctaccgtcggcaccgccagcagcgcaagacccatccgcacgccgcgcgcattctgacaagggcctggatcaacgtcatctggcgctgttggcaagaccgccagccctacgaccccgctcgccaccggggtctccagcgcgtcctcgcctctgggggttgacttagggcta

SEQ ID NO: 1277 - DNA, 1464 bp, unidentified
  source 1..1464: mol_type = unassigned DNA; note = element_18c38ed
  misc_feature 1..5: note = core
  misc_feature 6..229: note = LE
  misc_feature 230..1447: note = CDS
  misc_feature 1448..1464: note = RE
  misc_feature 1..233: note = bridgeRNA
cccccgttacctttttcgtggttcctgatcaaggagctgtggtcgccaggtccggcatgactgagtcccccagtcgcacgcatgatccggggggtggtgtcaccgggcctgggggcatcgagggaccgctgatagggacacggccaccgcttggtaggtctcgtcgtaacgtgggtgccggccatcgatgctcgaccggcgaccacccgcgacggacgaaagacaatgcatgaccagcagttatggcgtttttctcgggttggacgtcggcaagggcgaccaccacgccgtgggcctggaccctgccggcaagcgactgcataacgggccgctgcccaacagcgaaccgaagctgcgagcggtgttcgacaagctcgccgcccacgggccgctgctggtcgtggtcgaccaacccgccacgatcggtgccctgccggttgcggtcgcccgcgcctgcggccatcaggtcgcctacctgcccggcctggccatgcgccgtatcgccgacctctaccccgggcgagccaagaccgacgcccgggacgcattcatcatcgccgacgcggcccgttcgctgccgcacacgctgcgtcaagtcggcgtcggtgacgacgcgctggccgaactcgacgtcctggtcgggttcgatgacgacctggccggcgaagcaacccggctcagcaaccgcatccgtggcctgctcaccggtatccacccagccttggaacgcgccctcggcccgaaggtcacccacctggcggtgctggagatcctgtgccgtttcggcggcccggcggggatccgcgctgccggccgaggcgaactcgcctcgatcgtgaccgcgcacgcgcccaggatgggcgagaaactggtcaccacgatcctcgctgcactggacgaacagaccgtcacggttcccggcaccgcagcggctgacaccgtgctgccgaggctggccgagaacctgaaaaccgtgctccagcaacgcaaaacggtcgcagccgaggtcgaggggatactcgatgcacaccctcttgccggggtcctgacgtcgatgcccggcatcggagtcaggaccgccgcccgcattctgctggagatcggcgacgcctccgccttcgccagctccgcgcacctggccgcctacgccggcatcgcccccgtcacccgcacctccggctcctcgatcaagggcgaacaccccgcccgcaccggcaaccgcaagctcaaacgcgcgttcttcctcgcggccttcgccgccttgtccgaccccgtcagccgggcctattaccagcggaaacgcgatgagggaaagaagcacaacgccgcgctgatctgcctggcccgccgccgctgcgacgtcctgttcgccatgctccgcgacaagacctgctaccaagcaccggcacctccccaacgtgaccccgccgagtcccaagccgcttgacaaccagatagggacac

SEQ ID NO: 1278 - DNA, 1396 bp, unidentified
  source 1..1396: mol_type = unassigned DNA; note = element_18caeef
  misc_feature 1: note = core
  misc_feature 2..90: note = LE
  misc_feature 91..1122: note = CDS
  misc_feature 1123..1396: note = RE
  misc_feature 1161..1391: note = bridgeRNA
caatggaatggacgcccccgccctattacggcatcgcgatgtgccagagtgggggtgtgaactctcactcgaagcgacggaggcgtccagatgcaggttacaacactcggcattgatctcgcgaagaacgtgtttcaggtccacggcgtggatgcgcagggccggaaggtgttttcgaaggcgatcacgcggaagaagctgcttgcgttcctggcgcagctgccggcgtgccgggtgggcatggaggcctgcgggagtgcccattactgggcccgtgagttgcaggcgttggggcacgaggtgcggctgatggcgccgcagttcgtgaagccctacgtgaagacgaacaagaacgaccgggcggacgccgaggcgatctgtgaggcggtgacccgcccgaacatgcgtttcgtgccgatcaagacgcccgaccagcaggcggtactggctttgcaccgggtgcgcgagggccagatcaaggcgcgcaccgcgcaggccaaccagttgcgcggcttgctggctgagttcgggatcgtggtgccccaggggatgacgaccctgttccgcgagctcccggggatcctggaggacgcggagaacggcttgccggatctgttccgcacgctgctggccgaccggctcgacgagttgcggcgactggaccaggccgtgaaggaacaggagcgccagatccaggcctggcatcgaagtcatgcggtcagccggcgcctggccgagatcccggggatcggatcgatcagcgcgaccgccttggtcgccgcgatcggcaatgcccggcacttcaagaacggtcgccagctggccgcctggatggggctggtgcccaagcagcactccagtggcggccagtcgaacctgctggggatcagcaagcgcggcgaccgctacctgcgcatgctgctgatccacggggcgcggtccgccctgttggcggatcagcgccgcggcgagggcggcgacccttggctcgaagggttacgccagcggcgcggttccaacgtggccaccgtggccctggccaacaagaatgcccgcacggtctgggccctgatggcccatgaccggacgtttgaccccggcttacgcggcgccgccgcgtaagcctgaaaaaacggagaagcgaacgcgttattacgtacccaaccctcgattgcgcaagcgattgagcatgatggcaacgggagcgatcccggtgggggccagtccgatcattgcgaagcacctcgagtgcgcgacctcgctgggaccctccacccgcggaatccatccgggaccgtggcgaatgaaagccgcacacgcagtccgaatgtacgggagcaatcgtcgccccgaaaccatctactcaaacgcttggcaaaccgggggcgtccatgta

SEQ ID NO: 1279 - DNA, 1349 bp, unidentified
  source 1..1349: mol_type = unassigned DNA; note = element_18caef2
  misc_feature 1..3: note = core
  misc_feature 4..78: note = LE
  misc_feature 79..1104: note = CDS
  misc_feature 1105..1349: note = RE
  misc_feature 1083..1336: note = bridgeRNA
tgatggggtggatggcccccacccggcctctgtgtgccacactggggtcatcgacgatcctcaacaagggagccatccatgaccaagattaccacgatcggcctcgatctggccaagcgcgtgttccaggttcacggggtcgacgcgaccggagcggtcgtgctgcgcaagcggctccggcgcgaggacgtgctggtcttctttacccagctgccaccctgccggattggtatggaggcgtgctcgaccgctcaccactgggcgcgggaattacgaacgctcggtcacgaggtgctgctgatgccgccgcagtacgtcaaaccctatgtaaagcgcaacaagaacgacgccgccgatgccgaggcgatctgcgaggcggttgggcggccgaacatgcgtttcgttccggtcaagaccgtcgagcagcagtcggtcctggcgctgcaccgcagccgcgatctgctggttcgtcagcgcactgcactggccaacgccatacgcgcccaccttgcggaattcggcatcatcgaggcccagggcctgcacaaactcgagcgtctgacgcagatcgtccaggacgagacggataaccgtgttccggccgaggcccgtgacgccttgactgcgcttgtggcgctggtcgatgagttgaacacccggatcgatgccatcgagaagcagatccggacctggcataccgccagcaaggccagccggcggctggcaaccatcccaggcatcggcccgatcatcgccagcgcccttaccgcaaccgtggcggatgcttccgccttcgccaacgggcgggccttcgcggcttggcttggcctggtgccgcggcagaactcgagcggcggcaaggaccggctcggtcgggtcagcaagcagggcaacggccaactgcgtcggctcctgatcatcggggcgcaggcagccctgcagtgttcgaagtcgctccggacgcatccgtgggtggctaccttgctggcgcgcaagccgcgccttgtcgcggcggtcgccctggccaacaagatcgcccggattgcctgggcggtgatgagcaagcaggaggacttccgggggctcgcggcaacgccggcttaagccgccgccgagccctcttccgaggcttgcaagagcacgatgatggcacgtcggtcgctccgacggatcgagacaagcctgagttctgtcatggggttcttgcccccggaaagctgattaggcctcgacccgcggatcccatcagggccagcggtcaaacgaccgcccagaaaggccggacacatgaccgcaagcgttccaacgtggctcaaaaaagctcttgcatgcacggagccatccacaca

SEQ ID NO: 1280 - DNA, 1398 bp, unidentified
  source 1..1398: mol_type = unassigned DNA; note = element_18cc6b9
  misc_feature 1: note = core
  misc_feature 2..89: note = LE
  misc_feature 90..1124: note = CDS
  misc_feature 1125..1398: note = RE
  misc_feature 1164..1393: note = bridgeRNA
taatggaatggacgccccctttcactggcgtccgcctgctgtcaaagtctgagcgggcgatcttgcccgcttgctctacggaggcagctatgaagatcacaactgtcggattggatcttgccaagaatgtgttccaggtccacggtgtcgatgagcgcggggccgttgtgcttcgcaagcagatcaagcgcgaccaggttgcggccttcttcgcgcgcctggagccctgcctgatcggaatcgaagcgtgcggcggcgcgcactattgggccgcgaaactcagcgcgcttggccatcgcgtgaagataatggcgccgcagtttgtcaagccctacgttaagaccaacaagaacgattcgctcgacgcagaggggatttgcgaggccgtcgcgcgcccgaacatgcgcttcgttccggccaagtctcccgaacagcagtccgttttgtcgttgcacacggcgcgcgagagtttcgtcagggcgcgtaccgcgcaggccaaccagatccgcggactgcttctcgaattcggactggtcgctccccagggcattcgccacgtctatcagcgcgtcccagagctgatcgaagatgcgagcaacgagctgccaggacgtttcaggattctgatcgaccggctgctgcagcacctcaaagcgctggacgtccaggtgcgcgagctcgaacgagagattgagcggtggcatcgcagcagcgaggtcagccgacggctggagaccattcccggaatcggccctatgaccgccagcgcgcttgtcgctagcgccggcgatccggccaacttcaagaacgcgcggcagttcgcggcgtggatagggcttgtgccgcatcagaactccagtggcggcaagactcaactgttgggcatcagcaagcgcggcaacgtctatcttcgtacgctgctgatccacggcggccgaacgatggtgcagctggctaaaacgagggccgatcaagcgggcagttggctgggcaaattggtcagccgacgacatcacaacattgcggcggtggcgatggctaacaagaacgcgcgcctggcttgggcgttgctgtcctccggcaaggcctacgaggccacgcacaacgcgatacagaccgtgtagtttgcgcagtcggcgcggctgcagatccagaacacagattcctttcacaggttgctttggcaatcgatcgttgatggcaagataggtaggaccggggctggtcgaacctgacgtggacaacgagccttgagctcgcagatttgttgaggaaccagccagcgaattccatcagggccaaagcgcaacacgcgtctgaaggccggatgtatgtctgcaaccttagcctgctcgccagcagtgaaagattgtcttgcaaactgggggcgtccatgta

SEQ ID NO: 1281 - DNA, 1260 bp, unidentified
  source 1..1260: mol_type = unassigned DNA; note = element_18ce1b6
  misc_feature 1..2: note = core
  misc_feature 3..79: note = LE
  misc_feature 80..994: note = CDS
  misc_feature 995..1260: note = RE
  misc_feature 1001..1247: note = bridgeRNA
tgatggcgtggacggcccctgcactagcgtagctgtgcaatactgcggtcgttgtaggtccacgtctaggagtcggcagatgaagcagaaggttgtcaccgttgggttggatttggcgaagagcgtttttcaggtgcacgcgatcggcagcgacggtgccgttctggtgcggcgcaagctacggcgcgcagaggtaatcggcttcttcgaggatcttccagtgggcctggtcggcataaaggcaagtgcctcggcccatcactgggctcgggagctaatagcgttggggcatgagatacggctaatgccgcccgcctgtgtgaagcccgatgtgaagcgcgggaagaccgatgcagccgacgccgaggcaatttgcgaggcggtgacgcgtccgacgatgcggttcgttgcggtgaaggccgtcgatcagcaggcggtgttgatgcttcacaaaagccttggcctgatggtgcgccagcggacgatgctgatcgacgcgcttcgagggcacctggctgagtacggtgtcgtgacaggtgtcgacactccagcgaggtcgactgcctcgaagcgcagatactcttgtggcaccgagccgacgagacgagccgacggctcgtcacaatatcaggcatcggtccgatcaccgcgtccgcaaatatcaacggcagtgccagatgcctcgctgttccgatccggacggcaattcgcatcatggcttggacttaccccgcgagcgaaaagctccggcggcaaggagaggatgggcgggatcaccaaacagggtgaccgctatatgcgacgcctgctcgtggtcggcgctacggcggtcatgcgcatggcgcgcaaagatgccgctcgccaaccttggttggcccagcttgtcgagcgcaaaccggcgaagatcgcgatggtcgcgctcgccaacgagacagcgcgcatcgcttgggcggtgatgtcgcgtaacgaagtctacgcggcgtccgccgcgtgaccgctgtccgtgccgctgggtaacgcctggggtaggatggtgtaggagtagctgagtagtgatgacaaaccggtcagaccgggggccggcaaaatctaggggggcacagcgcttcaagcgcgatgacgtgattaggcaggcggccttcggacttcatcagcgccagcagccatgcggtgctgcgcgaacaggccgaacacatggatgcacccgaccgatgctcatcgttgcacaaaagctcttgcgccgaagggggcgtccacaca

SEQ ID NO: 1282 - DNA, 1319 bp, unidentified
  source 1..1319: mol_type = unassigned DNA; note = element_18d1ec5
  misc_feature 1..2: note = core
  misc_feature 3..70: note = LE
  misc_feature 71..1084: note = CDS
  misc_feature 1085..1319: note = RE
  misc_feature 1091..1313: note = bridgeRNA
ttaattatatggtccgcctcactctcaagccattaagcttagagtaggctctcagaatgaggtgaaccatatgtcttctattcatattttaggtatcgacctaggtaaacattgcttccatgctatcgcacataaccgttgtggagtggaggtgcttcgtcgtaaatttaatcgtaaccaactcttaatctttcttagtaaaatagaaccaacaactattgctttcgaagcctgtggcggtgctcattggcttgctcgaaagtgtagtgagtttggtcatcaaccccgacttattcctcctcagtatgtaaagccttatgtcaaaggcaataaaaacgatttcatcgatgcttcagcgatcgcagaggctgcgggtcgaccgaccatgaggtttgtagctgtaaaaagtgaagaggctcaagtcatcgcagcgattcatcgagtcagagatagttatatcaaggagagaactgccactatgtcgcggatcggcgcgatcttacttgagttcgaccttagctttcccaaagggcatgcaaagatgaagtctctgtttcaatggttagctgaacaaaccgtctcattaccaaaaagcttgctatgtgaattgatatctatccacgaacattacaagtaccttaatgaacaaatcaaaactcaagataacaagcttcaaactattgttaataacaatgaaagtgctcaattattaaaaactatccctggaattggcgatcttacctccacattgtgtatagccgatgtaagctctccgaataactttaccaatggccgtgagatggcggcttggttggggcttgtgccaaggcaattctcaacgggaggaaagaccaaactacttggtatgagtaaacgagggaataaacacctcagaactctgtttgtccatggggcaagagctgtactctctagactagagacgacagggaaagtgttcggagagtggcttgcgaacctacgagccaccaaaccatttaatgtagtggtagtcgcattagccaacaagctagtaaggatagcttgggcggtgttataccaccgccaagcttttaaggctgtttagctataaccaagtttgcaacgccaatgaacgtgatgacaaaaacggtcaatcggccagattaagaacctgacacaaaaaatagcaatcaatgctttgggctttttaaggataatctggcgcggatatcatcgtggagctgggaagctagtgctcccaacaaggactccgaatacattagcgcaaaccaactccgttattacttaattgtagttgcaataacggggcggaccataca

SEQ ID NO: 1283 - DNA, 1717 bp, unidentified
  source 1..1717: mol_type = unassigned DNA; note = element_18d3806
  misc_feature 1..2: note = core
  misc_feature 3..361: note = LE
  misc_feature 362..1537: note = CDS
  misc_feature 1538..1717: note = RE
  misc_feature 116..334: note = bridgeRNA
ctcgtataataatgttgtagttaaaactacatattttattttcatcccatattctttatgggataatagttgtatagatagaggtcgtagttctcctccttcgtataataatgttgtagttaaaactacatattttattttcatctcatattctttatgagataatagttgtatagatagaggtcgtagtttttctccttgaagcttttgtcttccttattaagggttacgcctcttctttacgtctttatgcgtatgagctggatagcacattcgttgctgtatgtctaacgaggttgcattgtcgtaaagttctagagggttctttctctatctaaattttttgaaactaggtgattttatgttttacattggtattgatatcgcaaagaaaaaccacgaagcttctattattgactcttccggaaaatccttatctaaaagtatatctttttctaatactattaaaggtttagaaaagtttagggattttcttgattattttaatcttgatattaacaattgcattattggaatggaagcaactggtcactattggcttagtctttattcttttcttctagagcttggatttaattgtatcgtcataaatccaattcaatcagaagctttcagaaaaatgtacataagacaaaccaaaaatgatgctgttgactcgtttgttatcgctcaaattatgaggtttggtgaatactcaatctcaaatttttctgatgaagatacttttgcactaagaaatctttcaagatacagatttgctttagttgatgaatgctctgattggaaaagaaaactagtcgctattcttgaccaagtttttccagaatattcaacacttttttctaatatctatggagttacttcaaaagagttattatccaattatcctttacccgaagatttaattaacatttctgcacaagaattagcaaatcttctttcaaaatgtagtaaagggcgttttggtctaaaaaaagcacaagaaattcaatctacagcttcaaactcctttggaattaaatttgctaaaaaatctttttctttccaaatcaagcaaatcattaatcaaatttcatttttagaagatcaaatttatgaaattgaagaagaaatttctttcatgcttaatgaactttgccctgtaattactagcattataggtgttggagaagttcttggagcagcaatttattccgaaattggtgatatttcaagattcgaaaaagcaagtcaattagttgcttatgctggtcttgatgtttcagttaagcaatccggagactttagtgcttcaaatgctaaaatatctaaaagaggttcaccatacttaagaagagcgatttggctatcagcaactgttgctgcatttagagatcctgctctatctaagtactatcaaagtatgagagatagaggaaaagcccatggaacagctattggagccgttgctagaaagcttactaacatcatttttgcagtattgcgtgacaacaagttgtatactccaaatatttaattgttaatattgtttttttttcacctaaattattaggtttgtttgctgtgcacaaatttaagtaattttttagctaagttctgtcaaggggccctcccttgacaggttttagataaaaaattatacttcatgagcactgcaaacaattaatcatttatctattgacatttgatagctggt

SEQ ID NO: 1284 - DNA, 1152 bp, unidentified
  source 1..1152: mol_type = unassigned DNA; note = element_18ec16f
  misc_feature 1: note = core
  misc_feature 2..207: note = LE
  misc_feature 208..1137: note = CDS
  misc_feature 1138..1152: note = RE
  misc_feature 15..191: note = bridgeRNA
cttgtgtcttcgctttggcctagcgtgcaggtgagagcggagtgcgggacgccgacaagctggggtgccctgaagcacgtgtaggagccagggcgcccgcactccacgctcttgccagagcccgaacagttgaacgagtcagcagctcgcactgcacaagcatgggccggcaagagtgctctcccgtccagtctaggagagaagcagatgtctgtgttcgtggggatcgacgtggccaaggccacgctggcggtggcgctgcggcccaacggagaggtgttcgaggtggccaacagctcggccgggcaccggtcgctggcgcagcggctgcggaagctgccggtggaacgggtgctgctggaggcgaccggcggctacgagcgggcggtgatggctgccctgcaggatgaatggccggtggtgcgcgtgccaccgcaccgggcgcgctcgtttgccactgcgatgggccggaccgccaagaccgacccgatcgacgcggccatgctggcccatatggcggaggtgaccgaaatgccgccggccgctgcggaaacgccgcaacagcagcggctgcaggcgttggtgcaacgccgtgcgcaggtggtgcagcaacgcgacgacgatcggcgtcggctgcagcaggtacagggccagccgctggtggtggccagcctgaagcgcctgctgcgcgcgcagcaggcggagatcgcgctgctggacaaggccatcacccaagccgtggctgacgccgacagcgagcgttccgcccaactgcgggccgtacccgggatcggcccggtgaccgccgccaccctgatcgccttcctgcccgagctggggcagatcgaacgccggcagatcgccgccctggtcggcgttgctccctacaacgccgacagcggcggcaagcgcggcttgcggcgcatccagggcggccgtgccggaatccggcgcgtgctgtacatggccacatggagcgccatccgcgcccagcccgccctgaagcgacgctatgaggctctaaggagccgcggcaaatgcgccaaggtggccctggttgcctgcatgcgcgccttcctcgggcagatcaacgccatgctcagggatggcaaaccctggcagccagcctcggtctgaaaaaagacagttgct

SEQ ID NO: 1285 - DNA, 1387 bp, unidentified
  source 1..1387: mol_type = unassigned DNA; note = element_18f4ffb
  misc_feature 1..3: note = core
  misc_feature 4..88: note = LE
  misc_feature 89..1117: note = CDS
  misc_feature 1118..1387: note = RE
  misc_feature 1088..1374: note = bridgeRNA
agatggaatggttgccgccctcccgagacggcatcgcaatgtgccaagatcgtggtgctcatagccacaatatggagaggacggcggcatgaaagatatgatgattggggtcgatctggcaaaaactgtttttcaagtacatggagctctacagaccggggaggtgcagtttcgcaaaaagctcacgcgaaagcagttcgtctcgttcttggccaacctagagccctgtctggtcatctttgaagcgtgtgggggggcgcatttctgggcgcgcgagatggaagcgcttggtcacgaggctaagctaattgccccgcaatacgtgcgccctttcgtgaagcgtcaaaagaatgatgccgccgatgccgaggcgatcgtgatcgcagctcgtcagccggaaatgcgctttgtggcggtcaaaacggctgagcagcaatctcgcgcggcagtgtttcgaggccgtgagcgattggtccatcaaagaactgaagacgtgaacgccttacgggcattgctgtatgagcatggccatgtattccctgtagggatacgttctctgggtcgcatggcgtcgctgttggaggatgaaacctcggacctgccagccctgatccgagatgagtgcaaagaactgctggcgcaaattgcagagaaaacagctcgcgtccttgaaagaaacaagaaactctcaactctggcgtcccagtcagatagagttcgtcggctccaaaccatgccgggtgtcggccccatcacagccatcgcggtggaggctttcgggcccgacatggcacagttcaaaaccgggcgtaacttcgcagcttggctggggcttgtgcccaggcaacactcatctggaggtaaagagcgtttggggcgtatgaccaaggcaggccaggccgatatccgacgccttctgatcattggcgcaatgtcgcgactgaactggcttggggtacgctcggttactgagggtagctggctgtcacgcatgttggcgcgcaagcccaagatgctggtcgcgatcgctctggccaacaaaatggcgcgccaaatctgggcgatgctgacgaaacacgaggattacaaagatccggaacttgcaggtttggcatgatgttcatgtaaatctgcgaggaccggtgccacgggcgtgtaagaagacgatgacatgaatgggcgaaatgatcgaacagatctggatcaggaaaaccagttagtcgctgcgagcaaagagctcgaaggttagatttggacctgatccgctgatcaccatcccggccagcggcttctgaaaatgccgcgaagagaggccttacagaagttcgcactcgatcacagacctgggaagtcagaaacttcttgcacttagggcggcaaccacaga

SEQ ID NO: 1286 - DNA, 1192 bp, unidentified
  source 1..1192: mol_type = unassigned DNA; note = element_18f6aa1
  misc_feature 1..2: note = core
  misc_feature 3..292: note = LE
  misc_feature 293..1180: note = CDS
  misc_feature 1181..1192: note = RE
  misc_feature 12..209: note = bridgeRNA
cttgtcttatgattttggcagtttctatgcgaatctggaacagctgcgcagcacgtcatttatgccaggcagcggcggaggttggaccgttcccctcttggtcgttgaggaccgtcgctgagtaaggtcacctccgtctttttttgaaacctgaacggatacttgggctttgggcccgcatgacaagacaaggttaggaagagacacatggaagataccattgggatcgacatttcgaaagacacattggacgcttattggttgtcctcgcgagagcacaggcagttttgcaatgacaaagctggcgctaaggcactcgcattttgggcgagaaaaacagaagtttcccgcgtcatttttgaagcaacaggcatttatcacaggtgcatcgaaacgggcttggctcaacacgggatcagctttgcacgggtcaatccgcgtcaggcccgccggttctgcgaaggtgagcgatttggtcgccatcggttcaagactaatcgcgaacggccggctggccaaaacggaccgggtggacgctgcgctattagccaaaatgggcgcacttctggaattgagagcagaccaacccaaaagcgaaacacttcatgatctcaagcagctggcaacagccaggctggcattgatcaaggaccggaccgcagcaaaggcacgacttgccgcaacgacgcacgtcctgccttccaagcagatcaaacgacgtctgaaacagatcgaacgtgacttgtcgcaagttaccgaggcaatcgatgccatcgttgcggcagacaaagatctcgctgcacgcgccgagattcttacaagcattccgggcatcgcaaaggtaacagcctgtgcgatattaaccgaaatgcccgaactcggacatttgagtggcaagaaagcagcggcgctggcgggccttgcacccatatcgaggcaatcgggaaagtggcaaggcaaggaacgcatccagggcggtcgcgccagcgtcaggcgcgcagtctatctgccagcggttgttgctacacgcttcaatccagacatgaaggcaaaatacgaacatctgatatcgactgggaaatgcaagaagctggcgatcacagccgttatgcgaaagctgattgtcaccgcaaatgcccttctacgggatcagcgaaaatggggcgaatatccagcttgaccaatacggata

SEQ ID NO: 1287 - DNA, 1149 bp, unidentified
  source 1..1149: mol_type = unassigned DNA; note = element_18f99ba
  misc_feature 1..2: note = core
  misc_feature 3..171: note = LE
  misc_feature 172..1134: note = CDS
  misc_feature 1135..1149: note = RE
  misc_feature 1..151: note = bridgeRNA
ctagtataatctaacgggacacggtataccgttctgcgccaggttcacgagatcgccgcggagtgttgggtagccgtgtccttcaacgcgaccaagccgaacagttatctgggccctcaaacccgcatatgctagcaaggctggcgccgttttcctcaggaggttctgtgtatggcttcccgtgagtcgctctttatcggcattgatgtctccaaacagacgctggatgtggcgtttggcgccgacccgcacgcgccactcgagacgataccgtataccgacgaaggtgtccagctcctggtcacgcgactccagcgcctgcagccgaccctgattgtgctggaggcgaccggcgggctggagcgcatggtgttcgcccaactgctccaggctggcttgccgacggcgcgggtgcagccacgccgcgtgcgcgccctggcgcacgcggaaggacgccaggcgaagaccgaccgcctggatgcccggttgctcgcccgctttgccgaacgggtgcgcccgccgcaccaccaagcgacggacgagcagcgcgcatccttgcgcgacctgctggtccggcgggagcagttgattcagatgcggacggctgagatcaatcggttgacggctgccgcgccgaacctccgcccgggcatccagaagcatattgattggctggatcaggagatccgtgcgcttgagcaggaactcgacaacgaggcggagcgcaccgacgagttgcgccggaaacgggagctgctcgaaagcgtgcccggcatcggcgcgatcaccgcactgaacctgctgctccgcctgcccgaactggggaccatcaatcgcaaggaagcggcggcctttgtgggcgttgcgccgtatgccaatcagagcggcgcacagcacaaaccccggcatatctccggcggcaggagggatgtgcgcagcgtgttgtacatggcgaccctggcggccacgcggcgccgtctggtcattcgcgccttctatcagcgcctgtgtcaagctggcaagccgcgcaaggtcgccatcgtcgctgcgatgcgcaagctgctgactattctcggcgcaatattgcgtcagcaaaagccctgggatccggctgtgcatacgagcgccccttgacaagcaacacagtta

SEQ ID NO: 1288 - DNA, 1441 bp, unidentified
  source 1..1441: mol_type = unassigned DNA; note = element_1909d95
  misc_feature 1..2: note = core
  misc_feature 3..80: note = LE
  misc_feature 81..1184: note = CDS
  misc_feature 1185..1441: note = RE
  misc_feature 1254..1375: note = bridgeRNA
taatcagatggactcgccctcgccgaggcgtcaaagcgccacggtggcatctaaaagccaacgacagcgagggcgagcccatgaacaagcgtacagcgaagaagcagtcccaaccactgaacgacgtgtcggcctgcacgacggtcgcagtcgatctggccaagcgggtgtttcaattggcgggcgaggatgctcaaggccaagtggtctttgagcagcggatcaaatcgcgcgaggcgttccaggcgttcctgggcgcactgccggctggtgtgatggtgctgatggaaaccggtccgggcgcacaagcctgggcccggctgttgcaggcgcaaggcgtgcgggtgcgcatcctgccggcgcagcgcgtggccgagcatcgcagcggggcgaagaacgatcgtaacgatacgctggccatcctgcgtgccgggcgagacagcagcatcgccgcggtgccggtcaagagtgcggcggcactggcgatgcaggccctgcatcgggcccggcagggctatgtgcgccgtcgcacggccatgggcaaccagatgcgcgggctgctgctcgagcatggcatagccttggcccaaggcgaggcggccatcgcgcggggcgtgccgcgcgtcctggaagacgccacccagccgctgcccgacatgctgcgcgaactgctcgacgaactgctgggcgaatggctccagctgggggcgcgcatcgacgtgctgactggacgcctggaaacccatgcgcgcactgacgagacggcgaaacggctgatgaccgtacgcggggtcggcccgatcatcgccacggcgctactggccaagcagaccgagcccgagcgattcgccaatgccaggcagttcgccgcctacttcggcgtcgtgcccgaccagcacagcagcggacagaaggtgcagttgggcaggatgagcaagcgtggcgatgcttatctgcgcagcctgatgatccagggcgcgcatgcggtcttgcggcagttgcagcctgatacggagcagccagacgaccgccgcctgcagcgctggctacagcgcctcggtcgcaagggcgccgcggtgcgcctggccaaccgcaacctgcgcatcctgtgggtgctgctgcagagcgaacagacctatcgtcgccagccgaacctggatcaggaggctgcgatgagccactgagcaaacgagtgaccgccaccggggcgccaagcgctccaacccctgctgaagaacattgaccccaggtcagaccgtcgcggaacgatgcctgccaccctaccggctcttgaagcctccacgtaatgggcataccgcgagctgaactgatgttggccagaagcccgacgaggcttcctcgaacaggcctgatacatagatgcaaccgggtagcggtgttcaaagagcagaaggttgacaggtgggggcgagtccataca

SEQ ID NO: 1289 - DNA, 1396 bp, unidentified
  source 1..1396: mol_type = unassigned DNA; note = element_19103ba
  misc_feature 1..2: note = core
  misc_feature 3..82: note = LE
  misc_feature 83..1108: note = CDS
  misc_feature 1109..1396: note = RE
  misc_feature 1136..1383: note = bridgeRNA
tgatggtgtggacggcctctcctcaacggcaccatagtgccaaggcgtggtcgcaggagcgccacaaagagggagaccgtccgtgaaaaagtttatcagaatcggcatcgatctggccaagaattattttcagatccacgcgcttgtgagcgaaggcggccccgccgtgacgcggaaggtgaggcgctcgaagatgcacgaattcttttcgcagattgagccctgcctcatcggtatggaggcctgcggctcggcgcattattgggcgcgtgaactcaaggcgatgggacacgaagtgctgctgatgccgccagcttacaccaagccctatgtcaaacgcggcaagaacgacgcggtcgacgccgatgcctgctgcgaagcgatgtcacgccccggaatgcgcttcgttcctatcaagagcgcggagcagcaagcgacgctgatgctgcacaagacgcgcgaactgctggtcaagcagcggacgatgagcgtcaacgcgcttcgcagccatctttcggaattcggcatcatagccgccaagggaatcggccgcgtcgacgagttgcttgaactggccgaaagtgatgcgacgcttcccaacgccgccaggacgggtgtaaaggttctatcccaggcttttgaggggctcgacaaagcgatcgacgatctagaggacgaaatcaccagcgcccatgcgcaaaatgagatgacccgcttgctctacaaggttcccggcatcggcaagattatctcttcggtgatcgcagccagcgtgccggacccgagcgtgttcaaatcgggacgcgatttcgccgcttggctcggcctcacgccgaggcaaaactcaagcggcggcaagcggacgctcggggccatcactaagcagggcaaccgatacataaggaaactgctcgtcttgggggcgacctcgctgctaaacgtcatgggcaagcgcaaaggcgccttgcgcgactggattgtcgggttgctatcaaagaagccggcacggctggttacggtggcgctagccaacaagctggcccggatcctctgggcgatgatgaagaccggcgaaagcttccgcaccgagatgttcgcgaaggcgtaaggaagccgctcgtcgccgcaaggagtgtttacaaaggagatttacaggttcgagtttggcaagcgcaacgagacgtgatgaacgacacggtcgccaccgaagaccaggaacaacccgccaaaaaacatgagcgaaagctcgcatccatgatagggatcccggtcgtcggacttcatcaaggcccgcggacatatgctccgcacagacagaggccggacatatgaccgcagccgaccaaatcgttcgaagcgccaaaaaaagtgcttgccagggagggccgtccacata

SEQ ID NO: 1290 - DNA, 1154 bp, unidentified
  source 1..1154: mol_type = unassigned DNA; note = element_191bfd2
  misc_feature 1..2: note = core
  misc_feature 3..317: note = LE
  misc_feature 318..1142: note = CDS
  misc_feature 1143..1154: note = RE
  misc_feature 37..209: note = bridgeRNA
cttgtcttatgacttttcgtgccgattgggagatattggcaccgccgccgggagtgaccgctcccggacggcggcgagggtcggatcgtcatgatgcaggaggttttacgctccgagctagagtttgatcgccctcgtctttcccatcggcctgaacggatacaggggctttaaggcccgcatgacaagcagaggcaggaaagaagacagagattaccatcggcgttgacgtttcgaaagacactctcgacgtccacctttacccggcgggcgatcaccgccagtttgagaacacgccaaaaggcttcagggccgtcgtgagatggatcgcggaccggcccgtcgcccgcctcgttttcgaggcgacgggtccttatcaccgcgccttcgagcgcgcgatgggcgaggcaggcctgccactatgcaaggtcaatccgcgccaggccaagcgttttggcgaggcgctcggccagctggcgaagacagaccgcatggacgcagggatgctcgcccgcttcggggccttgctcgaaccagacgtgcgcccggcgccttcgaagatcatcagtgatctcaaggacctgcatgtggcccgcacagccctcatcaaggaccgcaccgcagccaggaaccggaagaaatcgctacaaagcccgttgctgaaacgccagtcacgcgaacgcctcgcccagatcgagcgccatctggaggccatcgaagacgggatgctggccattattgaaagcgaccaggatcttgccagaaggtttgccatcctgacgtctatccccggcgtcgccacacgttcagccttcgccctgatcgccgacatgccagagctcggaactctcgacagtcaggccacggccgccctatcaggaactgcgcccatgacccgccagtccggcaagcgaacgggcaaggccttcgttaccggaggcagggtaaatgtccggcaggccctttacatgccagctttggtggctgcccggttcaatccggacttcgctgccatgtaccaagccatgacagcacgcggtaaaccgcccaaagtcgccctcaccgccattatgcgaaaactcatcatactcgcaaatgccctcataaaagctgaccggaaatgggaaccaagagtggcttgaccaagacggata

SEQ ID NO: 1291 - DNA, 1460 bp, unidentified
  source 1..1460: mol_type = unassigned DNA; note = element_191f2de
  misc_feature 1..3: note = core
  misc_feature 4..221: note = LE
  misc_feature 222..1439: note = CDS
  misc_feature 1440..1460: note = RE
  misc_feature 7..219: note = bridgeRNA
ctaatagggtaggaacaagatccaccgatcgatactgttccaccgagccaccggtgggtgagcactggcaaattccgggtagcgagccctacaactagacagtgcccccatcggccggcgaggggatgagacggctagtgggatgacgtgcctcgagcactgaactattaggtcggcgggagtctcctccggctcgattaccgatttgagggaggtgcaggttggaaatctttgtcggcatcgattgggcggaggcgcaccacgacatttgcgtgctggacgagatcggcacggtcgtggcgaagcggcggattgcggatggactcgaaggcgtggggcagctgcacgcgctgctgggcgaccacgcgacggagccgaaccaggtggtgatcggaatcgagaccgaccgggggttgctggtgggagcgttgctggccgcgggctaccaggtctatgccatcaacccgttggcggccagccggtaccgcgatcgtcacgggacgtccggcgcaaaatcggatcctggcgacgccaaggtgctcgctgacctggtgcggaccgatcgccacaaccaccgcccggtggcgggcgactcggagctggccgcctcgctgcaggtgctggcgcgcgcccaccagaacctgatctggagccggcaacggctcgtcaaccagctgcgtaacaatctgcgcgagtactacccggcggcgctcgccgcgttcggcacggagctcgcccaccccgttgccctcggcgtgctcgacgtggcccccacgcctgccaggggccgtaccctctcgcgcgccaagctcgtggccattttgcgccgggctggccgcgaacgtggggtggacgaaaaggccgccgccatccaggcccagcttcgtgcgccgcagctggccgcgcccgcgctggtcgacgccgcctatggcaagagcgtggcctcgacggtccgtatcctgcgggaggtcaatgccgagctcgccaccctggagacggagttggcccccagttttgagaagcacccggacgccgagatttaccgcagtcttcccggacttggcatcgtcctcggcgcccgggttttgtcggaattcggcgacgaccgaacccgcttcacccatcctaaagcgcgaaagaactacgcgggcagctcaccgattacgaaggcgtccggcacgcgccgggtggtcctggctcgaatggcgcgcaatcggcggctcgccgatgcctgccatcaatgggccttttgtgccctgaggagctctgccggtgcgcacgactactaccgcgtgcttcgtcaacgaggcaagacgcaccatcaagcgcttcgagctctggctaatcgactcgtcgggatcctgcatggttgcctggatcaccggcagacttatcgcgaagaaatcgcctggccgaggtccttgacagctgccgcttgacttcttaccgacgtgggatgt

SEQ ID NO: 1292 - DNA, 1469 bp, unidentified
  source 1..1469: mol_type = unassigned DNA; note = element_1924743
  misc_feature 1..2: note = core
  misc_feature 3..235: note = LE
  misc_feature 236..1255: note = CDS
  misc_feature 1256..1469: note = RE
  misc_feature 17..181: note = bridgeRNA
cttgtatcttgcgaactgaggcgtgacgatagattacgtcttggcggagaggccgttcagacctaaggccagcgtgagttgagcctgtttcccagaatggcccccgcccctctctgtttacgccgtggagaatcggaggccgttgagcctgcatgttcaaggtcggcgcatagagtaagtccgtgagcgcggacaggggcggttgccaagactcatcgtaccctcaaggagcgccatgagcaagccgatccagtccattcaagcgatggtattttgcggcattgatgtgagtgccgcgagtctggccgtagccattcaactgcaagatcgacgattcgaagagcgtgtttttgataactcggccagcgggcacaaggccctgatccgctggttgcacaagcagaaagcgcgggcgcgagtatcgctggaggcgaccggcgtctattcgctggaccttgcgctggcgctggacggggccgatggtatcgaagtcgccgtgctgaatccgaaactgattcaccgctttgcgcagacgctgcgccgctcaaaaaccgactcggccgatgcgcaggtgctagctgaatacagcgctcggatgccctttgcgccgtggcgtgcgcctgggctgagcgggctcgaactgcgctccatcagccgtcatatccaggggttgacggtggaacacgcgcgcgcgaacaatcgccttcacgctgcggacaagtcaacgtcgacgccccgttgcgtggtgaccgacttgaaacgctcgatggcttcgctcaaactgcgcatcgcgcggctgcgcggcgaggcgctcgagttggttcggagcgatgaggcaatgcaggagcgcttcgagctgttgattggtatgccggggatcgccgaaatcagcgcgttgcagttgcttggggaactctctgcgttgtcgccggagatgagtgtgcggcagtgggtggcgcacagcggtctcgatccagcgcaccgggagtcgggaacctcggtgcacaagccgtcgcgcatcagtcgggccggcaaccggcatctgcggcgagcgctttacatgccggctctggtggcagtgcgatgggacctgcacttgaaagcgttctatgaaactctgctgagtcgccacaaggccaagttgcaggccttgatcgcggtggcacgaaagctgctgcacgccatctacggaattttcaaaagtcaaatgccgtatgacgggagaaagctcttcccgcagttgcagatcgcataagagctacaatcgcctcatccagtgaaacggaagcgggctctgctgggaagcaaccatgccgagggataactggatgggctcatcctgacgatgaaccaagggccgggcggggagatcctcgctcggccccaacatacatcggagggatagacccctcatgccttgaaaatccaaatctttccccaccgaaaatgcttgacgcggaagagagaat

SEQ ID NO: 1293 - DNA, 1578 bp, unidentified
  source 1..1578: mol_type = unassigned DNA; note = element_192a5fc
  misc_feature 1: note = core
  misc_feature 2..262: note = LE
  misc_feature 263..1393: note = CDS
  misc_feature 1394..1578: note = RE
  misc_feature 84..271: note = bridgeRNA
tcgggccttgggttctaacctgttgcgtagatttatgcagcggactgcctttctcccagcttatcaggccttgtattatccctccagtgcagagaaaatcggccagttttctctgcctgcagtccgcatgccgtatcgggccttgggttctaacctgttgcgtagatttatgcagcggactgcctttctcccaaagtgataaaccggacagtatcatggaccggttttcccggtaatccgtatttgcaaggttggtttcactatggaacatgaacttcattatatcggtatcgacaccgctaaagagaaactggatgtcgatgtgttgcgtcctgatggtcgtcatcgcaccaaaaaattcgctaacaccactaaagggcacgatgagctggtgagctggctgaaaggtcacaagattgaccatgcgcatatctgcatcgaagcgaccggcacctatatggaacctgtcgctgagtgcctttacgatgctggctacatagtgtcagtcattaatcctgcgctgggtaaagctttcgctcagagtgaaggactgcgtaacaagactgataccgtggatgcgcgcatgctggcagagttctgtcgtcagaagcgccctgcagcctgggaagcgcctcacccgcttgaacgcgcgttgcgtgccctggtagtccgccaccaggcgctgacagatatgcacacgcaggaactgaatcgggataccgtggatgcgcgcatgctggcagagttctgtcgtcagaagcgccctgcagcctgggaagcgcctcacccgcttgaacgcgcgttgcgtgccctggtagtccgccaccaggcgctgacagatatgcacacgcaggaactgaatcgcactgaaacggcgcgggaagtccagagaccgagcattgatgctcaccttctgtggcttgaagcagagctgaagcgtcttgagaagcagataaaagacctgacagacgatgatccggatatgaaacaccgcaggaaactgctggaaagcatcccgggtatcggagagaaaacatctgcggtattgctggcttatatcggtctgaaggaccgcttcgcccatgccagacagttcgccgcttttgcgggtctgacaccacggcgttatgaatcaggtagcagtgtgagaggggcgagccggatgagtaaggccggacatgtgtcgcttcgcagggcgttgtatatgcccgcaatggtagccaccagtaagactgagtggggacgggcgttccgcgaccgtctggcggctaatggcaagaaaggaaaggtgattctcggcgcgatgatgcgcaagctggcacaggtggcgtatggagtgctgaagtcaggcgtgccgttcgatgcgtcacggcataatccggtagcggcgtaaaaatcgcggaagggatgaaaaaaacagcgcctgacggcgctgtgtctggcatgcctgcaatccgggaaaccggaccaggaaaaaacttgcaggccataacagtatctacgtcgatgcgtcacggcataatccggtagcggcgtaaaaatcgcggaagggatgaaaaaaacagcgcctgacggcgc

SEQ ID NO: 1294 - DNA, 1981 bp, unidentified
  source 1..1981: mol_type = unassigned DNA; note = element_19446eb
  misc_feature 1..2: note = core
  misc_feature 3..266: note = LE
  misc_feature 267..1478: note = CDS
  misc_feature 1479..1981: note = RE
  misc_feature 20..255: note = bridgeRNA
ctcgtataatgaatttacggtgttttttgacaagagcaccgtatgaaaaacttgttatcctgtaatgggtatgggataatgagcgtaacagacagagggcgcagtaacgcctccttggagcgtggcttcgaacgaaagaattgtgcctctgtccttacggttagatgcgaatgagctggatagcgaccataacggatgcgctgtatatctaacgaggttgtattgccgtaagaatcagagggtagccctgtctgtgtatcttgtacatgggagggttctttttgttttactgcggaatcgacatcgccaagcgcaaccatgaagcatcagtcatcgatactgaaggaaagccgttgctggacagcatcacaatcaccaacacacaagagggttgtgagaaactattttccctgtttgagcggttgggtatcggcaaagaggctgtcgttgtcggcatggaagccacagggcattactggctgtcggtgtatgagcatctcacagaacaaggctacgatgttcgtgtcatcaatcccatccagtcggaagctttccgcaagatatacatacgacagaccaagaacgacagcaaggatagcttcatcatcgctcaagtgatgcgattcggccagtattcagaaacaacgctgtcggatgagaataccgtcgccatgcgccaacttatccgctttcggatggcactggtggacagctgcggcgattgtaaacggcggattatcgcgctgttagatcaggtgtttcccgagtatgccagtctgttttccgataccttcggcgttacctccaaggagttgttactacaatgtccaacgccggaggacatgcttgctgtctccacccgaaagctgaccaatctgctgaacaaggccagccacggacgatttggggaagaaagagcgaaagagattcgtaccgctgccgccggttcttttggcgttggttttgccaagaacgcctttgcgtttcagattaagcaacttgtcgagcagctcatgtttctggaaacgcagattgaagaactggacgagcagatttcccatctgctgaaacaggttaatcaggttattactaccattcccggcatcggggacacattgggagccattatcgttagcgagattggagacatcaaccgcttcgacgcacctaacaagctggtggcctttgccggattggatgtaaaggtcacgcaatccggtgagtttgaggggacaaaacaacatatttctaaacgtggctcgccttatcttcggcgggctatttggcttgccgccaaccgtgcggcgttctgcgatccaattctgtcagaatactaccaatcgcttaaagcaagagggaaacaccatctgaccgcagttggcgcggttgcccggaaaatgtgcaatatcatctttacgattctcaaagaaaaccggccgtatcaggtcacgccaccaaagaaggagactttactatgatatttagaaacgctgttcctgaggaagcagaaagcattacgcaacttacccttgattccaaaagatactggggatatcccgaggagtatataacaatctggactgacgaaatgacaattcgtccaagctatatcgagaaaaacatgattgtcgttgccgaagaaaactcagaactccttggatatgtttctattattgaagaacctcgtaaacatgttgtgaaaattggagattacaaattatccggtggtttctttcttgacaatctttttattcatccctcctatatcaggcaaggcattggagaaaagttaattgccatcgcctttgattggtgtaaggaaaggcgaatcaaacgtcttcatgttttctctgaccctaatgcgaaaggtttctatgagaaaatgggggctgtctgtttgggagagttgccatctaacaatgctgggcgcccacttccgtttttattttttgattttatctcttgactttttatagctggt

SEQ ID NO: 1295 - DNA, 1621 bp, unidentified
  source 1..1621: mol_type = unassigned DNA; note = element_19538f6
  misc_feature 1..3: note = core
  misc_feature 4..275: note = LE
  misc_feature 276..1601: note = CDS
  misc_feature 1602..1621: note = RE
  misc_feature 82..243: note = bridgeRNA
agcgccggacagataaaacctgtcaaaccaaaaagaaacttcctagctgagtgtacggcaaattttatatataattttgtagagaagagctttttgcagttatagccgaactgtgcaatggtgccttaagtgcccgtagaatagcgtggctttggaggaacggtcaaaccactgatggagccttttgggctacctcgattagaagaatgtataactcaaccgtcccaagcttaagcacttctcaactatggattattatataatggagattaaaaatggcaaaggtcaaaagtaaattagagataacgaatcctaatgcagcaggaatcgatgttggctcggctgtacattatgtatgtgtacccgaaggaagcgatgaacaacgtatacaaaaatttagctgctttacggaagatctctacaacatagcaaaatggttgaaaaaatgtaaagttaatacagtagccatggagtcaacaggagtgtactggattcctttgtttcaagtacttgaatcacacggatttgaagtaaaactggtaaacgcaaaacatgttaaaaatgtacctgggagaaaatcagatgtgcaagattgtcaatggattcaacaactacacagttacgggttactccaagggtcatttaggccagatgatcaaatgtgtgtattgcgtagttatgttcggcaacgtaaaaatttaattgaaaatgcttctacacatactttgcgtatgcaaaaagcgctaacacaaatgaatattcaactacatagagttataagcgatacaactggtgtaactggaatgcaaattattaaagcaataatagatggtgagagtaatcctgaaaaattggctgaactaagagatggacgaataaaaagtgataaatctgttattgcaaaagcattagcaggaaactatagaaaagaacacctatttacattaaagcaagaatttgagctatataatatttatcaggaaaaagtagcagaatgtgacaggagcattgaagaatattataaaacatttgagacaaagtctgatgagagtaaaaagttaggtgaagagaaaaataagcatagaaaaagtaaaccaaactttgctttgcatgaagaattatatcgagtaactggtatagattttaccaaaattcctggattggatatactaactgtacaaactatcatttcggaagttggtgttaactataataaatggcgatcagaaaagcattttacttcgtggttggggctaagccctgctaataaaattacaggggaaaaagtgtttagcacaagaacacgtaaagtcattaatcgtgccgcgaatgcatttcgaatggctgctcactgtgtatcaagaagcaatagcggaataggtgcatattgtagaaggttaaaaaaaagactaggtgcaccaaaagcgattactgctacggcaagaaaattagcatgtatcttttatagtatgttgaagtatggacaagaatatgtagaaagaggtatggactattatgaaacacgttacaaagagagggttgtaaaaaatttaatcaaaaaggcacaggaattcggttatatcttagttcaacaggaataactaatgggaagtttcttaga

SEQ ID NO: 1296 - DNA, 1500 bp, unidentified
  source 1..1500: mol_type = unassigned DNA; note = element_195b9b4
  misc_feature 1..2: note = core
  misc_feature 3..256: note = LE
  misc_feature 257..1480: note = CDS
  misc_feature 1481..1500: note = RE
  misc_feature 19..233: note = bridgeRNA
ctaatcagttcagggagtggtgccatccggcacactcctggtgggtggccgaccggtaggtgagcactttctggtcccggacttcgaagccctggtgaaagaccgtgcccctgtcggtaggccgggagagttgatcgctgctgggatgtcgtgcccgaccccgttgcgggggcgtgagcactgcttgattaggtcgctgatagttctctcgccggctgctcgacggtgatcgacatcgagacatcgaggaggaccgatgcgactgttcgtcggagacgactgggccgaagaccatcacgacgtggaggtgatggacacctccgggcgccggctggtcaaagcccgcctgcccgagggtgtagccgggatgacacggctgcactcgatcatcggcgatctggtcggcgaggacgccgacgacaccgaggtgctgatcgggatcgaaaccgaccggggcccctgggtcggcgcgctggtcgcggccggttacacagtgctggcggtgaatccgttgcaggcggcacgatttcgtgaccgactcggtgtgtcgggagccaagagcgatgccggtgacgcgcatgtactggccgacatggtccgtacccactcccacgagctgcggccggtggcgggggattccgctcgcgccgaggcgatcaaggtcgtcgcgcggatgcacaagacgatgatctgggagcggacccgccacacccagcgactgcggcacgccctgcgcgactacttccccgccgcgctcgtcgcgttcgaggatctcgacgccgccgacaccctggaactgttggccaaggcgccgaccccggcgcaggcggcccggctgaccaccacgcagataggtgccgcactcaaaggtgcccgccgccgcaacgtcgcggacaaagccgccacgatcgcagccgcgttgcgctgcgagcatctcggccaacccgaggtggtcaccgacgcctacgcggcgacggtgcgggcgttggtcgcggtcctgaccgtgctcaattcccagatcaagaccctcggtggccaggtagatgcccattttgggcagcacccggccgctgagatcatcttgtcccagccggggctgggacaagcactcggcgcccgggtgctcgcagagttcggtgacgaccacgaccgctatgccagcgccaaagcacgcaagaactacgccgggacctcgccgatcacccgcgcgtccgggaggaagaaggtcgccgtggcccggttcgtccacaacgaccggcttctcgatgccctgacctcgcaggcgttcagtgctttgtcgagatcgccgggtgcccgcgcctattacgacaagcaacgagcccgcggggtgggccacaacccggcgttgcgtcagctcgccaacagattggtcggcattctccacggctgcctcaagaccggcaccccctacgacgaggccacggcgtggccgcgacccgtcgagaaggtcactgcttgacatctaacctcctgggatgt

SEQ ID NO: 1297 - DNA, 1159 bp, unidentified
  source 1..1159: mol_type = unassigned DNA; note = element_195edf7
  misc_feature 1..2: note = core
  misc_feature 3..187: note = LE
  misc_feature 188..1147: note = CDS
  misc_feature 1148..1159: note = RE
  misc_feature 28..189: note = bridgeRNA
cttctgtatctgctctctggtaaacttgccccgtcacggaccccggccagggtcagtgacggggtggttcgcgacgtctgacccttgtggcatgaccacgcttcttagcctgtcggcaccgcctctcttcatcgtctcgaacagttgattgcggccttgcaggaccgcgcaccagcaggaagagagcatggacaacctatcacatggccgcgttatcggcatagaggtcagccgcgactggctggacattcattgcctccccgatgggcatcgcctcagagtgccaaacgctccggcaggtcatgctgccgtagcggatcttgcccgggaccgagatgccgtcgtctgcttcgagtcgactggcggccaagaatggcagctctgggcgcttttggaggcggagggtgttgcggcccgccaagtgccacccgcacaggtaaaggcgtttgcgcaaagccgcggcacgcgcgctaagaccgaccggatcgacgcggaactcatcgcccgcttcttcgtattccggcccgaagcaggccgcggccttcccgcagaaaagctacgccttctcagagctttgacatcgaagcgaccccagttggtcgaaatgcgcaaacggcttctggcccaaatccgcgcacaccagaaactgggaaccgctgtgatgttcgaggacgtcgacagcgaactgaagcaacggatcgacggtatcatcgaggaactggaagaccggatcacccgagccatcgccagcgacgatcacctgtcagagttggctgtcgtcctccgatctattcctgggatcggccctgttgccagctcgatgctgatcgcagaaatgcccgagatcggcaccatcaacggcgaagaggccgcagcactcactggattggcaccggttgcacacgacagcggaactcttcgtgggaagcgcgccatcgctggtgggcgccgtgccctgcggcacgtgatgttccaggcggccttagtctcggcacatcacaacccaagcctgagatccttcgcggatcgcctccgcagggccggaaaaccgcacaaagttatcatcaccgcagtcgccagaaagctggtcaccatcgcgaacgcgctatgcaaaagccgtcagaaatgggtcgccacggctctctgacagatacagttg

SEQ ID NO: 1298 - DNA, 1451 bp, unidentified
  source 1..1451: mol_type = unassigned DNA; note = element_1964f65
  misc_feature 1: note = core
  misc_feature 2..230: note = LE
  misc_feature 231..1448: note = CDS
  misc_feature 1449..1451: note = RE
  misc_feature 9..234: note = bridgeRNA
cgttaccttcttcccgtcccaggtatcctgggatgccaaccaggcccggcatgactccctgccccagtcgtccatgatccggggggtgttgtcaccgggccgggtcggcagctagtgatcgctgatagaggctcggtccgaggattcctcagagatcgttcgtaacgtggatgccgagactagctgtcgttggcggctgatcattctgttcaaaagaagaaggagaacaaatgacggatgtccaagatcacgactcgatccaggtgttcattggggtcgacgtgggcaagggtgcgcatcatgccgttgcactgactcgcaccggcaaacgtgtgttcgacagcacgttgcccaatgacgaagctcgtctcagagccctgattgcaggactcaggaaacacggcccagcgctgttggttgttgatcaacctgccaccatcggcgccctgcctatcgcagtggcgcgcgatgagggcatcgccgtggcctatctgccgggattggcgatgcgacgcatcgctgatctgcatgctggagaggcgaaaaccgatgcgcgcgacgcggccatcatcgccgacgccgctcggtgcatgcctcacaccctacgctcgctcaagcttgcggacgagcaagtggctgagctcacgatgctttgcggcttcgatgatgatttagtcgcgcagatgacccagaccagcaatcgcttgcgcggattgctgacgcagatccaccccgccttggagcgcgtcctcggaccacgaatagatcatccagccgtgctggacctactcgagcgctatccatcccccgagcgcctcgcggccctcactgagaggcaactggccaagcgtctgctcaaactggcgccacgcatgggcaacagcttggcggccgagatcgtccaagcgctcagcgaacagacggtggtcgtgcagggaacgaaggcggtggccgtcgttctgccgtcgctggcgcggcaactgctcactctacggcgccagcgtgacggcgtggctgaagaagtcgagcgcttggttcaagcgcaccctctcttcgcggtcctgatgagcatgcccggagtcggcgtcaggaccgcagctcgactcctcaccgaagtcacctgccgcgcttttgcctccgcggcccatctggccgcttacgctggccttgcgcccgtgactcgccgctcaggttcatccatccgtggcgaatgtccttcacgacgaggcaacaaagtcctcaaacggaccttgttcctgtctgccttcgccgcgctacacgacccggtctcgcgcgcctactacgatcgcaagatccaacagggaaagcgacacaaccaagccctcatcgccctggcgcgccgccgctgcgacgtcctgttcgccatgctgcgtgatggtgccttttactgtcccccaaccggctctccggtgttgacaacgacatagagg

SEQ ID NO: 1299 - DNA, 1429 bp, unidentified
  source 1..1429: mol_type = unassigned DNA; note = element_1968b26
  misc_feature 1: note = core
  misc_feature 2..219: note = LE
  misc_feature 220..1416: note = CDS
  misc_feature 1417..1429: note = RE
  misc_feature 13..240: note = bridgeRNA
ctactaggagacttccggcagggtcggggtctggccagactcggatctaggtgatcggcgggacgctcttttatcggctgcccaccgacggtgtggctctcatctggactgcgcctcgtcggtcaccgtgacgaggagtggctccagaggggtctgcccagctcgtagtagcaatgcccacctcgtcgtcctgctggttcccagttgcgaggtgagcagatgagcaagacgcaggcagtgatcatcggggtcgatccccacaagttgtcggtgacgatcgaggtcgtcgacacccacgagcagctgctcggcacgggtcgcttcgccaccgaccgagccggttacgcagcgctgcagcacttcgtgaagcagtggcccgaccgcgtttgggcggtcgaaggtgccaacggtgccggtcgtcccttggcgctgcggctcgtggcggccggtgagcgcgtggtcgatgtgccggccaagctcgcggcccgggtgcggctcttcgacaccggtcacaaccgcaagaccgatgccctggacgcccactcgatcgcggtcgtcgcggtccgcaccgaaggtctgcggatggtggtcgaggacggtgagctcgaagcattgcggatgctcaccgaccgccgcgacgagctcgcccaccagcgggtgcagacggtcaaccggctgcaacgactgctcagcgagctcctgcctggccagcgcaaacgtgacctgtccgccacccaggccaaggcgatgctcgcgaccgtgcgcccgcgtgacatcgccggcaagacccgccggcggatagccgcggaggagatcgccgacctggtcgcggtcgacgccaagctcaagcggatcaagggcgagctgaaggccgcggtcacagctcgcgggtcgggtccgatggacatctacggcgtcggaccggcaggtgccgcccgggtgttggctgacgtcggtgacgtggcccggttcgccgaccgcaaccggtttgcgtcctggaccgggaccgcgcccctggacgcctcgtccggtgagcagacccggcaccgcttgtcgcgggcgggaaaccggcggctgaaccacgtcctgcacgttgcggcgatcgtgcagatccgtcacgacaccgagggccgggcctactaccgccgcaagctcgccgccgggaagacaccgatggaagcactgcggtgcctgaaacgacggctgtccgacgtcgtctaccgccagctcatcgccgacgcccaccagcatcatggagcggatccgggagggcactacggggcgacacttcaatccagcgcggccgactcacacccgctcatcgacacttcggatcagccacttcccggacccgcgcacccgacgctacgcccagaccacgaccccgtgaagaacctcgttccaagcatccgttgacacagaggggtgc

SEQ ID NO: 1300 - DNA, 1342 bp, unidentified
  source 1..1342: mol_type = unassigned DNA; note = element_196a83c
  misc_feature 1..3: note = core
  misc_feature 4..78: note = LE
  misc_feature 79..1098: note = CDS
  misc_feature 1099..1342: note = RE
  misc_feature 1087..1329: note = bridgeRNA
tgatgatgtggacgccgctgccaccgcagtgcctagaatggtactgcaagtgagtgcagcaaaaaaggagcgtaccaaatgcacatcaaaacaatcggccttgatctggcgaaaagcttctttcaggctcacggcatcgacaaagcgggcgatgcggttctggtcaagaagcttcaccgcaagcagatgatccccttcttctcgaaattaccgccctgtctgatcggtgtggaggcgtgtgccacagcacatcattgggcgcgcacgttgagtgcgatgggacatgacgttcggatcatgccaccttcatacgtcaaagggtacgtgaagcgtggaaaaagcgatgcgattgatgccgaggcaatctgtgagtcagtggggcggcccacgatgcggtttgtccctatgaagacggtcgaacagcaaagcattctgatgggacatagaacccgggcgctgatcgtgcgccagagaaccatggctgcgaatgcgctgcgggcacacttggcggagtttgggctggtcgcaaatcccggcatcgcaaatcttgtgaaggtggctgataaagcttttgcagatgcaacactgccaccttacgcccacagagcccttgaaatcctgatccggcgcatggctgagttgaccgacgagatctgtgtactcgcccaagaactgaaggcctggcacgccagcaacgaagcaagccgaagacttgcagctatccctggtatcggcgtgatcacagcaaccgccatcgccgccaccgtgactgaccccgatcagttcagctcgggaaggcaatttgcggcttggctcgggctgaccccaaaacagcactcaacaggcggcaaaacccgtttgggcggcatctcgaaacaaggcgatcgatatctgcgaagattgcttgttgtaggggcgaccgcagtgatgcggcacgcgaagcgcaatccgacacccatgacagactgggtcaataatttgctggagaaaaagcccttccggcttgtatctgtggctcttgcaaacaaactggcgcgcatcgcatgggcggtactcacccgaggagaaacctatagaccttttgggcttgccgcctaattgcgcagcccgatccgaattggcaaaggcagtcaatgatgcgtaacgatcgagccaacggcgagacaaacccgtctgattcaccgcgcctcacaagcgcgccaggttgattagggacctctccagcggatttccatcagggccagcagatcgtttcaagctgcacaaacaggccggacatatgaaagcaaccgatcaccgcaacaggacaaaatcaacccttgtcaaaggcggcgtccacata

SEQ ID NO: 1301 - DNA, 1472 bp, unidentified
  source 1..1472: mol_type = unassigned DNA; note = element_1970a98
  misc_feature 1: note = core
  misc_feature 2..239: note = LE
  misc_feature 240..1457: note = CDS
  misc_feature 1458..1472: note = RE
  misc_feature 26..243: note = bridgeRNA
ccccacgttactttcttcgtgacccgcttggcggccatgctgggcggtgacggcctgccgggcccggcatgattgttgccccctgtcctcgatgatctggggggtgttgtcaccgggcctggttggcggtgtgtgatcgctgataggggccagaccgagcatcccgctcgaggccgtccgtaacgtggatgtcgaggcgcactgtcgcagctgccgtctctagtgaatgggaggacagtgtggtcaccagcatcgacaggtacgacgaggtcgacgtgttcgttggtctcgacgtcggcaagggcgagcaccacgcggtcgcgctcgaccggaccgggaagcggctgttcgacaaggcgctccccaacgatgagcgccgcctgcgcgcggtcctggaccggctcaccgggcacggcgtcgtactgttggtcgtagaccagcccgcaacgatcggggcgctgccggtcgcggtcgcacaagccgcgggagcgctggtcgggtatctgccgggactggcgatgcgacgcatcgcggacctgcaccccggtgaggcgaagaccgacgccagggacgcggcgatcatcgccgagactgcccgcacgatgccgcataccctccggtcgatccaggtcgccgacgagcaggtcgcggagctgagcatgctctgcggcttcgacgatgacctcgcggggcaggtcacccaggtttccaaccggatcaggggattgctcacgcagatccaccccgcgctggagcgggtgctcggcccccggttggaccaccccgcgatcctcgacctgctacagcgctacccgtcaccggcggcgatgcgcgcggcgggcgagaagcggctcgggaacaggctgatcaagaacgcaccccgcaaaggccgcgtctgggctgccgagatcatcgccgcgctcgacgagcagaccgtcgtcgtgaccggcaccgacgccgcagcgctcgtcctcccgcggctcgcggagcagctcgccgcactccgccggcaacgcgacgagatcctcgtcgaagtcgagaagatcgtcgatcagcaccctcttcagccggtcctgacgagcatgcccggagtcggcgtcaggaccaccgcccggctcctcaccgaagtcaccacacgcaccttccccacgcccgggcacctcgccgcctacgccggcctcgctcccgtcacccgccgctcgggcacctcgatccgcggcgagcacccctcccgacgcgggaacaagatcctcaaacgcgccatgttcctctccgcattcgcggccctccacgaccccaaatcacgcgcctactacgaccgcaaagtcgcccaaggcaagaagcacaatcaagccctcatcgccctcgcccgacgacgctccgacgtcctctacgccatgctccgcgacggcaccctctaccagccgactacaggcgaacctgccctcgcggcttgacaaagaacatagggg

SEQ ID NO: 1302 - DNA, 1553 bp, unidentified
  source 1..1553: mol_type = unassigned DNA; note = element_1972316
  misc_feature 1..2: note = core
  misc_feature 3..163: note = LE
  misc_feature 164..1429: note = CDS
  misc_feature 1430..1553: note = RE
cttgtatgatgttttcagaagctaaaacatcactttttcctttcttttgttgatgtgacattacaatacattcagatgctgtggactttagatattttgcctgtagtccaactacttgaaggagtgtattgccacggttttatctgaattgtttataagcaggatgttgccgggagatcatctccccagtacttatttcaatcaagtctatgaggataaacgcctgtggattgtcacagcatccaatacactcggaaaggaaggttttatgatttacgctggcattgatattgccaaactcaaccatttcgcctctgcgatctcctcagatggtgaagtagcacttaagccgtttaaattcacaaacgactatgatggcttctctaagctgaaatccagtctcgattctttcgatcctgatcagctcatcataggtcttgagtcaacggcccactatggcaacaaccttgttgaattccttgttaacaacaactacaaggtttgtgtcattaaccctatccagacatcgaccttacgaaagaacaacatacgcaagaccaagactgataaggttgataccttagtcattgctaaggctttgatgatgaatcctacccgtttctttacgaagtacgacattactctgcttcatctcaaagaactgggacggttcaggctcaagcaaatcaagaagcgtacgcaggctaaaatccagctgacttcttatgtagatcaggcttttcctgaactccaatactactttaatggaattcatcataagagctgctatgcgcttctcaaggaagctcctactgccgccaaggttgcgtccatgcatatgactcatctatcgcatcttattgaagttgcttcccacggccatttcaataaaaaaacagcgaaggaattaagagttctcgcacagacatctgtcggcattgatgacagctctgttgctctccagataactcagaccattgagcttattgagcttctggacaagcaggttaaaactgtggaatccgatatggagtctcttgtaaaatccttggattccgttattatgaccattccaggcattggatatatcaatggaggaatgattctgggagagattggggatatatcccgtttctcgaacccttcaaaagtactagcatttgccggtcttgatcctgctgtttatcagtcaggattctttgaagccagaagcacaaagatgtctaagcgaggatccaaagcccttcgcttcgctctggtaaatgctgctcacaacgttgttaagaataataagacttttaaggattactatgctcagaagagatctgagggcaagtctcattacaatgccttagggcactgtgcaggcaagcttgttcgcattatctacaagatgctcactgacaacgttgcttttaatctagactgacataaccgtttgacatagattttcaaaatcctcatttaatgaggattattaaagttacccttttttacggtcatatcacaaacgaaaatatttgctaatctacacttgacttttcatagcaggt

SEQ ID NO: 1303 - DNA, 1154 bp, unidentified
  source 1..1154: mol_type = unassigned DNA; note = element_1978234
  misc_feature 1..2: note = core
  misc_feature 3..203: note = LE
  misc_feature 204..1142: note = CDS
  misc_feature 1143..1154: note = RE
  misc_feature 37..209: note = bridgeRNA
cttgtcttgtgacttttcgagctgattgggagatattggcaccgccgccgggagtgaccgctcccggacggcggcgagggtcggatcgtcatgatgcaggaggttttacgctccgagctagagtttgatcgccctcgtctttcccatcggcctgaacggatacaggggctttaaggcccgcatgacaagcagaggcaggaaagatgactgacattaccatcggcgttgacgtttcgaaagacacgctcgacatttgcattcaccctgacggagatcatcgtcagttcccgaacgaccccaagggcttcaaggcgatcctgcgatggttcggtggcaggtccatcactcgcctcgtctttgaggcgaccggcccttatcaccgcgccttcgagcgcgccatgggcacagccggtctgccgctgtgcaaggtcaacccgcttcaagccaagcgcttcggcgaggccctcggccaactcgccaagactgaccggatggacgcggccatgctggcccgctttggtgcattgatcgagccggaggtgcgcgctgcgccttccattatcatcagcgaactcaaggatctccacgttgcgcggacggccctggtcaaggaccggacagccgccaggaaccgcgagaaaaacctgacatcctctctgctcaaacgccagacccggcagcggcttgcttccattgaaggtcacttgaagcagatcgaaagcgccatcatggccctgatccacagcgatgctgacctacgccggaagttctcgatcctgatctcgatcccgggcatcgccaaacgctccgcgttcgcactcctgatcgacatgcccgaactcggcacgcttgagccgcaacaagctgccgccttgtccggaactgcccccatgacacgtcagtcaggcaagcggatgggtaaggccttggtctccggcggcagggtgaatgtccgccaggccctctacatgccagcactcgtcgccaccaggcacaatcccgacttgaaggtcaaatacaccgagctcaccgcacgcggtaaaccgcccaaagtcgccatcacggccgtcatgcgaaagctgatagtcttggcaaacgccctcatccgcgacgaccgggaatggacacaaagactggcttgaccaagacggata

SEQ ID NO: 1304 - DNA, 1284 bp, unidentified
  source 1..1284: mol_type = unassigned DNA; note = element_197e3f0
  misc_feature 1..3: note = core
  misc_feature 4..265: note = LE
  misc_feature 266..1270: note = CDS
  misc_feature 1271..1284: note = RE
  misc_feature 64..225: note = bridgeRNA
catggtatgttgaaggtgtaagaattgaaagaagagtttaaaataaggatggagcctatgttgagaggaaaagggaaggacagattaacttctacgtcattggtccttagagaccgttcaggatgttttacactgtccttccccttcctgaacctgaaccggaacattgggcttttaagcccgtatttctgccatgataggttacaggaagtcctctcacttgtcaatggctccacacaaaatcttttaaaaggaggaggtgcctatgagaaacctttacaccttctatgttggcgttgatgttgctaagagcttttatgtagttgccatcttatcaattgaaggaaatgaagaaaagcttaggagctttagagtagaagcaaatcctcgtgcctttgagaaaagactgatttctatcattggctcctgcaaaaggactgacctgttgatcattatggaaagcacaggcccctatcatgtggggcttgcggaatatctctcaaggcaagggtatcatgttgtagtagctaatccctttgctgttaagcgttttattgaggctaacatgtccaaagcaaagaccgataagattgatgcagagtttctggcaaagtttggtatgcatgtgtctgaccataaactttatgagttaaggagcgaagaagagaagaaggtagagcggtatataaaactgatcgaagatctgaaggagaagttagtagctcttgagaatcagagagaggcagcgaggatcattttaggtaaggaggataaggacattttagggagctatgacaggatcataaaggagctgaagaaggagattgaggctaaggagagggagctaaaggagtatttaaagaggaattttgcgagggagtataggttattgttgagtatacctgggataagggagaaggcgataggagtgatattgggggtgatgaggggatttagagggtttaagagtgtgaaggaggttgtgagttatgcggggatatgtccgagggtggttgagagtgggagcagtgtgaggcagcgagggaggatgaataggaggggtaatagattggtgaggagagtattttttatgtgtgcgttgtctgcggttagggcgaacaggtattgtagggagttgtatgagaggttgttgagcaggggaaaatcgaagaaggcggcattggtagcggtagcggctaagcttttgaggcaggcatttggtgtgttaaagagcgggatgccctttaatgctgagcttgctaccccttgacaatcgacacagaa

SEQ ID NO: 1305 - DNA, 1484 bp, unidentified
  source 1..1484: mol_type = unassigned DNA; note = element_1990dee
  misc_feature 1..4: note = core
  misc_feature 5..268: note = LE
  misc_feature 269..1468: note = CDS
  misc_feature 1469..1484: note = RE
  misc_feature 46..234: note = bridgeRNA
ccccgttacctttttagtaggccccgcgttgaggaagacttggggttgctggcctgtcgggtcccggcatgattagtgcccccagtcatcaatgatccggggggtgatgtcaccgggacccgagaggcgtcaggggatcgctaatagggaccggaccagcggcagttttcatcgcggcaggtcagccgtaacgtggatgccgactcgtgtcgctgtaggacaggccagcgctgttcgcgcaatattcgctgctacgggaggttgttggatgatcaaggattacaaatcggtggaggtcttcatcggggtcgatgtcggcaaaagcaatcatcacgcggtagcgctcgacaagaccggtaagaaactcttggacaaggcgctgccgcaagacgaggccaagctgcgagagatcatcgactctctggccggtcacggcacgctgctgctggtcgtggaccagcccgcgaccatcggcgccctgccagtcgccgtggcccaagccgccggcgtcatggtcggttacctgcccggcctggccatgcgccgcatcgcggacttgcaccccggagaggccaagaccgatgctcgggatgcggcgatcatcgccgaagcggcgcgcaccatgccgcacactctgcgctcgatcgacatcgccgacgagcaagccgccgaactgtccatgctctgcgggttcgatgacgacctcacccagcagtccaccgcgacaagcaaccggatccgcggcctgctcacccagatccacccgtctttggaacgggtcatcggtgcgcatctggaccacccggcgatggccgagctgctggccaaatacccgacgccggacacactgaagaaagccggcaccaaacgggtggaagccctgctgaagaagtatgcgccgcgggcaggggctcggtgggcggcggagatcttcaccgccctcggcgagcagaccgtggtggtctcgggtaccgccggagctgccgtggtgctcccgcagctggccgccatgctggccaatctgcgaacgggccgtgtcgaggtcctggcccgagtcgaggccctcgtggaggcccaccctcttcacgtcgtcctgagttcgattccggcggtcgggatcaggacggaagcacgcatcatcaccgaagtcatcggcaaggaattcgtctccgctggacacctcgcttcctacgcaggcctggcccctgtgacttggcggtccgggacctcgatccgtggtgaccatccatcccgcaaaggcaacaaggccctgaaacgggccttgttcctctccgcgttcgcggctctcaaacacccggtctcccgggcctattacgaccgcaaacgcgccgaggggaaacgccacaatcaagcgttgatcgccctcgcccgtcgccgctgcgacatgatcttcgccatgctccgcgacggcaccctctacgacgaaaaagtcacgaaagcggcttgacaaaaacatagggaca

SEQ ID NO: 1306 - DNA, 1336 bp, unidentified
  source 1..1336: mol_type = unassigned DNA; note = element_1991336
  misc_feature 1..2: note = core
  misc_feature 3..77: note = LE
  misc_feature 78..1094: note = CDS
  misc_feature 1095..1336: note = RE
  misc_feature 1073..1323: note = bridgeRNA
tgttggggtggacggcccaaaggcatcgaatgtgccaacatggggtcgaacaaccaacccaatgaaagggccgcccagtggaattcaaacgcatatcgatcgacacgtccaagcatgtttttacgatccacggggtcgacggccaggagcgcccggcattgcgacgcgagatcaggcgcgctcagctcgaaccgttctttgctaaactggcaccaacggaagtggttctcgaagcttgtgccggatcgcaccattgggggcgggtgctatgcggtatgggccaccgggtgaggttaatcccgccacaatatgtgaaaccgttcgtcaagcggagcaagaatgaccgcaacgacgccgaggcaatcagtgaggcggcgtcacgtccgaccatgcgcacagttccggtcaaatcggctgatgagcaggccgcgacgatcattttgaagcatcgggagctcatggtgaaccaacgaacccaggcaatcaacgcgttgcgagggcacgcggcggaatttggcgtcgttgccgccaagggctgcgcaagcgtcacatcactgcttgccgttttgtctgccgaggaagcgattccggcagtcgcaaaggcgatgttcgagcaaatgggtcagcatatcgccgatcttgacctaaaaatcgatgtgttggaaagacaacttctcgaacagaacaaggccaacgcggtcagcaaactgcttgccgcgattcccggcgtcgggccaatcaccgcgatcaccatggcgctgaccgtgaacccagcgagcttcgagaccgggcggcattttgcagcctggattgggctgacaccaagagaacattccactggcggcaagcatcgcttgggaaggataagtaaggcaggcagcgagaggttgcggcagttgcttgtagttggggcgatggctgtaattcgatacgccaaacccggcagcaagtcggcgacagcctggcttttacaattgctggagcgtcgtccgaggaaggtcgcggcggtcgctctggccaacaagatggcccggatcatctgggccatgatggcgcggggtgaagcgtatcggcgtcagtcggtagcggcctgatccgcgcgtccatgccgaggggttaagggcagagcaagagatgatgatcggtcgaaccgacgaatgacaaaatccgaccagttccagggcgttctatgccgttgccgtgattggatgtcgttcgcggaacccatctgggccggcggccatgttgccgcgtatgcaggccgaacgcatgaccgctttcgtaccgccatcaaatcttgcaacttgtcacttgaccccaacgggccgtccacgca

SEQ ID NO: 1307 - DNA, 1523 bp, unidentified
  source 1..1523: mol_type = unassigned DNA; note = element_1999177
  misc_feature 1..2: note = core
  misc_feature 3..124: note = LE
  misc_feature 125..1228: note = CDS
  misc_feature 1229..1523: note = RE
  misc_feature 1246..1494: note = bridgeRNA
agacggtatgacgtagctgcggcatcgaggtcgtggttgcgggccggggccttcctgacacagattcgtgggttaaccgggtaggagcggcctgctcgggtaccacatgtgtaggagggccccggtgttcacggagcgtacaagtatcgggatggacgtgcacgcacgatcggtgcgggcggcagcgctggacacggttaccggggaggtgatcgaggctacggtcgggccggcggtccccctggtagtggactgggtccggcagctggtcgaggccgggcacggtccggtcgcggtgacctacgaggccggcccgacggggtacgggctggcgcgggcgctggcctcggccgggatccggtgcgaggtggccgcgccgtccaaactgatccggcccagcggggacaaggtcaagacggacaaacgcgatgcgctgctgctggcccggctgctgcggatggaggagatcatcagcgtgcgggtccccacactgaccgaggaggccgcacgcgacctggtgcgggcgcgggccgacgttcggggggacctgatgagcgcccggcaccgcctgggcaagctgctgctgcgccacgggcacgtgtacaacggtggggaggcgtggacgggcaagcacgacgcctggctgcgtcagctgcgcttcgacctggccggcacggccgcggcgttcgacctgtactacgcccggaccaccgacctggtcacggcgcgtaagaggttggacggacagatcgcggtcctggccgccgacagcgagttcacccccgtgacccgtcggctggcctgcctgcgtgggatctcaacactgaccgcgttctccctggccgtcgagctcggtgactggcaccgattcaccggatcgacgatcgccgcctacctgggactggtgccctccgagcactcctccgggcagtccaagaaccggggagcgatcaccaaggccggcaacccccacgcgcgccgcctgctgatcgaggccgcctggcaccacaaggcccagtacaagcccggcaagacgatgcaggaccggtgggcactggcccctgccgccgcggccgaacgcggtgacgccggcaaccgtcggctgcacagacgctggcaggccctgaccgagcacaagaagaagcacaccgtggccaacaccgcgatcgcccgcgagctagccggctggtgctggtccctggccgtgctggagaccaccacgacctgaccccccaagacccgttctcgccgtccgccccacacgcatgcagcgcgaggaacgactcccgattcgactgtgagcaaccgccacaagcggccacgctcgacctcagacgcggagacccgttccggccggagagccgtcctgcggtaaccaacccgcccatatcagactgacacgcgtcgacgaacacgccgcagcaaagggacaaggaccccccgagaacgagacgaggcgccgccgagcaagctagcccggcggcgcctcaccctgcccacttgacacggcacccctacatatc

SEQ ID NO: 1308 - DNA, 1326 bp, unidentified
  source 1..1326: mol_type = unassigned DNA; note = element_19a3446
  misc_feature 1..2: note = core
  misc_feature 3..250: note = LE
  misc_feature 251..1285: note = CDS
  misc_feature 1286..1326: note = RE
  misc_feature 32..194: note = bridgeRNA
cttgtatgattaattttaagacctattagcaagtaaatccgataagctttaacagttcattgggaggccgtcccagcctgaggactgggaataaaccagagcctgtgcgtagattggcccccgccctattcacccatgccgtggagtatccgaggcttagagcctgcatacacaaggatggtaggtgcatgcgcagggtcgggaaccgatggctagtttactttctctataactaattaacaattgaatcatgactaatagccaactcattgaaatgacaagtgaaccaaccaccaagttatttgctggcattgatgttggggctgatgagctggttctggtgatccggaaaaacggcaaacccttagatcctcaaaagtacggcaacacccgtgcggaacatgcgcgaatggcaaaaaaattgggcaagatggctggcatcaagatgtgcatggaagcgactggcgtttatcattttgatttggccgttgccttgcatgatgcgggtataaaggtcatggtcatcaaccccaaggtatcgcataactttgcgaaggtgttgatgaaaaacagcaagacggatgaggtggatgcagctatcttggccatgtatgccgagcgcatgggctttgtgcccgggacgcgcccatccaacgacaagattgctttgcgttgtttctcccgtcgtatcaatgccttaactggtcagaaagcagcagccaagaaccatttgcatgccttagttgccacgggagaaacacccaaagccgtgctgcgggatgccaagctggccatcagccaattggagaagcggattgatgccttggctgcccatgccctggcattaatcagcaaacatcctgagcttgccagggttttggtgttgccggtcggcattaaaggtattgccaacaccagcgccattgccttgatgggcgagctgttgctgttgccgccagggctttcccatcggcaatgggtaaagtttgcagggcttgactccaaggcatttgagtcaggcaagagtgtccacaagaaggcacggctatccaaagcgggcaaccggtatctccgatcagccctgtatatgcccgccttgagtgccaagcaacatgacacgcacatcaatgcttatttccagcacctgctggagggcggcaagacacccttgcaggctgtctgtgctgtcatgcgcaaattgcttcacgccatccatggtatgctcaaacatgacaagccattcgacaacacccgtttctatgcgattacagctatcgccgaatagcttaatttttagctttattaatttgactttgaacagagtat

SEQ ID NO: 1309 - DNA, 1382 bp, unidentified
  source 1..1382: mol_type = unassigned DNA; note = element_19ace54
  misc_feature 1..2: note = core
  misc_feature 3..85: note = LE
  misc_feature 86..1114: note = CDS
  misc_feature 1115..1382: note = RE
  misc_feature 1088..1369: note = bridgeRNA
tgatggaatggatgccccctaccgacggcatcgcgatgtgtcaaagtgacgttcgccaaaacgtcacctagaggagagagcatccatgaaggaagttagcattgtcggcctggaccttgcaaagcgggtgtttcaagttcatgccgcaggaagcgatggtagcgttgtcctgcgcagaaaactgtcacgcagtcatgtccttgcgttctttacagaattgccgaagtgcatcgttgcgatggaggcgtgcgccaccgcccattattgggcacgagagattggcaagcttggtcatgacgtgcgcttgatcccgccggcttacgtgaagcccttcgtcaagcggcaaaagaatgatgctgccgacgccgaagctatcgttgaagccgctactcgcccgtccatgcggttcgtagcatccaagacagaaagccagcaggcctgttcgatgatcttccggacgcgggatctgttctttcgtcagcgaacgcagcttatcaacgctttgcgcgcccatcttgccgagcatggggttatcgcgccacagggaactgctaacttgcctttgctcacgcagatcatcgaggaagaccgctccggcctcgaacttattgtcgtggaaaccgctcggctttatcttgagcagattgaggcgctctcttctcgaatcattggcttggaaaaggcgctcaagtcggaggcaaaacgctctgagaacacggctcgattgatgtccatgccaggaatgggaccaatcaccgccatggcgattgaggctttcgccccaaccatgacgacattccgcaagagccgagacttcgcggcctggctaggtctggtaccgagacagcattcgagcggaggaaagcaggtacttggacgaacatcgaagatgggtcagcgcgacatccgacggcttttgatcatcggcgcaatgaccgtgatccgatgggcatgccggaaggctcctccggagaactcatggcttgcacggatgttggcgcgtaagccccgcatgctcgttgcaattgctcttgcgaacaaaatggcgcgaacgatctgggccatgatgacgaagaacgaaatttacaggaattctagcccagccgcggcctagcaaaacgctgcgctgttgccaggcggaatcgtcggcgtgtgaggaggtcaacgaacggtaaggacaaagatcggtgagagtgagcctggaaatgcatccggagcaatgagctaagagctcgcagtattgatttgcaccaggttcgcgtaaatccataccggccagcggccaagatcaggtcgcgacgaaaggcctgatacatgaccgcacccgatcacacgaccaaatcgctcgataaaagccttgcatgaacgggggcatccataca

SEQ ID NO: 1310 - DNA, 1317 bp, unidentified
  source 1..1317: mol_type = unassigned DNA; note = element_19bf819
  misc_feature 1..4: note = core
  misc_feature 5..65: note = LE
  misc_feature 66..1103: note = CDS
  misc_feature 1104..1317: note = RE
  misc_feature 1078..1302: note = bridgeRNA
agataattggactccccaaccctaagtcctacaatagtagggttcaaaataatttggagattcaaatgaacaagacgattgttggcgttgatttagctaaaaaagtgatccaagtttgtatttatacaaacagaaaagtgcactcaaatacagagatgacaccgaaggcgtttacttgttggttagtaaattcaaggcctgccacaatcgtgtttgaagcttgtggtacttcgaattattggaagcaactcgcttcttctcatgggcatgatgctcgtttaatctcatcgagattagttgctgtggtcagacaaaatcagaaaactgacaaaaatgatgctttggcgatagtacaagcatcactgttacctgatgtgaactttattcaaggtaaaacagccgaacagcagcaactacaatcgattgtccgcttacgagaactaagcataagacaaaaaaccgcttctaaaaaccaattgattgctttgttatctgaattaaatattcaagtctccaacagaaatggggggttaagagcaacaattgatgaaaccctagaagacccagataatggtttttcaccttcgtttcgtcaggcaatatctactgcctgggatcaatatttatcgctggttgaagcgattgatatttacgacaactgccttgaagaatctttgaattatcatcctgaatgtaagaagttacttaaaattgagggcatcggtatccttgatgctgttaacttatatatcgcgctcgggtgtgctgacattggagcttttagtaaagggaaagcagccgcagcctgcatagggctcacaccaatacaacattcaagtggggggagagctaaaatcggttcgataggaagaggttttaaaaatactctgtttcgaagccaattgattactggtgcgatgtcgatcgtaagcaaggttgccaatcgcccaccgaaaacaaaaaaagaagagtggctaaaaaatttaattgaacgtagaggtaagaagtgtgctgcggtagcgttggcaaataaaaatgtcagaacagcatttgctattttaactcaaggtacggaatataaagctgaaccgttagtatcttagtaaattgtcttaacagtaaaatgcataaattggatgaaaatcagttagtcaaagcagcgggcatctgagagtcttgaactcgtagcttagatttgctactaactcgcgtaaatatcgtagagcctgagttagctactcttgttgagctcgtacataagtgcgcatttatttctgatttactgacgattactgttgacaatggggagtccacata

SEQ ID NO: 1311 - DNA, 1382 bp, unidentified
  source 1..1382: mol_type = unassigned DNA; note = element_19c0264
  misc_feature 1..3: note = core
  misc_feature 4..87: note = LE
  misc_feature 88..1110: note = CDS
  misc_feature 1111..1382: note = RE
  misc_feature 1124..1369: note = bridgeRNA
tgatgaggtggatggcccctgtgtccaacgacggtgagtcgtattgtgggctgttgtcgaagcaacccgaacaaaggaccatccaccatgaagattaccacgatcggccttgatctggccaagtccgtttttcagcttcacgctgtcgatgcgaatggcactcttgtctggcgcaagaaagttcgtcgagcagcgttgctcgatacgttgtcaaagattcctccttgcctggtcgggatggaggcttgcgctacggcccatcactgggcgcgagagatttcggtgctgggccacgaagtacggctcatgccaccggcctacgtgaaggcctatctgcggcgtcagaagaacgacgctgccgatgccgaagcgatctgcgaagcggtacggcgtccgaccatgcgtttcgtgcccgcaaaaagcgcggagcgacaggctgtacttgtcctgcatcgatcgcgggagcttctcgtccgccagcgtaccatgctgatcaatgccattcgcgcacattgcgccgagtttggcctgatagcggtgcagggcgctagcggcacgcgtgaccttatcgaccgggttgggcaggccgatgggtcgatccttccggaagtggcacgcggtgtagtcatgctcctggcacaacagctcgatgctctggtcgcgcagatccaggcgctcaaccggcgcttgctgtcctggcatcgtcagagcgaggaaagcaagcgattggcgaccattcccggcgtcggcgtgatcagcgccacggcacttgcggcatcggtcacagatccggcccagttccgatcgggccgggagtttgccgcctcgctggggctggtgccacgtcagaactcgtcaggcggcaaagacaagctgggccgtatctcgaagatgggggatcgttacctcaggaaacttctcgttgtcggagcgacatctgtcgtgcggcgggcgagaaccagcgacgctcccgctgcgaactgggtccgcagcttgctcgagcgcaagcctgcccggctcgtcactgtcgccatggccaacaagaccgctcggatcgtctgggcgataatggcgcgtggggaaacgtatcgagctccagctgaggcttgagaacaatcgcggcgcacaaggtgacccgcgtcgaactgtgagggtgctgctttgaattgatgatgacgatctgaacgcggccgcatgggccgggacaacccgaggtgctgtcggagcttcgtgctcgctagactgagagggacccggcccgcggacaccatcagggccagcggtcatctcacgccgcgcagacaggccggacagatgaccgcacccgacagatcatcatatcaactcaaattaccccttgcagcgcaggggccatccacaga

SEQ ID NO: 1312 - DNA, 1182 bp, unidentified
  source 1..1182: mol_type = unassigned DNA; note = element_19c0492
  misc_feature 1..2: note = core
  misc_feature 3..228: note = LE
  misc_feature 229..1167: note = CDS
  misc_feature 1168..1182: note = RE
  misc_feature 20..192: note = bridgeRNA
cttgtatcttcatttttaagtatacatatgatcgtacacacgaatagaacggggcagatcgtttgaacctaggtcgtagagaccgagtcaaagcagggatcgtcccgttctgtctcccaaaaagctcgaacagttgcttgggttattgaagcccgtatgaatttgcaaggtagagctgcgtgggaaggaaattaaagtcaaggaggattggatttggaagtaagttctatgtttgttggtatcgatgtctcgaaagcaaccctcgacatcgctatacgaccgtcgggggaacgggaatcggtttcgaataacgaatcgggtattaaggcgttgatcacacgattggcagaagtccaccctgctttgatcgtgctcgaagctacaggtggagtcgagcatcagctgacgcgtgctctggtcagtgctgaacttcccgtggtggtggttaacccccgtcaagttagagactttgccaaagccactggtcagttggccaaaactgacgctatcgatgctatggtcctggcccgcttcgccgaagctgtgcgtccggctgtgcgccccttgcccgatgagaccctgctcgagctgcgagcactgattgtccgtagacggcaactcactgagatgatcgtcgccgaaaaaaaccgcctcggtacagtatctaagaccgtcacaaagcgtatcgctgctcacatccgctggttgcaagccgaacttgggcgtgccgacaaggacctcgatcaaagcattcgtcgaagcccaatctggcaagaaaaccaagacttgctccgaagcgtccccgcaatcggtcctgtggttagccgtaccttgttggccgagctccccgaactcgggcaactcaaccgtaaacagattgccgcactggccggggtcgctccgctcaaccgtgacagcggtaccctcagaggccgtcgcgtaatctggggtggcagggccactgttcgtgcaacactctacatggccgccttggttgccagtagacgtaaccctgtcatcgcagctttctacaaacggctgcgcgccgcaggcaaaacgcccaaactcgccttggtcgcttgcatgcgtaaactgctgacgattcttaactcgatgatcaaacatagaactcgctggtccgaaaatactcctcttcagaccacttgatttcgaagacagttg

SEQ ID NO: 1313 - DNA, 1568 bp, unidentified
  source 1..1568: mol_type = unassigned DNA; note = element_19c11ae
  misc_feature 1..4: note = core
  misc_feature 5..298: note = LE
  misc_feature 299..1558: note = CDS
  misc_feature 1559..1568: note = RE
ctcactggtccaccatcctcaggtcggcgttctccggtagggcgctgatgcaccctgggtgccaccaggccactgccctgctcgcttgacgcgaacgacgtccacgatgagatccgcagggtctggtggttgcccgggacgtgtggaccgtcgatagggctgagcgccaacgccgtgactggctgcgagcgccgatcagtgagcgaaccggcagacacgtcccggcaccaaggtcacccgaaccatcaactgaagatgagggtgcctccccactgggactagcagcgaggaggctgacatgaagtctgccagcaacaccgcgaacagcacgctgcccgagtacgcccctaacgatgtcaccgccgggaacgactgggcccgcgatgaccatgccgcgtgcatcgtcgacggccgtggccgcaaggtcgcaaccacggtggtcgaacacaccagcagcggcttgcgcgacctggtggcggtcctgggccgtcacggagtcggtgaggtcgctatcgaacgccccgacggccccgtcgtcgaaaccctgctcgcagcggggatcaccgttgtggtgatctccccgaaccaagtcaagaacctgcgcggccgctacggctcgaccggcaacaaggacgacaggttcgacgcctacgtcctggccgacaccctgcgcaccgaccgagcccgcttgcggcccctggtccccgacaccgagacgaccgtcgcgttgcgccggacctgccgcgcccgcaaagacctcgtggcccaccgtgtcgcggtcgcgaaccagctccgggcgcacctgcgcaacgtcctgccgtgcgtggtcggcctgttcgccacgatcgactccccgatcgccctgaccttcctggccaggttcgacacccaggacaagatcgaccggctcaccgtcaaacgcctggccgactggctggccaaacagggctactccggcaaggtcgaccccgcgatcctgcaccaacacatcctcgacgcgccacgcggcgccaccggcgcccatggcaccagccagaccccgatcaccgccggctacgtcgcactgctgcgcaccctgctggcccagatcaggcaactcggcacccagatcgacgcccaactcggcgcccacgccgacgcgcacatcttcaccagcctgcccaggtccggccggatccgagccgcgcgcctgctcgccgagatcggcgactgccgagcgaagttccccacgccagaatcgctgacctgcctggccggcgccgccccatcgacccgccagtccggccgcctgcgcaccgtcgggttccgttgggcctgcgacaaacaactgcgcgacgccgtagtcgacttcgccggcgactcccgccgagccaacccctgggccgccgacctctacgaccgcgccagagcccgcggacacaaccacgcccacgccgtccgcatcctcgcccgagcctggctccacgtcatctggcactgctggcaagacagcattgcctacaaccccgaagcccaccacacactccaacgcgtcctcacccagaaccgggcggcttgacatagggctt

SEQ ID NO: 1314 - DNA, 1233 bp, unidentified
  source 1..1233: mol_type = unassigned DNA; note = element_19ca83a
  misc_feature 1..2: note = core
  misc_feature 3..216: note = LE
  misc_feature 217..1197: note = CDS
  misc_feature 1198..1233: note = RE
  misc_feature 12..190: note = bridgeRNA
cttgtatcttgttctttgtagtgattagctatcactacacgtaaattgtagagtttggtttgtcattaaaacttcgagtttcctgaaaagattaaacctacaatttacacctaaccactgacataaatctggacggtaactaagcactttgatgctgcattcacaagaaaagactgtggtttttaatattaattcaatcaataattaggtgaagctatgttttatcttggcattgatgtttctaaagctaaattcgattgttgtttatttcttgatgattctattggaaaaataaaaactaaatgcttttccaatagcaataaaggatttcatcaattgttatcatggttaaatcgttttggtcttgttgctgaagaaactagagccttaatggaagcaacatccgtctatcatgaaatgttagctcaatttttatttgatttaaaatttcaagtttgtgtggctaacccagcccgtactcgatattttgctcaaagtatctctaagcttcataaaactgacaaaatcgatagtgaagtattggcgcgatttgcaatgactgtagatttacatttatggcaacccactcctgataatatccgattgctcaatgctttattagatagaaggtcaagtcttgcgaatgacttaaaacgtgaacaaaatcgtttggaaaaagtaaactccactctaataattgtaccaattttaaagtctattaagaccaatattaaatcattaactaggcaaattcagaatctagatacacaaattcaaaaccatattgatcaagaccatgagcttaaacgtgatcaaaaacttcttgaaagcattccagcaattgctgagcgtaccagtttattaatgcttgtttttttacgtgctcattcttttgaaaaagcaagccaagctgctgcatttgtgggtttagttcccattcatagacaatctggtagttctgtgcttggaaaaagtcgcttatctaaagctggttcacctaaaattcgatcgggtttatatatggctgccattgttgcaactcggtacaatcctcatattaaagagttgagcgaacggctcttagcgaaagggaaaactaaaatggtagcgattgctgctgctatgcgaaagttaattcatctttgctatggtgttcttaaaaaccaacaaccttatcaggcaaattataaggcatgaatccttaaataatttgcttgacagttaagacggtat

SEQ ID NO: 1315 - DNA, 1157 bp, unidentified
  source 1..1157: mol_type = unassigned DNA; note = element_19d25d6
  misc_feature 1..2: note = core
  misc_feature 3..212: note = LE
  misc_feature 213..1145: note = CDS
  misc_feature 1146..1157: note = RE
  misc_feature 13..215: note = bridgeRNA
cttgtcttatgacttcccccggctcccgaggcaaaagggagccactgcccgccacgccatttatggcgggcagtggcgggggtcggatcgggagaagctgggccgcctttggcgccgtgccgtagtgggatcgcccccgtcttcatcttctgtcctgaacggatacccgggttcgcggcccggatgacaagacgaggaagtggataaagacaatgcaggataccatcggcatcgacatctcgaaacccgttctggacgccttccgactggcgaccggcgaacaccggcagttcccgaacgacaagccaggctgcaaggcgctgatgcgctggatcggccgggagcccgcgcgggtcgtgttcgaaccaaccggcccctatcaccgggttctggagcagtcgctgaccagggccgggatcgccatcgtcaaggtgaacccgcgttacgcccgccgcttcgccgaggcgaccggcgaactggccaagaccgaccggatcgacgcggcgctcctggcgcggatggcggtggttctggatctgcaggcgcgtcctgcgcgcgcggaaatccatcacgatctcagagagttgagcgtggcgcgccaggcgctgatcaaggatcggatcgccgcgcgcaatcgcgagcaggtggcgcagaacgccctcgtccgccgccagatcaaggcccgcctcggtcagatcgaaaaacagatcggcgagatcgagacggcgatggcggccatcgtcgacgcagacgagacactccagcgccgtcgggaaatcctcgccagcattcccggcatcggcccgatcacggcaatggcgctcatcgtcgagatgccggagctcggcgagatggatggcaaacaggcggcaagcctggcgggtctggcgcccatgacgcgcgagtccggcgggtggaaagggcgctcgcgcatccagggcggtcgcgcctcgctgcggtgcggcctctacatgccggcgctcgtcgccttgcgcatcaatccggacctgcggcgcaagtaccaggccctcaaggaagccggaaaaccttcgaaggtcgcgatcgcagccatcatgcgcaagctcatcgtgctggccaacgcgctcatccgcgacaaccgaaaatggagccccaatgccacttgatcgacacggata

SEQ ID NO: 1316 - DNA, 1565 bp, unidentified
  source 1..1565: mol_type = unassigned DNA; note = element_19d3a00
  misc_feature 1..4: note = core
  misc_feature 5..343: note = LE
  misc_feature 344..1555: note = CDS
  misc_feature 1556..1565: note = RE
ctcactggcctaccctccgttccctggatgcgttggatgggccacgacgcagggtggtcaacccttgctgagcggcactgatgcgacgtgaacagggtcttggcttgaccgaaggagttgcacaggcagaacgttctgcccgacttccgtgcccccggggtgactgcctgtagcgctggccatgcgatggcccgtatgagacccgcggccctcggggtgccggaagacccagacgggctacagggtgtagcgccaaggtgtaccgccaggagcgccgatcagtaagcgacccgcgtgggcttccgacacggcaagtcataccgcaaaagcaaggagactgtctatgggtactttcttcgccgggctggattgggccagccagtcgcacgcggtgtgcatcatcgatgcacagggcagcgtgcgcgaacgcctggaggtggcgcacaacgctgccggcctggccgagttgctgcgtcgcttgaagcattggcactgtccgccggtggccatcgagcgtccgtcgggcctggtcgttgacaccttggtggaggccggcatcgtggtggtgccgatccaccccaacgctgtcaaggccacgcgcccacgctaccgcagccacggcgccaagagcgatgccagcgatgcgtatttgctggccgacctgctgcgcaccgatggccatcggttcaagccactgagcccgcagggcgatgagatccgcgccttgcgtacgctggtacgcgggcgtgacgacctggtggccacgcgggtgcaattggccaaccagctgcgcagcctgctggagtctttctggccaggcgctggcgtcgtcttcaccgacgttgattcgcccatcgcgctggccttcatcgagcgctaccctaccgcggagagcgccgcccgcctggggcccaagcgcatggcggccttctgcgcccagcacgcctactgcggtcggcgttcgcccgaggaattgctgcagcggttgcacgaggcgccagcgcctgtctgcggagaattggagatggatgcaaagggtgaattggtgcgctgcctggtgcgcacactgatgcgcctggtcgagcagatccgcctgctgtccgctcgcatcgaacaccacgtggctgccagcgacgacggccgcatcctgatgagcgtcccacgcgccgggcgcatttgtgccgcacagatcctggccgagttgggcagcgtgcgtgaacgctttgacaccgatgcgcagttggccgccgaggccggcgtcgcccccgtcacctacgcctcgggcaaatccaaggccgtggcgttccggtgggcctgcaaccaccgcttgcgcgcggccctgacctgcctggccgataactcgcgccatgccaacgcctgggccgccgaggtctatgccaaggcgcgcgcccgtggatgtgaccatccgcatgccgtgcgcatcctgtgccgcgcctgggtacgcgtcatctggcgcgcgtgggtcgagcgcaagccctacgatcccgctcatcacggcgccatgcaaaacatgctcagaacggtcgggggttgacacagggtgt

SEQ ID NO: 1317 - DNA, 1602 bp, unidentified
  source 1..1602: mol_type = unassigned DNA; note = element_19d4c27
  misc_feature 1..3: note = core
  misc_feature 4..268: note = LE
  misc_feature 269..1486: note = CDS
  misc_feature 1487..1602: note = RE
  misc_feature 10..288: note = bridgeRNA
actacaatgtatttggtcgatgtccccggcatccagtcagggaatcctccatctcgttgcttaagctgttagaatgaggatgcaatcggtctggcctccgcctccaaggactctcgtccgtagaaaagtcagccaaccggctcctcattcgcagcgttcgttttacgcaggttgaaccgcgtgttcgtgtgacatacccagtagattgaatcggcaatgagagaagccggtctcgaccggtgcaataccgtacaaaggggattgtctcatgaatgcagttggtatcgatgtttccaagggaagaagcactgtcacgatccgtcaacccggagatgtagtcgttcttccaccgcgggatttccgtcacacgcaatcatccatcaatgacctcattgccgcgatcaaggaactggacggtgagacgaaggtctgcatggagcataccggcagatactatgaaccggtggcctcctggctttcgtctgccggcatctttgtcagtgcggtcaacccttgcctcatcaaggacttcggcgacgaatcgctccgtgctccgaagacggacaaggccgatgcgaagaagatcgcacgttttgcccttgaccgctggacgaaactgcggcagtatagtcgtatggacgaattacgcaaccaactgaaaaccatgaaccggcaattcggcttctacatggatcagaagaccgccatgaagaacaacctcattgcgcttcttgaccagacctttccgggagccaacgacttcttcgacagccctgcccgcagcgacggcagccagaaatgggtggattttgtctacacctactggcatgtggactgtgttcgaggcaagtctcttgacgccttcacggagcattaccggaactggtgcaagcggaaggagtataacttcagcgcggagaaagccgagacgatctaccatgctgcttctgacctcatcgccgtgtttcccaaggacgacaataccaagctgctgatccggcaggccgttgccatgctgaatactgcatccgagacggttgagacgcttcgagctaagatgaaccagacggcatccctgcttccggaataccctgtcgtcatggagatgaacggcgtcggtcctacgctcggtccccaactcatcgctgagatcggcgacgtaacccgtttcgagcataggggttctcttacggcttatgccggcgtagatcctcgcccgaatgaatccggcgattacaaacgtcaaagcaatcccacaaccaagaagggttctccttatctgcggaagacactctttcagatcatggacgggctgattaagcgttctcctgtggatgatccggtttatgcctttatggacaaaaaacgcgcagagggtaagccctaccatgtctacatgaccgccggggcaaacaagtttcttcgcatttactacggtcgtgtaaacgcttttctttctccctccgtggagaccgaagaactgtaatctctgcaattcattcctcaggccagcgttctgcggtggccttctttttgtgcctttatttcaatctgctgcgttcttcaacttctttcattttttgcttgactttttatttgcag

SEQ ID NO: 1318 - DNA, 1355 bp, unidentified
  source 1..1355: mol_type = unassigned DNA; note = element_19ecd44
  misc_feature 1..3: note = core
  misc_feature 4..246: note = LE
  misc_feature 247..1107: note = CDS
  misc_feature 1108..1355: note = RE
  misc_feature 3..220: note = bridgeRNA
cttatattatatttaacgcagttagctactgccaaagcccaagtggtatacttggaataagccactgtggattagttcatttcctccaatcgcttgacgatttccgaaagggtctaaccacagctttttgtttcaattggtaatgagtttgataacgcatagacgttttatctcgtctaaggtaacaaggcaaaaagttcgtggataaccaagtagacttgaaatactatatctggaggtactcccatgctttatgtgggcattgatgtcgctaaaaataaacacgatgttacagccttgaatgttccaggaaaaactgttcttaaaccactcactttttcaaataataaagctggttttgaactcttagatctgtcttttcgacagctcaaccaagactgtctcatcgctcttaaacttctttctgaccccaatcgtgaacaatttcaacacgataatcggcaagtagaactaaaaatactggctagacatattcatcgtctcaagagaaaacagtctgattggaaagtacaatacactcgttgtcttgatatcatctttcctgagttggataaaatcgttggaaagcattcagaatatacctaccaactcttgacatgctaccctaatcctcagaaaaggcttgaggcaggatttgataagctgatagaaattaagcgattgaccgcttctaaaattcaggatatcctctcagtcgcacctcattctatcggaacaacatctcctgctcgtgaattcgaaatcatcaaacattacaagaggctcattgacaaggcggaaacatgtgtcaatgacttgatggctgagttcaactcgatcatcacgacggttactgggattgggaatcgtttaggggcggtcattttagccgagattcgaaatattcatgcctttgataatcttgctcaattacaagctttcgctggactggattcttctatttatcagtcaggtcagattgatttagctggaagaatgatcaaacggggttcccctcatctgcggtgggcactcatacaagctgccaaagcatgcgctcgcttttcacctgcttttaaggcctatcttaagactaagttagaataaggaaaacattacaatgtagccatcatccaccttgcaaaaaaacttatccgaaccctgttttatatcctaaaaaagagctgccatttgacgaacaaaaagtgatgtaatttctgaaatcaacacaggattacctttgaaaaaatggactttttcaagggctttttgccgtgctctaaaatcatcgccaaatcatcaaattgaaataagaaatagtttagataaaactattgacttttcttatagtttgt

SEQ ID NO: 1319 - DNA, 1418 bp, unidentified
  source 1..1418: mol_type = unassigned DNA; note = element_19f0ffe
  misc_feature 1..3: note = core
  misc_feature 4..201: note = LE
  misc_feature 202..1404: note = CDS
  misc_feature 1405..1418: note = RE
  misc_feature 1..192: note = bridgeRNA
ctccgtaagttgtttggtggcccgggagggccgggtgtggctgaacgttctctgcctgcagtggctcgcaaggagtggccgcccagctctccggggcgccctggtcgctgattgaaatctgcggatcggtcgctatttacggagatgacgacggggtgttcctcgggccgccggaaaggcgaacggttcgaggagaagcacgtgaccaagcaacgggcccgcatctgggtgggcatcgacgtaggcaaggcccaccactgggcagctgcagtagacgagaccggttcgaccttatggtcgaagaagatcgacaacgacgaggcggcgatcctcaccgcgctcggcgagatcctcgacctggccgccgaggtcggctgggccgtggacatcaccggcacatcctccgcgctgctgctggccctgctcgcggcccacggtcagcaggccgtttacgtgcccggccgcacggtcaaccgcatgtccggcgcctaccgcggcgaagccaagaccgacgctcgcgacgcgtacgtcatcgctgaagcagctcgccaccgccgggacttcgcccctatcgacgtgcccgccgaactggccgccggtctcgctctgctgacctcccaccgttccgatctgatggccgatcgggtgcggatgctcaaccgcctcaaggacgtgctcaccggcatgttcccagccctggaacgggcctttgactactcggcgcacaagggcgccgtggtgctgctgaccggctaccagacccccgccgcgattcgccgtcgcggccgagctcggctcacggcttggctggccaaccgcaacgtgcgtggtgccgacgcagtcgcagccgccgcgctcgaagccgctcaggctcagcagaccgcactgcccaacgagaccgtcgcggcccagatcatcgcagacctggccgcgcagatcctggctatggaagatcgcctcaagtgcatcgaccagcagattcgagagaccttccgcagccacccccaggccgacatcattgagtccctgccgggcatggggcccatcctgggcgccgagttcatcgtagctgcgggcgccatgtcggcctacgcagatgccggccacctggcctcggcagcgggactcgtacccgtccctcgcgactccggacgacgcactgggaacctgcatcgacccaaacgctacaaccgccgactgcgcagagtcttctacctgtccgcgcaggtgagcatcatgcgcgagggccccaaccgggacttctacctcaagaaacgcagcgagggcctcaaacacgtccaggccgtcatcgcggtggcccgacggaggatcgacgtcctgtgggcactgcttcgggacaaccggctgttcacgccaactcctccggccccgcaagcagcttgactcggtcattgaaa

SEQ ID NO: 1320 - DNA, 1358 bp, unidentified
  source 1..1358: mol_type = unassigned DNA; note = element_19f34f6
  misc_feature 1..3: note = core
  misc_feature 4..80: note = LE
  misc_feature 81..1103: note = CDS
  misc_feature 1104..1358: note = RE
  misc_feature 1082..1345: note = bridgeRNA
tgatggggtggatggccccctcgcggcatctgagtgccaaactgctgtctgatcgaatcagcagcgaatgggagccatccatgggcgaggttactacgatcggattggacttggcgaagcatgtttttcaggtgcacggggtcgatggagagggagcgacggttctgcgcaagcagcttcggcgtgcgcaggttctggcgttcttcagtcgactgcggccctgtcttgttggcctggaggcgtgcgcgacggcgcactactgggggcgggagctgcgcgcgcttggccacgaggtgcgattgatgccggcgcaatacgtgaaggcgtacatcaagcgcaacaagcacgatgccgccgatgcggaagcaatctgcgaggcggttgtgcggccgacgatgcgctttgtgcgggtcaagacggctgaccagcaagccgctgtgctgctgcaccgtggccgggagcggctggtgcgccagcgtacgggtctggtgaacgctttgcgcgggcatctggccgagttcggcgtgatcgcgccgcacggcttgcgcaatgtcgtcaagctgatcgccattgtccgcgaccaggccgacgcgcggctgccggatttggcgcgccaagtgctgcaggtgctggccgcacagattgagcggctggaggcggcggttgcggcgatcgaaaagcaactcatggcctggcataagagcaacccggtcagccagcgcctggcgagcgttccgggcattggccctatcatcgccacagccatcgccgccacggtggtagaaccgagcggtttccgcagtgggcgcgagttcgcggcctggctgggtctggtgccacggcagaattccaccggcggcaaacatcgcctgggcggaatatccaagcgcggcaaccaatatttgcgccggcttctgatcaacggcgccagcgctaatttgctgcgatcgaaggcgaccaatgccgatccgtgggtgatcgggttgcgtcgacggcggccgccgctggtcgtcgccgtggcgctagccaacaagaccgcgcgcatcgcctgggcggtgatgcaccggcatgagaattaccagcgcgtggtcgcggctgcttaggtcgctgagccacgtactggagcttgcgagagagcaatgacgcgtgatggcacagtcggtcgatccgacgcaaccgagagaagcctgccgtttcactgggacatcgatcccgctcgagtgatgaggcctcggttcgcggactccatcagggccagcagtccatccggactgcgtgaacaggccggacacatgactgcaagcgacttctgtgtggcacgcgaagttatctcttgccaggcgggggccatccacaca

SEQ ID NO: 1321 - DNA, 1411 bp, unidentified
  source 1..1411: mol_type = unassigned DNA; note = element_19f4962
  misc_feature 1..2: note = core
  misc_feature 3..131: note = LE
  misc_feature 132..1157: note = CDS
  misc_feature 1158..1411: note = RE
  misc_feature 1170..1373: note = bridgeRNA
acatggggtaatcgcgggagcgagtcgccccgaagctgtcccgataatggaaggtggcggctgttccccgataagatgaagtacgggctcacgactggacgtccgggcccagcatcgaacggagaacaaccatggaagaatatatcggtctcgacatttctttgaaggagacggcgatttctgtgcggcgtgacggcaagcggatctggcgtggcaaatgcccctccgatccaagcctggtcgcagaggttgtccgcaaacgagcgccagcagccaagcgagtggtattcgagaccggtcctttgtcggtgtggttctatcacgccttaagcgctgaagagcttccggcgatctgcatcgacgcccggcacgccaaggccgcactcgacatggcaccgaacaaaacagacgccaacgatgcggatggcttggctcatctggctgaggccggcttctaccgcgaggtgcgggtgaagggctataacagcatgctggtccgtacgctggtggccgcacggaccaagctggtcaggatcacgaccgagctatccaaccagatccgcgggctcatgaagacgttcgggctggtcattcctcaaagcaagggcggcaagttcgacgatgctgtccggcgcctgcttgccggtcaggaagagcttgcccggatcatcctgccggttctggaagcctggcgcagcgtgcgcatccgtgccgccgagcttgggcggcgacttgtcgctagcgcgcgccagagcgaggcctgtcagctgctgatgtcgatcccaggggttggcgcgatcaccgcaacttctttcacgaccgccatcgaggatccagcgaacttcaagaagtcacgctcggtcggtgcctggttaggtctgacgacccgccgttatcaatccggcgagattgattatgacggccacatctcccgacgtggcgacgctcacctgagaggattgctctatgaagccgcgaccgtgatcctgacgcgcacccgcgccgatagcgatctgcgcgcctggggactgaagctgagagagaagatcggcttcaagcgcgccgctgtcgccgttgcgcgcaagctggccgtcatcatgcatgcgatgctgaagtccggtgaactgttcagccgggtgatcagcgccacggcctgatctcgaaagaactcgaatgcgcctgtcctgaagcgcgccgaggcgtccctgccgggacgtggaaagaaccattccgcagagggtgttgcaccttcgagccgccgtgctcgtcgcgtgcgttccaaaccttggaaggttcacccgcgaagccccatcatgcggcgactacatgccgacagcgaagacgacactgctcccggcaacgacagcttcgacgtccaaaaagggcttgcattttatcgcgcgattagacg

SEQ ID NO: 1322 - DNA, 1514 bp, unidentified
  source 1..1514: mol_type = unassigned DNA; note = element_19fb58f
  misc_feature 1..4: note = core
  misc_feature 5..269: note = LE
  misc_feature 270..1493: note = CDS
  misc_feature 1494..1514: note = RE
  misc_feature 32..257: note = bridgeRNA
ctaatgggaattgatcggcgagccttcaaccgggagtgatcggtgggggtgaggctgatcaaccgagccgccggccggtgagcacttctgttccctggagtgttgtccgattcctagggttagatcgtgccccggccggtcggtgaggctgcctgtagcgctgatggggtgtcgtgccgggttgagcactgatccattaggtcgccgccgggtcgccttgggctcgaacacattccacgctctgatcggcacgaggaaggggtgatccattgatcttcgtcggcgatgactgggccgaagatcaccacgacgtccacatcatgaacgcagacggcgaacggctggcctcccgccgcctgcccgaggggctagcaggcatccgcaccttccacgacctggtcgctgcccatgtgaccaatccgggcgaggtcgtgatcggcatcgaaaccgaccgcggtctatgggtcgacgcgctggtcaccagcgactaccaggtatatgcgatcaaccccctggccgcggcccgctaccgcgaccgccaccacgtctccggggcgaaatccgatgccggagacgcgaaactgctggccgatctggtccgcaccgaccggcacaaccaccgcccgatcgccggtgacagccccgaagccgaggcgatcaaggtcctcgcccgcggccaccagaacctgatctgggcccgcaaccgccacaccaacgccctgcggtcggcactgcgcgagtactaccccgctgccctggacgctttcgatgacctggcctgccgcgatgccctggctgtgctagggcgagcacccagcccggccgaaggcgcccgcctcagcctctcggcgatcggggcaacactcaaacgtgctggacgccaacgcaatatcgaacaacgcgctgcgcagatccaggtcgcgctacgtgccgaacacctgcacgcgaccgacgcggtcaccaccgcgttcgcggccaccactcgcgccgcggccggcatcatctccgagatcaacacccagatcagcgagctcgagaccgtgctcgcgacgcattttgacaaacacccggacaccggtatctaccgttccctgccaggacttggtgtcatcctcggcgcccgggtgctcggtgagttcggagacgacccgaaccgatacaccaccgccaagtctcgcaaaaactacgccggaacctcaccattgaccgtcgcgtcgggccgaaaacgcgccgtactcgctcgacacgtccgcaatcgccgcctctacgacgccatcgacgcctgggccttctgcgccctgcagaacagccccggcgcccgcacctactacgaccagcaccgcgccgccggagacctacaccaccaagccctacgcgccctgggcaaccgcctcatcggcatcctccacggatgcctccgccaccacaccccctacaacgaacaaaccgcctgggcacaccgacaaaccaaccaaaacaccacagccgcttgacaacctacggtcctgggatgt

SEQ ID NO: 1323 - DNA, 1436 bp, unidentified
  source 1..1436: mol_type = unassigned DNA; note = element_19fc1ec
  misc_feature 1: note = core
  misc_feature 2..150: note = LE
  misc_feature 151..1170: note = CDS
  misc_feature 1171..1436: note = RE
  misc_feature 1197..1433: note = bridgeRNA
gaatgtaatggacgcctcccacctacgataacgatggggaggcagcgatgtgggggatagttggatggggtggatcctccgaggcagcggcatcaaagtgccctatagtgaaggttctgaagtcccactataaccagcggaggatccatcgtgaatgctactactaaagcggttttcggggtagatgttgccaagcttgtttttcagatccacaccgtcgtgcaggcaactggtgaggtcatcagcaagcagatcaagcgtgccgcgttcctggaatattttgcgaaccttgcgccctgcctgatcggcatggaagcgtgtggcggatcgcagcattgggcgcggcggctcaaggagatgggccacgaggtcaagctcatggctggcaagcaggtgaaggcgtttgtcagcgggaacaagaacgatgtcgctgatgcccgtgcaatttggctggcagttcagcaaagcgcgatccggcccgtggcgatcaaaaccgaagcccagcaagcagtgctggccatgcacagaatgcgtcagcagctggtgaagttccgtacggcacaaagcaataatttgcgcggtttgatgggcgagtatggcgaagtcatgaaggtcggttttaaagcactcaacgaagcgatgccaggtgttctggcgcgcctgggagatcgacttccggcgccgttgatcgatacctggcgcgagcagtgggcgatgatttcgacgctcgatgcacagatacagcaaatcgaacggcgtcttcaggaatggatgagactcgatccggcgagcaaggcaatcgaggcaattccgggtgttggcctgcttactgccactgcggcggtggctacgatgggcgacccaaaagcgttccagtcagggcgtgaattcgcggcctggcttgggctggttccagcgcagactggaaccggcggtcgggtgaggctactggggatcagcaagcgtggcgacacctatctgcgcacgttgctgatccacggcgccagggcggtgctgcttcactcgaagcagaaaagtaaatgggtggaagagctgggcaagcgccggccacctaacgttgtggtcgttgcgctagccaacaagatggcgcgaacgatctgggcaatgctggcgcatgaccgcgcgtatgaccgcgactacgccaggtagtttgttgtagctgctgcaggggtactagcgaagcaaccagtttgcgtaaggttcgaagtgtgatgacaacaggtgagaccgggatttgctaaacctgaatgggtccgcagggctaacagcccgctgtcggaatgaggagcaaatcagcggattacatcggggccaggcagcgagcgatcgactgcaaaacaggccggatatagaaacgtaaccttatcctgtcgaattacacagaaaaaccttggcaaaagggaggcgtccatata

SEQ ID NO: 1324 - DNA, 1314 bp, unidentified
  source 1..1314: mol_type = unassigned DNA; note = element_19fe4a8
  misc_feature 1..2: note = core
  misc_feature 3..69: note = LE
  misc_feature 70..1107: note = CDS
  misc_feature 1108..1314: note = RE
  misc_feature 1090..1308: note = bridgeRNA
ttaattagatggtccgcctcaactctaagctaaccttagagtagtaggcaactaaagaggcgaaccatcatgtctttaattaaaatacttggaatcgatttaggcaaatcttcttttcatgttatcggtcgtgacttcaacgacaccccaatcttccgtaaaaaatttactcgtcagaaactcattgaatacctaactcaacttgagctgtgtactatcgcatttgaagcgtgcggtggcgctcattggttagggcggaaatgccagacaatgggtcacaccgttaggttaataccacctcaatatgtaaagccttacgttaaaggcaataaaaacgacttcatcgatgctgaagcaatatcggaagcggcaacccgcccaaacatgcgttttgtcagtgtcaaaacagaagaagcccaagtgatttcttcaattcataagataaggcagggctatgttaaagaacgtacagcatgtatgtctcggattggcgctttgttacttgagtttggcattagtcttcccagaggacatgcaaccatgaaaaaactatttaattggctagcatcacagaaagttaattttccatccacattgatggaagagcttctcggccttcatgagtattacttagaattgaataaacgcattacggtaaaagataacaaacttcgtcaaattacagagcagaatgagttaggacggttgcttaaaacaattcctggtataggtgataaaacggcgagtttgtgcattgctaatatcagtgccgcagcagatttcaaaaatggtagaaatatggcagcatggttggggctagtaccaaggcaatattcgaccggaggcaaaccgacattgcttggcataagcaaacgagggaataaggcgttgagaacgttatttgtccactgtgcaagatccgtgttatctaaaccggataagacaggaaaagtttttggcgactggctgtatgatttacggtgtaagaagccgtttaatgtggcaacagttgctttggcaaataaacttgccagaattgcatgggcggtaataaaaaccaaaaaaccatttgacgtaaaacagttacaacagaatttgcaatgttaatgaagatgacgaaaacgatagaatcactagattaaaacctgatacaaaaaacagctataataagctttgggctttttgaggataatctagcgcggatctcatcgtggagcgggttgcgaaagcgcctaaatgaagactccgaatacattagcgcatatcaaccccgttattgaaaattaaacttgcaataacgaggcggaccataca

SEQ ID NO: 1325 - DNA, 1275 bp, unidentified
  source 1..1275: mol_type = unassigned DNA; note = element_1a0927f
  misc_feature 1..2: note = core
  misc_feature 3..70: note = LE
  misc_feature 71..1039: note = CDS
  misc_feature 1040..1275: note = RE
  misc_feature 1046..1269: note = bridgeRNA
ttaattatatggtccgcctcactctcaagtttctacgcttagagtaggcactcagaacgaggtgaaccatatgtcttctatccacatcttaggtatcgatttaggcaaacactgctttcacgctgttgctcatagccattcaggtaaagagactctgcgtagaaaatataatcgtagccagctccttcagtttctcgtcaagcttgaatcaacaaccattgctttcgaagcttgtggcggtgctcactggctagcgcggaaatgtgttgagtttggtcaccaagttagactcatcccacctcaatatgtaaagccttacgttaaagggaataaaaatgattttattgatgcatctgcgatagcagaagatgctcaagtcattgctgcgactcaccgcgttagagatggttacataaaagagcgaacggcctgcatgtctcgtattggagcaatattgttagagtttgggcttagctttcctaaaggacatgccaaaatgaaagtgctctttcaatggttagcagaccaaaatcaacctcttcctcaaagcttaatcaataagctgacttcaattcatgatcattactcttatctcaatgagaaagttaagacccaagataagaagcttcattgtatttcagagaataacaagaatgcgcggttattaaagacagtcccaggtattggtgatcttgtcgccacgttatgtattgcagatgtcagctcagcaaacaacttttcaaatggtcgagatatggcggcttggcttgggttagtcccaaggcagttctctacgggaggtaaaactaaattgctaggcatgagtaagcgggggaataagcaccttcggaccttattcgttcatggagcaagggctgttttatcaaggcttgaaacaacaggtaaagtctttggagagtgcctgatcaatctaagggccaccaaaccatttaatgttgcggtggtcgcactcgccaacaagctagcaagaatagcttgggcggtgctttatcaccgccaagcttttaaggctgtatagccataaccaaatttgcaacgccagtgaatgtgatgacaaaaacggtcaatcggccagattatgaacctgatataaaaaatagcaattaatgctttgggctttttaaggataatctggcgcggatatcatcgtggagctgggaagcgagagctccctaacaaggactccgaatacattagcgcaaaccaactccgttataactaaattgtagttgcaatataggggcggaccataca

SEQ ID NO: 1326 - DNA, 1421 bp, unidentified
  source 1..1421: mol_type = unassigned DNA; note = element_1a0d0b4
  misc_feature 1..3: note = core
  misc_feature 4..204: note = LE
  misc_feature 205..1407: note = CDS
  misc_feature 1408..1421: note = RE
  misc_feature 1..193: note = bridgeRNA
ttccttaagaattagtgccggtccgggaggaccgggcgtggctgatcgggtgagtgccctcgatggctccaggagaatggccacccggtcctccgggacgctccggccgctgattgagagctgcgaagcatcgctgattaaggacctgccggcggggtgttcctcgggccatgaagtaacggtctggcggaagggagcagcgcgttgagtacagcggctgagcggatctgggtcggtatcgacgccggcaagagccaccactgggcggtggcggtcggcatcgatggcgagaagctgttctcgcggaaggtcgacaacgacgagacagccatccttgaactgatcgtgctggcctgcgggtcggccgagtcggtgacctgggccgtcgatatctccggccggtcctcggctctgctgctggccctgctcgtcgcccacgctcagcaggtgttctacatccccggccgcacggtgcaccggatgtccgccgcttaccgcggcgaggggaagaccgatgccaaagacgcactggtcatcgcggacaccgtccggatgcgccgcgatctggcaccggtccgcaccgaggacgatctggtcaccacgctccagctgctgaccgcccaccgggccgatctgatagccgaccgtgtccggctcatcaaccggctgcgtgaccggctcatggggatcagcccggccctggaacgtgccttcgactactcggcagccagaggcggtctggtcctgctgaccgagtaccagacgccggccgcgatccgtcgcatcggtgtcaagcggctgaccacctggctggagcggcgcaagatccgcaatgctgccactgtcgccgccacggccgttggggcggcccaggcccagcacaccgcgctgcccggggagaagcggacggccaagctggtctgcgacatcgcccaccagatccttgccctggacgagcggatcaaggacaacgaccgggagatccgcgagaccttccgcctggacgaccgcgcggagatcctcgagtccctgcccggcatgggccccatcttgggagccgagttcatcgccgccgtcggcgacatgagcagctacacgaaccccgaccgtctcgcagcagcagccggccttgccccagtgccgcgggactccggccgtcgtaccggcaacctgcaccggcccaagcgctacaaccggcgtctgcgctggctgttctacatgtccgcgcagaccgccatgatgcggccaggcccatcgcgtgactactacctcaagaagcgcgccgaggggctgctgcacacccaggcagtgctgtcgctggcccgccgccgtatcaatgtcctctgggcgatgctgcgtgacaacagactgttcacctccaccccgccagtcacgcagacggcttgacacggtcattgaga

SEQ ID NO: 1327 - DNA, 1390 bp, unidentified
  source 1..1390: mol_type = unassigned DNA; note = element_1a16fc0
  misc_feature 1: note = core
  misc_feature 2..88: note = LE
  misc_feature 89..1114: note = CDS
  misc_feature 1115..1390: note = RE
  misc_feature 1158..1382: note = bridgeRNA
caatggtatggacccctcccacctaacggcatcgatgtgccagtttggtagaatttaactttccaaacacacggcggaggagtccgagatgaatattaaacgagtaggcattgatttagcaaaacaagtctttcaagtgcatggtgtggattatcaggataaggttgttttacgaaaacagctacggagaaaccaactgctgagttatttcgccacgttaccaccttgtttgattggcatggaagcctgtggtggtgcgcatcattgggcgcgcgaattgcagaagctgggccatactgtaaaactgattgcgccgcagtttgtgaagccttatgtgaagagcaacaagaacgacgccaatgatgctgaagccatctgtgaagcggtaggtcgacctacgatgcgatttgtgtcggtcaagacggttgcccagcaagacttgcaggcaatccaccggattcgcagtgaactggttcggcagcgaaccgccaaggttaatcagatcagagggttcttggctgagtatgggcttgttgttggccgacaggtggccactctgcgccgagccttacctgagctgcttgaagatgctgaaaatggtctcagttttgatttcagagcgttattggaggatttgcggcaagacctcatccggttggatgaacgggtggcagagatggacaaaaaagttcataccctcgccgatagtatgcctgctgccaagcttttgcagagtattccggggattggcccaattagcgccaccgccattgtttgtgcggtgggggatggtaaacagtttaagcgcgggcgtgacttggcggcctggttggggctgacgcccagacaacagagtagtggcggtaaagaccggctgttggggataagtaaacggggtgatacttatctgaggacgttgctgatccagggagccaagtctgtgctcaaagtggtcgacaaaaaaactgacccgcgcagcttatggttacaaaacctatgcgcaaggaagcataaaaacatagccgccgttgccttggcgaacaaaaacgccaggatagcgtgggcattattgagcaacgaaacaagttacctgccggaaggcaaaccggcataagtccgaaggcaagccttcaaacttaagccggttgagagaaacgttcaaccacgattgtaaagcaacaaccactaatggtgaacaggtcgaaccggcgtttgcaaaacctgaactgtccgctgtgccatagagcacgtgaaagcgatgaggagcaaacgcgcgaatagtccattatggccagagcctttcagctcattaacaggtcggatatacgtgtgcagtcgtacccaaaaaccaaaggtgatttttgcttgcaaaacgggaggtgtccatata

SEQ ID NO: 1328 - DNA, 1628 bp, unidentified
  source 1..1628: mol_type = unassigned DNA; note = element_1a183f2
  misc_feature 1..2: note = core
  misc_feature 3..99: note = LE
  misc_feature 100..1305: note = CDS
  misc_feature 1306..1628: note = RE
  misc_feature 1357..1585: note = bridgeRNA
agacatgatgttttgacctgccctacctcaacgctcgtggattaccatggccgttgagcaaacaaaccgagtggcagagccacattgaggagggcaggcatgaaggagtttaacgcaaccgacgtcagaatcgagaccgcatcggctttgaatgtcgtacgggatggattgcaatcggatttctacagcttctatgtcggactggatgtgcataaggagaccatcgcgattgcggtggctcgaccggggcgcggtgagcccgagtaccgcggcgagatcgccaatacgccgaaggctgtggagaagctgatccagcgactgagtgaggaggcggacgggggcattgtgcagttctgctacgaggcggggccctgtggctacgggctttaccgccagatcctcgcaacaggccatgactgtcaggtggtggcgccgtcgctgatcccgcgcaagccgggcgagcgggtcaagaccgatcggcgggatgcgctgaagttggccaggctgctgcgctcgggcggcctgacttccgtttgggttcccgatcaggaacaggaagccatgcgtgacttgacccgtgcccgggatgacatgaaggcccaggagcgcaaggcacggcagcagttgaacgcttttgtgctacggcacggccacagctggcccaaaggcaagacccgctggacgcagacccattacaactggctggagtcgctcaagttcgagcacgcgtggcagcaagtggtgttgcaggagtacgtcgatgcggtaaaggcggcaacccggcgcgtcgacgacctcaccgcccaaatgatgcaggtgctgccgcagtggtcgctggcgccggtggtcagttcgctggtcgctctgcgcggcatcgataagctcgcggccatggtgctgctggcggaactgggggatatcagccgcttcgactccccgcggcagctgatggcctatctggggctggtgcccagtgagcacagcagcggctcgcggcgacgccagggagcgatcaccctgaccggcaatggccatgcccggcgaatgctggtcgaatcggcctggagctaccgcttcccggcgcggcagaccgcgcatctgaagcgtaaggcgacggaggccagcgatgaggccaaggccatcgcgtggcgcgcccagaagcggctctgcggacgctatcgcaccctgacgcaggcgggcaaaagcaccaagctggtctgcgtggcggttgcgcgggagctggcaggcttcatctgggacatcgtccggcacgagatgccgcggctccagcatcgggccgcttgacggttaccggcagcaacgacgaacacgaaaagcggttaaacaggaggacgaacaggcgcgttgactcagggcataccgggccggtgtggagaatccttgtccgggttaaaccggcatcagccaactggataatccctcaggggcgttccgggctgatgatccctgctgctagagaaaggccagctctacgacgtagtgaagtctggtggtaaccaatccacgtatatcagcatgatccaccgtcgtaatctgccgggtgtgccttgagccaacgcgcttgagcaagaaaaatgcgagtaatcgttgacaggtcaaaacatatc

SEQ ID NO: 1329 - DNA, 1371 bp, unidentified
  source 1..1371: mol_type = unassigned DNA; note = element_1a195d6
  misc_feature 1..2: note = core
  misc_feature 3..87: note = LE
  misc_feature 88..1110: note = CDS
  misc_feature 1111..1371: note = RE
  misc_feature 1141..1359: note = bridgeRNA
tgatgctgtggacggctcctccaccggcacatgagtgccaaggatgtgggtgctgttaaggcttcccacgattcggaggagccaatcatgcaagcagttataactattggtctcgatatcgccaagtcggtgtttcaggtccacggcatcgacgcagaaggcaaggtgctcatccgccgcaagctgaagcggtatgttctggcattcttcgagaagctgccgccatgcctcgttgggatcgaggcctgcgccacctcgcatcattggtcgcgtgagctcaagacgcttggccataccgtgcgcctgatgccgccagcctacgtgaagccctacgtcaagcggcagaagaatgatgccactgacgccgaggctatctgcgaagcggtgaccagggccaatatgcggtttgtcgagaccaagactccggagcagcagagctgcttgatgctgcatcgcacccgtcagctcttcatccgccagcagacctcggtgatcaacgccacccgggctcacatggcggagtttggcatcatagcggcggtgggacgcaagggcgtgcaacaactgcttgccatcgccaccgatgctagcgaccagcgcgtgcctgagcgcgcccgggcgtgtgtcgccgcccttggcgcccagttgcgggctttgaaggcgcagatcctggagttcgaccgcaggatcatggtttggcaccgttccaatgagacgagtcggcggcttgatgagcttcccggtgtcggcccggcgctggccacggctttggtggccagcgtcgccgatcccaaggccttccgctcgggacagagcttctcagcctggatcgggctgtgccgaagcagcactcgagcggtggcaagaacaagctcggcagtatcagcaagcagggcgatcgctatctgcgcagcctgttcaccgccggagcgctgccgtgatccgctacgccaagatccatggcacaaagcatcggccctggttggcggcactgctggcgcgctgaccaaggtcgctgccatcgcgcttgccaacaagctcgccagaatggcttgggccatgatggctcgaaacgagcgttacaaagaacccgtcgcccttgcggcgtaaacgaggtcgagccggacatccggcgtgatgtgaaggttgggagggcgaacagcacgtaatgcagagccggtcgatccggcgattgggacaacccattagggtcagtgcatctttgaatgctggcttttgaccgggacccgatccgcggaggacattatggccagcggtcatgcgaaccgcgctaacaggccgaacacatggctgcaccgaccagcaacgcgacgtgacgttttgacttgccaactaggagccgtccacaca

SEQ ID NO: 1330 - DNA, 1581 bp, unidentified
  source 1..1581: mol_type = unassigned DNA; note = element_1a1a586
  misc_feature 1: note = core
  misc_feature 2..245: note = LE
  misc_feature 246..1454: note = CDS
  misc_feature 1455..1581: note = RE
  misc_feature 6..224: note = bridgeRNA
tcgtattatgaggtcagccagttttatctggttgatcctttttgcatttgctctgaggattaaggtagccgggtcgaacgtaactgcccgtgggacttgatcccgaacgctataatgttcacctctacttgtcatgaccatgattgaggctggttgggacatagatcccgtatcacatgcgatgctatggagcgacaagaagatttatagaggctgccggtaaattcacatcaaggagagattagatgaatccagttatcgggctagatatttccaaagaagaaagccatggacaagcttttttagatcgtggaaaaccatacagagggacatttcatttcgagcatacgcgagaaggactcgaaatcttgcttcaagtgattcgggacgtcgagcatgcatctgggcatcgtcctacgctgattctcgaagcaaccggacactaccaaagccccgtcgttcagttcctcgaggagcatcactatgtgttcattgttatcaatccactcatttcaaatcggcttagaaaatccaatcttcgtaaagtaaaaacggatgctgctgatgcttatcttttgggtgagcttcactatagagaagagtttgaacctttcaaaaaaagaggcgttcagctgcttaatctgcgctatctgacgcggcaatatgaggccttttcaaagatgtgtgtgcaaacaaagctgcaattccaagctgtcttggatcaagttttccctgcatataaaggcgtctttggggctatgtattctagtgtttcactacgttttttaaacgagtttccaacatcacattcggttttgcaaactgacacatcaacacttaaatccaagatcagtactctactttcttcaaaacgtagtcgctcggaagactggattaacgaacgagttcaacggctgctcgatgcggcaaaagcaaatccatttcagcaaacgatgtactcaagccacttaatcaatctaaagatcctgatcactcttattcttcaataccaggagcaccttgctgagttggaacagaacatagatgccctggctaaagagattgaagagtatgatttaatccagtcgattcccggtattggccctaaaattgcggcaacaattttatcggaaattggagaagtcgaccgatttgatcatccaaagaaactagtagcctttgctggcattgatcccagtgtttttgcttcaggtaagttcaccgcaactcgaaatcgaattaccaaacgtggttcccgacagcttagatatgccctagttatggccgtacagtgtggcctaatccgttctcgcaacactcgaattaaagacttctacgaccgcaaaagagccgaaggaaagcctcacaaagtggccctaatagcgtgtgcgaataagctggttcattggctatatgccattttaataagcaagaaatcattccgtccagcataacaaaaagttaatggtataatcttccaatacctctcaaattgggaggttgtttggcatgcttatttttcactataccataggatttctgatagattctctggaaatgttgacaagctattagctggta

SEQ ID NO: 1331 - DNA, 1457 bp, unidentified
  source 1..1457: mol_type = unassigned DNA; note = element_1a239a6
  misc_feature 1..2: note = core
  misc_feature 3..171: note = LE
  misc_feature 172..1197: note = CDS
  misc_feature 1198..1457: note = RE
  misc_feature 1212..1452: note = bridgeRNA
agatggggtaacgggccccggcggccttccagtcaagccgcgctagctacggcgctattttgattgcgcgcgtcgcgcggcttgactggaaggtttgcggtcgtccctcacattgatggtgtagcggagtcgaggcctaagcttcgctccaagcatcaaggaggaacgaccatggactactatgccggaatcgacgtgtcattggaatgctccagcgtgtgcgttgtcgacgcgagcggaaagatcgttcgggaggtcaaggttgccagcgagcctgtggcgctgattggctggttccgctcgctcgggttcgaactcgccaggatcgggctggaggccggaccgctgtctcagtggctttatacagccatgaagcacgagggcctcgcggtcgagctcctggaaacgcggcacgtgagcgatgccttcaaggcgatgccggtgaagtcggaccgtaacgacgcccgcaacatcgcgcaattgatgcggctcggctggttccggccggtgcattgcaagtcgatgagtgcccaggagacccgtgcgatgctgacggcgcgcaagctgatccaggccaagcttcaggacatcgagaacagcctgcgcgggatcctgcgcggcttcggattgaaggttggcaaaacgacgaagcgcagttttgcggcacgcatccgtgagctggtggccggccatccggccctcgagacgatcgctactgcgacgctggcggttcatgcagtgctactgcgcgagttcaacggctttgagaagcgggtgcgggcgatgtcgcttttggatgccaaagccaagctgctgatgtcgacaccggccgtgggaccgatcatctcgctgacctttgccagcgccatcgatgacccctcgcgcttcaactcggcgaagcgcgcgggaccgttgttcggcttgacgccgaagaagtaccagtcaggcgagaccgactactgcggccgcatcagtaaaaatggcgacgcctccgtgcgcgaggcgctctatgaagccgcccacatcatcctgaccaagccgatcaagggctgcgcgccgctcaagagctgggccatgcggatcgccaagcgcgccggcatgaacaaggccaaggtagcgttagcacgcaagctcgccgtgatcatgctgcgcatgctcaaggacaacgcaccgttcaggacgactgccatggcttaaagcaagagcacacagattcgggcgggcatcacaccagcctccccgaagcgaagtcccttcgccgggacgatggatcaggccaggccgtcatccgggttgtcgacgcatccgtcgatgcgatcacgcttccgtagattggccgacctgctcctctctagaaccccatcaggcgacggcctccgcgccgatcccgtacagaagcaggttcccggcgagtggacgacgcaaaaagggattgactaaccagggcccgttacaga

SEQ ID NO: 1332 - DNA, 1386 bp, unidentified
  source 1..1386: mol_type = unassigned DNA; note = element_1a2abdf
  misc_feature 1..2: note = core
  misc_feature 3..86: note = LE
  misc_feature 87..1115: note = CDS
  misc_feature 1116..1386: note = RE
  misc_feature 1154..1372: note = bridgeRNA
gatggggtggatggctcccgctcccggcgttgaagcgccaaggtggttgctgtcatgccaaccacgagccttgggagccacccaccatggagattaccactgtcggcctcgacctggccaagaacgtctttcaagtccacgcgattagcggcagcggcgaggttgtcgtccgccgggcgctgaggcgggcgcagatgatgcccttcttcggcaagcttgcgccttgtctgatcgggatcgaggcctgcggcacgagccaccattgggcccgcgagctggtccgcctcggccacgaggtgcggttgatgccgccggcctacgtcaagccgtacgtgaagcgaggcaagaccgacgccggcgacgccgaagcgatctgcgaggcggtgaggcggccgaccatgaggttcgtgccgatcaagtcggttgagcagcaggcggcgctgtcgcttcaccggacgcgcgatctgctggtccggcagcgcacgcagctggtcaacatgatccggggtctgcttgcggagttcggcgtcgacattcccaaggggatcacgcacgcccttgcgttcgtccggcgggtcgtctccggcgaggcccacgaggttcctcagctcgcagccaaggtgatcggagccctggccgagcaggcgcttgaggggcagcaccgcatccgccagctcgaacgggatctcttggcctggcatcgcgccaaccctctatcccggcgcatcgccaccgtgccgggcgtgggcctgctcggagcgaccgccctggcggccaccgtcaccgaccccacccagttccgctcagggcgccagttcgccgcgtggctgggtcttacgccgctcaacaactccagtggcggcagggagcgcgtcggtcggatctccaagatgggtgatcagtacctgcgacgactcctcgtcacgggcatgaccgcgctcgtccgacgcaacctgcaccaccccgaggcggccgatccgcgcatcgccgccctgctcgcccgcaagccggtgcggctcgccaccgtcgccatggccaaccggacggcccgggcgatctgggccatcatggtgcggggcgaagtctaccgcgcgccggagtccgcggccgcatagcagaaccctcagatcagcgccgccacgagagcgcgcttcaggagttgcgaggaccatgtgaagtgatggcgaaccggtcagaccggggacgaggacaacccgccgtaaggtccagggcgtcatagcccgcaaagcagaatgggacttcgtccgcggaaaccatcagggccagcggtccatgaccgcgcaaacaggccggacacaagactgcacccgaccacgacgccgcaacctcacatcaccccttgcaatgcgggagccatccacacag

SEQ ID NO: 1333 - DNA, 1544 bp, unidentified
  source 1..1544: mol_type = unassigned DNA; note = element_1a2de84
  misc_feature 1..2: note = core
  misc_feature 3..248: note = LE
  misc_feature 249..1424: note = CDS
  misc_feature 1425..1544: note = RE
  misc_feature 3..224: note = bridgeRNA
ctcgtataataaatgtagtagtttttagagttcctctccaagaactatgatataattgtttagatgctgtggattggtttcattctcctaccgcttgacggttttgtaaaggctccagccacagcctctttgcagtttgttaatcagttagataccgcccgacggtttatttagaacgaggttacaagcgcattgagtccctgtgggtctaaacagcgtcgtattatttatttttaggaggtatccttatgatttttattggtattgatgcagcaaaggacaagcatgattgctttattgtaaactctgatggcgaggtgttgtatgatgttttcaccatttctaacactctcaacgggtttaatgacctactccttaaaatccaatctgtttccccagatttgagtaaaacaaaagtaggtcttgaagccacaggacactacagctacaatctgctcggatttttacttgacaaaggtctcaccacctatgtcataaatcctctgcacaccaatctctaccggaaaagtctgacacttagaaaaactaaaacagacaaggtagatgctcgcatgattgcttctatgctaatgtcttgcgtagacctcaagccctacacaagaacattatatcataatcaagagctaaagtcattaaccagatacagatttaataaagtttcagaacgagcaaaactgaaaacttctgtatcaagacttgttaatattctctttcccgagcttgaaaaactcgttccaacacttcatatgaaatctgtctatgctttgctttcagagttcccgtcagctcatcatattgcaaaggctcatctgacaaggattacaaatattttatatgaagcctcaaaaggcaggtacaaccgtgatacagccattcgttttcgtgatgctgcaagaaactctatcggttctgttatgctcgcaaaatctcttgagcttaaacatacaatcaaacttatcggtgagcttacagccgagattgacgagatggaaactgaaatcaagcatatcgttgagagcttaggaacaaccgttctcaccattcctggaattagttatacaaccgccgcaagtattcttgccgaaattggtgacttctcacattttgaaactcccgataaaattcttgcctttgcgggaatgtcgccctctacatatcaatcgggacggcttaataactgttatgctcatatggaaaagcgaggttcaagatatttgagatttgctctttacaacgctgccaagcatgtttgtaattgggacaagactttttctaattatcttgttaaaaagcgttctgagggcaagcattacaacgttgccatatctcacgccgcaaagaagttagtgcgattaatttttgctttagaaaaatctcatctgccatacaatcctgccgcttagctatgttcaatatctttaatgtttaaggcatctgatagatgtctattttgccataccaatttttactgcaaaaaatttctaaactttttccgttttcccccttgactttttatagttagt

SEQ ID NO: 1334 - DNA, 1406 bp, unidentified
  source 1..1406: mol_type = unassigned DNA; note = element_1a30312
  misc_feature 1: note = core
  misc_feature 2..94: note = LE
  misc_feature 95..1135: note = CDS
  misc_feature 1136..1406: note = RE
  misc_feature 1176..1398: note = bridgeRNA
caatgggatggactcctcctcacccacacatcggcatctaggtgccagactgggtggtacagaacctccagtcaggagtgagaaggagtccaagatgaaaattaatcgcgtcggtgttgatttgtcaaagaacgtttttcaggtccatggggtcgacagtaaggagaatccggtgtggcgtcggcgactgagtcgggagaagtggctgaagagtttattgaccaaggtggaaccgggctgcgaggtcgggatggaagcgtgtgcaggggcacatcactgggcgcgtgagctccaggcccacggattgacggtgaagttggtggcgccacagtttgtgaagccgtacatcaagagcaacaagaacgatgccaacgacgccgaggccatttgtgaggcgatgagtcgtccgacgatgcgattcgtgacggtaaagagtgcggagcaacaggatatccaagcggtgcaccgcgttcgctcggagctggtgtcgcagcgcaccgcgaagggcaatcagatccgaggattggtggccgagtacgggatggtggccccgcagcggttgagccatctgcgtcgggcgataccgatgtggctggaggacgcggagaacgggctgagcgggcggttacgtcggctactcgatgggctgaggggcgatctggtggagttgagtcgtcgggtggaggagctcgacgaggagatcgaagcgattgcaaaggcccacccggtggcgcagcgtttgcaacagcttcgcggcgtcggcccacttaccgccacggcgctcatcgcgacggtgggtaacggtgagcagttcgccaagggtcgggacctggcagtatcgctgggattgaccccgaaacagcacagtaccggtggcaaggagcggctactggggatcagcaagcgcggtgacccgtacctgcgaagcttattggtgcacggcgggcgcgcggcgctgtatgcagctagaaacaaagacgaccggttgagtgtatgggtaaaggatctggctgcgcgaagccatccgaatgtggcggcggtggcctgggccaataagacggcccgaatggcttggtcgatgattcgacatggcaccgattaccaaccggagcgggcgacgggccgagtggcctgaaagggaagccaagtaccgtagtgaaatgataaggagaccttccacccacgattgcgaagcattctgaacgatggcgaacaggtcgaaccggcgtcagcaaaacccgtgagtgtctaagtgcgtagaagcacgagaaagcaattgggagctggcgcgcgaatgcccatcaaggtcgcgtgctgagaggcacgaaacagagaccggatatacgtgagcagtcgaatctcgtcgccaaacaacagagtgcttgcaaagaggaggagtccatata

SEQ ID NO: 1335 - DNA, 1934 bp, unidentified
  source 1..1934: mol_type = unassigned DNA; note = element_1a37236
  misc_feature 1..2: note = core
  misc_feature 3..277: note = LE
  misc_feature 278..1480: note = CDS
  misc_feature 1481..1934: note = RE
  misc_feature 13..297: note = bridgeRNA
ctactataataatatttagtcgtataaatccatgacaatccagtcatggtttacacgcacttgttacttaagctataatggaagcagtgattggactaacgtttctcacattgggacaccacgcccgcaaaggagactgttatccatgctttcgttatagcgttcgattttgcaggtagagccatccatatgcgctcgcatcactcagtaggcagaataggtaacgaggaaagtgtggatttatcgatcacgaattcaaccagtaggagagatgtttatgaacgcagtcggaattgacgtatccaaaggaaaaagcaccgtggcagtgatccaaccatttggaattgtcatagctgaaccttttgatgtgatccacacagacagcggtttgaaggaactggtaagctttatcaaatcactgtccggtgaaacaaaagttgtcatggagtacaccggcacatactatgagccggttgccaatgcactccataatgcgggtatatttgtatctgtggtcaatcctttactgatagatgactacgacacaaatcgtgtcagaaaagtcaagactgacaagatcgatgctctgaaaatagcttcatatgcgctcgacaagtggatgaagctgcgtaaatacgaaccagccgaaacagttcgtaaaaccttgcagatcatgaaccggcaatgcatcaagctgaacaagattcttgtgatgcaaaagaatagtctcattgcattattggattgctgttttccaaacgtgaatacactgttcacatctccgcgcagagcatcagacggtcatgagaaatgggtagattttgtagctaaatttcctcatgtagattctgtcgcaaagctctccctatctgcattcaaaacaaagtatcaaagttggtgcaaaaaggagcattacaagtatagcgaatccaaggcagaacaaattcattcatatgcaaagacaattgtcagcacactgccaatgacagatgcagtcaagaaaatagtttctgaagctgcaaaacatctcaattctacactcgaagcaattggaacgcttcaagctgaaatggatactcttgcatctcaactaccagaatacgaaaccgttatgaatatgtacggggttggaaaagttttctgttcacagctcatagctgaaattggagatgttacaaaattaaaatgcggtaaatctctggtagctttggctggcattgatccgccacctaatcaatccggtaaagatgatccgaaatccagatgcatctcaaaacgtggctccccagcgttgcgaaaaacgttgttttttatcatgacgatctatcttcaacgacagccaaatgatgagccagtataccagtttcttgataagaaacgcgctgaaggaaagccttacaaagtttacatgattgctgccgcccataagttccttcgcatctattatgcgagggtcaaagatgtcatgcctgcgcaatagcatctattcatgagtttctcacggtcggcgcaataccagctcatttttgtgatggccttacacagttttcagtgggtaagtgagtgagcttttatgccgcaaaagcgtattgataataggtacaacagtagtaggctgatgcgccaggcaggcgcaaagggggtgtgttgccgttgggatgaggagcgatgagcgaccatcccaacgagcataagcgcctccgttgcacctgcctcgccggcctcaacctgctgttgtcggtccctgttgtcaatatgactgtggaataaatgcgaacggatgtttacgtacactattaaacacgttacctactaaaatgtgcgaatatcctatttttttgaccgttttacagacggtctttttgtcgtgcttctttttaatatgtaaacttattttgaactatcaaattatggcttgacttttatttgcaggt

SEQ ID NO: 1336 - DNA, 1442 bp, unidentified
  source 1..1442: mol_type = unassigned DNA; note = element_1a3c8b0
  misc_feature 1..4: note = core
  misc_feature 5..288: note = LE
  misc_feature 289..1170: note = CDS
  misc_feature 1171..1442: note = RE
  misc_feature 1210..1442: note = bridgeRNA
aaaatgtaatgaacgcatcccacacaattaaacacggagcagtatgatggttaaaagggtgaaactggcaggtgtggagcctcgcagatttccggcatcatagtgcccaatacgggatgcataaagctccctcagactggagactccacaaatgaaatatacaccggttggcgttgatatcgcaaaacatgtcattcagattcacttcatcaatgagcacacaggtgaagtggttgataaacagttgcgtagacaggattttctgacgttcttcggcaaccgtgagccatgcctgattggtatggaggcctgtggaggttctcagcactgggcacggaactgacaaaacttggtcataaagtccggttgttgcaggcccgcttcgttaaggcattcgtcatgggcaataagaatgatgtgatggatgcccgggctatctggatggcggttcagcagccgggtaaagaaatcgccgtaaaaacagaagaacagcagtcggtactggttctgcaccgtacccgcatgcaactggtgaagttccggaccgcacaaattaatgccctgcacgggacgttactggagtttggtgaaaccatccacaaaggccgggcagcgatggagcgggagttacccgaagcactggaacggatgaaagagagactgccaccgtatctcattatggttctggaaaaccagtacaaccgactgaatgagctggactcactgatagaggatattgaaaaacagcttaccagcgtggcgaggcagaatgaaacctgtaagcggttgctggatattcctggcgttggaccacttattgcgacggcagcggtggccaccatgggggaagcatcagcgtttaaatcggggcgagagttcgccgcatatgttggtctggttccaaaacaaacaggctccggagggaaagtacgtctgctggggataagcaaacgtggtgacacttatctcaggacattatttatccacggtgcaagagcggtggcattagtagctaaagagcctggcccgtggataaccgaactgaaaaaacgtcgtccagccagtgtggcaatcgtcgccatggcaaacaagctggcacgaacagtatgggcgataaccgcccatgaccgtaagtatgacaggaaccacgtcagtatcagaccatattaatcgctgatactattaaacaatgaactcttaacaaaagggtgaatgctgaaaggttgctatggcggccagagtgatgacaaagacaggtaagaccgtgactcactaaacctgaacagtattttgggcttgaagtccgccgtgaaaataaggggtgagtcggcgaattacataggggctcgcagcgttacggctgcaataaagccggatataaagctgcaacctacccgtcatgtcaaaacaatggatgccttgcaaacgggatgcgttcatat

SEQ ID NO: 1337 - DNA, 1534 bp, unidentified
  source 1..1534: mol_type = unassigned DNA; note = element_1a3e16d
  misc_feature 1: note = core
  misc_feature 2..120: note = LE
  misc_feature 121..1149: note = CDS
  misc_feature 1150..1534: note = RE
  misc_feature 1195..1428: note = bridgeRNA
gaatgaaagggacttccccgtcccaagcgcagcgcgtatttgcgcagaacggcatcaaagtgccacgatgggaagtgcaatctctcatcaacacgcttgtttcattggaaggggaagtccatgaccatcgtaaccgtaggaatcgacctggcaaagaacgtctttgccgtacacggcgtggatgcggcaggcaagccagccctcgtgcgcccgagcgtagcgcgcagcaacctgctggaactcatcgccaccttgcccccgtgcctgatcggcatggaggcatgctccggcgcccaccactgggcccgggaattcgagaagctcggccacaccgtgcggctgatggcccccaagttcgtcgccccctaccgcctctcgggcaaacgcggcaagaacgacgcggccgatgccgcagcgatctgcgaagccgtcacccgcccccagatggtttcgtgccccacaagagcatcgagcagcaaggccagctcatggtgcaccgcacccgccagggattcgtggaacaacgcaccgccacgctcaaccgcattcggggtctgctctcggagttggggcatcgtgctgcccctcaaagccgccaccgtgcgccgtgaagcgctggcacgcctcgaagagctgcccggctgggccaacactgtcatcggcgatctcttgagtgaagtcacccggcttgatgaacgcatcgccgagtacgaccgccacatcgccctcatggcccgccacagcacccaggcgcagcagttgatgcaactcggcggtattggccagaccaccgccatggcactcatcagcaccgtgggcaatggccacgacttcgcctgcgggcgcagcttcagcgcctggctgggcctggtgcccgggcaatacagctcgggcggcaagcagagattgggacgcatcaccaaagccggagacgcctacctgcgcagcctgctggtgatgggagccagagcggtgcttgccgctgccatgaacacccgcacgcccaagcaagaccccatcagccgctgggcccgcagcctggccgagcgccggggctactggcgcgccgtggtggccattgccgccaagaacgcccgcatgtgctgggccgtgctgcagcgcggggaggccttcaagatgcccgcgtgagctgggccggctacgcaacagacaccagaacaagctgacagatcagaaattcgccgcgtgaaggcagtcgttgatgtgcaaaaggcaaggacctgcgccggggaatgctcggttaactcaaggggactcatgggagccatcccaaagcccgactaacgaatggagcccccggcgcgcgtctttcatcagggtttgctgccaaccagaaggcagcgtaatgaccgtttgtagtcacgccgtccgcaccgtttgccaagaagcatcgacgcgctgcatgcacaaggctgggagctgatctgaaattgacgaaaaccatgcctgggttgatcgctgagcgatcaacccagggagaggtattgcttgcaaaggtggggaagcccttgta

SEQ ID NO: 1338 - DNA, 1531 bp, unidentified
  source 1..1531: mol_type = unassigned DNA; note = element_1a40847
  misc_feature 1..2: note = core
  misc_feature 3..238: note = LE
  misc_feature 239..1414: note = CDS
  misc_feature 1415..1531: note = RE
  misc_feature 3..219: note = bridgeRNA
cttgtattatagagtagtagttattaaagcccctctccaagggctgtgctacactgtaagggatgctgtggattggtcaacctcctaccacaagatggttcttgaaaggctccaaccacagccctttgcagtattgttgatcagttagataccgccagacggtttatttagaacaaggttacaagagcaaggtctcctgtggatacagcagcatcaaataatcgctggaggttttatcatgatttgtgttgggattgatgttgccaaggacaagcatgactgcttcatcatgggctcggagggggaagtcctcgcggacgtgttcaccattcccaacaacatggagggtttcaaccgcctgctgcaaaagcttcaggcttgttccgcttctcaagacaaaataaaagtaggacttgaggcaaccggacactacagctacaacattctcgggtttcttcttgacaacggtcttcccacctatgtcttgaaccccttgcacaccaacctgtaccggaaaagcctcaccctgcgaaagacgaagactgaccgtgttgatgcacgaacgattgcggctatgctcatgtctgatgtgggcctcaagccctacacagacacagcttaccacaacgaggaattaaagtcactcacccgatacaggttcgacaaggtaagagagagggccaagctcaagcagtctattgccagattggcgtgcattctgttcccggagctggaaaagctggtgccaacgctccatatggcttctgtctacgccttattggttgagttcccgggggctaagcaggttgcggatgcacaccttacacggttgaaggcactcctgcttgatgcgtccaaaggacgttacaagcgggacatggctgtagaaattcgtgaagctgccaaagcatcgattggttccagcatgccggcaaaatcattggagcttcgacacaccatccacctcattcgggaacttgacgctgagattgaagaaatcgaaactgcaatccagaccattatggatgaacttcacccacccattaccataatccccggacttggtactcggatgggagccatgattctggccgaggtgggcgatttctcccgctttgattccccggacaaggtgctggcctacgccggactgtcaccatctacataccaatccgggcagcttgcgaactgctatgcccatatggagaaacgcggctccagatacctgcgctttgccatcttcaacgctgccaagtatgtctgccattgggacccaacctttgcttcttacctcgctaagaagcgagccgagggcaagcactacaatgttgccatttcccacgctgccaagaagctggtacggctcattttcgccttggagaaatccagagaaccttaccgtctgacagcttgattttttcacgatagcctaagcggtgtcttagcggacgcctgctttgctatatactttctccaaccatctgtttttgtccaccatccttaatttcaggcttgatttttaatagttagt

SEQ ID NO: 1339 - DNA, 1136 bp, unidentified
  source 1..1136: mol_type = unassigned DNA; note = element_1a532f1
  misc_feature 1..2: note = core
  misc_feature 3..210: note = LE
  misc_feature 211..1125: note = CDS
  misc_feature 1126..1136: note = RE
  misc_feature 12..193: note = bridgeRNA
cttatctcttccgactctggcaccttaggtgccgagagcccggcgcggacgaccgttcggctctaggtcttttcgatcgctctgtagcaaggatctccgcgccggtttctccctgatccgcccgaacagttgatcgagctggcactcgtactgataagactgggcaagcggggggagctctcagccctgtcagcctagcggagttgccccatgtttgggattgggatcgatgtcagtggtgagaatctggatgtggccgtccatgaacaggccttccgtcagttcaagaacaacaagcggggctgggccagtctgatcagatggttgcagcggtggccagccaagcaggttgtgctggaggccagcggtggctacgaacagaaggcgctggatgcattgcacgaagccggcctgccgatggttcggatcaaccccggccgtggccgcagcttcgcctcggccacgggaaggcaggccaagaccgatcgcattgatgccatggttctggctcacatggccgacgccctcaagctaacccgttacgtacccccggccgcttggcaacgccgtctgggtgagctctgccagcgccgacgccatctggtccagatgcgggtgagcgagcatcagcgcatgcgtgcgttcagcgaaccctgcctgatttcaatgctgaatcagcacctggacgagatccagaaaagtatcaagcagctcgatgccaccatcgcagcactcctggccgagcaggacgggtggcgtgactttgccaagctcaaaggcgccggtccggtactgatggcgaccttggcctgtgagctaccggagctgggcaagctcagcgggaaagccatctcggccttggtaggggttgcccccatgaaccgcgaaagcggcacctggaaggggcgacggaacatcaccggtggccgcgccgttgtacgcgaagcgctctacatggcggcgctgaccgccaaacgctatgagccccggctcaaggaattctttgaatccctcgtcaaccaaggcaagccgggcaaggtcgctttggtcgcggtaatgcgcaagatgctggtgatcctcaacgcccgcaaacgggaagcggaggcccagatggcctccgcctgacaagacagttg

SEQ ID NO: 1340 - DNA, 1356 bp, unidentified
  source 1..1356: mol_type = unassigned DNA; note = element_1a5d881
  misc_feature 1: note = core
  misc_feature 2..73: note = LE
  misc_feature 74..1099: note = CDS
  misc_feature 1100..1356: note = RE
  misc_feature 1125..1353: note = bridgeRNA
taatgggatggtccgccccgccttagcggttacgttacgctggcagtgttcatactgaactggagagaccatcatggacgacgcaacgctcgttggcatcgatctcggcaagcatagctttcatgtacatgggcagaacggacaaggcaaagccgtgtttcgcaaaaaggtaagccgcaagcaactgatcgaattcttcgcgacgtttcatgcctgtacagtcgccatggaggcctgcgccggttcgcatcatatggcgcgaaagctggctgcattgggacacacggttaaactgatctcgccgcaattcgtcaggccattcgtcaaatcaaacaagaatgactttgtcgatgcggaagcgatctgcgaagcagcctcgcggccaacgatgagattcgtgacgccgaagacggaatcgcagcaaaccctttcggtcttacaccgcgtgcgcgagtcgatagtgcgcgaccgcaccaggaccgtcaatcagatgcacggcttcctgctcgagttcggcgtcagcttgccggtgggcaagagcgtcgttaagcgtttgcctgctgtgctcgccggacatgaactaccgccccggctgattgcgattctcgaacgccttcacgaacacttcaagtacctcgacgaacaaatcggtgagcttgaccaggagctggcgcgtcaactcgctgacgacgatgtcggacagcgtctcatgagcataccgggagtcggcccgattactgcaagcgcgctcgccgcggaaatgggtgatggcaagcaatacggatgcagtcgcgacttcgcagcatcggttgggctcgttccccgacagtacagtacgggcgggaagatcaatcttctcgggatcagccgacgcggcgacaagaacgtcaggcgcctgctggtcttgtgcgcacgagcttacatgcgatgcctggagaaacgaaccggtcgtctggcagagtgggttcgcgcgatgctgacgcgccgacattcaaatgtagttgcgtgcgcgctggccaataagctggcgcgaaccgcatgggcgatcgttgcacgccacacgacctttgacgccaaggtcgcaagtcctgcggcctgaacgagcgtagttttaccttccttacgaaccacctccatggttttgcgacgctgaaaattgatgacgtgaacggcacaccggcctgacgaacaacctggcaaataaagaggctttcaaagccgcacaactttaaaggatcgtcaggcgcgaatctcatcgtggcgcggggagcagtccccacaacgacgccgaatagatttaggcaagccaacaacgacatcgaaactcagggttgcaaaaatggggcggaccataga

SEQ ID NO: 1341 - DNA, 1393 bp, unidentified
  source 1..1393: mol_type = unassigned DNA; note = element_1a6aca5
  misc_feature 1..2: note = core
  misc_feature 3..77: note = LE
  misc_feature 78..1118: note = CDS
  misc_feature 1119..1393: note = RE
  misc_feature 1120..1380: note = bridgeRNA
tgatggggtggacggccccctacggcatcgatgtgccagaatgaggtcgttgcagatctcaaacgagggagccgcccgtggagcatgttatccgaattggaatggatacgtcgaagcatatttttcagttgcacggtgtggatgcgatggaacggccagtgctgcgcaagcggcttcgacgccaggacgtggtggggttttttgccaagcttgctccgaccgtcgtggcgatcgaggcttgcggaggggcccactactgggcgcgggtgctggccggcttgggtcacgagcctaggctgatcgcggcgcaattggtgaggccctacgtcaagcggggcaagaacgatgcggtcgatgccgatgctctgtgcgaggcgatgagccggccgacgatgcggtttgtgccggtgaagaccgcggagcagcaggcggctctgatgcttgcgggcacgcgcgagcgattgatcgcgcggcggacccagttgagcaatgtgatccgcggctatgcagcggagttcggcctggtgatggcgcaaggcctcgacaagatcgagccgctgctggcgcgcattgcggcggaccagacgatgccggcgttggcccgcgaactgttcgcgatccatggcaaggaatacgttcacctgcaggccgaactgacgatgatcgagaccaggctgatggcttggcaccgcaacgacgcgtgcagccgacgcttggctcagataccaggggttggaccgatcggcgccaccctgctggtgatgaagacgcccaatccgcgcgcgtttcgatctggccggcagtttgcggcctggctcggtctcacgcccaaggatcattccaccgcaggcaagacccggcttggcgcgatcagccgcgccggcgaccaggctttgcgcagcttgctcgtagtcggcgcgaccgcggtgatccagcaggtgcgacgcggcagggggcatccttcgccctggctgctggcgctgctggcgcgcaagccgcccaaactcgcggcggtggcgctggccaacaaaatcgctcgcacggcgtggaagctgatggtgacgggcgagaactaccaaagcgggcgcacgccaacggcgttggcgcggatcgcttaaacgaggtcggccgggcagcatgcatcgcgatgatgtcctgactggctgaagccggagctgcaagagacgaacagatggtgggatcggtcgatccgaggcgcgagacactccgtggaatccagtggcccgtgttggtcgcatctctgtgtggaactcgtgtcgcggaaaccatcttggccagcggcatacgcgccgcaccaacaggccggacatatggatgcaagcgatccgatcacaccctgcaaaactcttgtggcacgggggccgtccacata

SEQ ID NO: 1342 - DNA, 1388 bp, unidentified
  source 1..1388: mol_type = unassigned DNA; note = element_1a80d1d
  misc_feature 1..2: note = core
  misc_feature 3..79: note = LE
  misc_feature 80..1117: note = CDS
  misc_feature 1118..1388: note = RE
  misc_feature 1118..1375: note = bridgeRNA
tgttggtgtggacggcctcccaacggcatcgcgatgtgccacgatgaggttgttgaggaccacatgaaggagaccgtccgtggaaaagcctatccgaattgggatcgacacgtcaaagcacgttttccagcttcacggagtcgatgctgccgagaagccggtgctccgcaaacagttgcgccgagcggacatgatgatgttcttcgagaaattgccacggaccagcgtcgcgctcgaggcctgtggcgcggcgcaccatttggctcggttgcttgtctcttatggtcatgaggtcaaactgatcgcgccgcaattggtcaagccctatgtgaagcgcggaaagaatgatgcggcggacgctgaggccatttgtgaggcgatgagccggccgtcgatgaggttcgtaccgatcaagacggcagaacagcaggcggggttgatgctggtcggtgtccgcgaacgactgatccaaatgcggacgcaggtagccaattccattcgtggctatgcggccgagtttggccttattgccgcgaagggcatctgcaggatcgaacagcttctcgatcggctcgctgtcgatcgctccgttccttcacttgcccgggcattgttcgcgacccaagggaagatctaccggcagctgcaagaggagattgccgagaccgaagcgcaactcgcccagtggcaccgcgccgacgaacgcgcgcgtcgcctggctgagatacctggggtcggcatgatcggctcgtcgcttctcacgatgaaagcgcccgctcccgagttgttcgcatcgggccggcagttcgcagcctggatgggacttacgccgaaagatcattcaacaggcggcaaaacgcgaaccggaaagattacgcgagccggcgacgaaatcctgagaagtgtgctcgtcgcaggcgctacggcgctattgcggcatgtgcgcgccggacgcggccagaacgcgagcccctggctcgtggaccttctgaaacggaagccaccaaagctggtcaccgtagcagtcgcgaacaagattgcccgcatcgcgtggaaattgatggtatccggacaacggtacgagccgcgcggcgcgcgtcaagccgcagtagtgtagcaggatccggggccaggcgcgtgaaataagtgcagctgggctggatatgaacttgcaagacaacggcagatggattttgatcgatccgggctcacggcattccatacgatgcaatggcaactaaatgccgctgacttgtttggaacttgagcagcggaaaccatcttggccagcgattaatcgggatcgcaccacaaaggccggacatatgaaggcaagcgatcagcccaaatctgcctgagtgtcttgtaagcgggaggccgtccacata

SEQ ID NO: 1343 - DNA, 1448 bp, unidentified
  source 1..1448: mol_type = unassigned DNA; note = element_1a83d9f
  misc_feature 1..5: note = core
  misc_feature 6..236: note = LE
  misc_feature 237..1433: note = CDS
  misc_feature 1434..1448: note = RE
  misc_feature 1..240: note = bridgeRNA
cacccgttaccttctaggtagccccgatggtcggggttctggtcaccaggcccggcatgacttactgcccctgtcatagatgatccggggggtgttgtcaccgggttctggtggcgtgggttgatcgctgatagggacacggcccgctgcatcgacagcgtggtctcttcgtaacgtgggtgccgacgatcttcgcccgacttggtgaccagaattaggtcctaaggaggactgtcatggaccaagaccggttcgacgtattcgtcggcctcgatgtaggcaaggaacaccaccatgccaccgcgctcaacagcgccgggagacgtctgcatgacaaggccctgccccaagacgaggctgccctgcgcgaggtgttcgacaagctcaccgtccatgggtcggtgttggtgatcgtggaccagcccgccacgatcggggcactgcctgtgaccgtcgctcgagcgatgggtatcgaggtcgcctatctgcccgggctggcgatgcgccgcatcgctgatctccacccgggcaacgcgaaaaccgacgcccgtgaggcgttcatcatcgctgaggccggccgcaccatgccccacgcgctgcgacgcgtcggcggcggcgatgacctcatcgccgacttggctgtgatcgttgggttcgacgacgagctggccagcgaagtcaaccgcgtctcgaaccggatccgcggcatgctcacccagatccatcccgccctcgaacgcgccatcggcgccaacatcggccaccccgcggtcctcgccctgttggcaaagttcgccggcccgacaggcctcgctgccgcgggcaggcgacgcctgaccaccacgacgaaaccgttggcgccccgaatgcacacccggctcgtcgacgcgatcatcaaagccctgaccgagcagaccgtagttgttcctggcacccgcgccgccgagctggtgttgccccaactggctgcccaactccaaggactcctggcccaacgcgctgcagccgcgaaacaggttgaggaggccctcgatgcccaccctctttcccagctcctgatgtcaatgcccggagtcggcatcaggaccgcagccagactcctcctcgacgtcggtgacgccacagcattccccaccgcaggacacctggccgcctacgccggcctggcccctgtcacccgcagatctggcagcagcatccgaggcgaacacccctcacgagcagggaacaaacacctcaaacgggccctattcctctccgctttcgcagccctccacgaccccgactcccgcgcctactacgaccggaaacgcgccgctgggaagaaacacaacgccgcgatcatctgcctagcccgacgacgcgtcgatgtcctccacgccatgctccgcaacgggacctactaccaaccaagacctgccgtcgcggcttgacagacaccataggga

SEQ ID NO: 1344 - DNA, 1277 bp, unidentified
  source 1..1277: mol_type = unassigned DNA; note = element_1a857ff
  misc_feature 1..2: note = core
  misc_feature 3..68: note = LE
  misc_feature 69..1022: note = CDS
  misc_feature 1023..1277: note = RE
  misc_feature 1044..1275: note = bridgeRNA
ttaatgagatggtcactccctccttcccggtactatgctgaggacaggctttcattcggagaactatcatggaaaacattgcgctcattggtatcgatctgggtaaaaactctttccatattcattgccaggatcgtcgcgggaaggctgtttaccgtaaaaaatttacccggccaaagttgatcgaatttttggcgacatgccccgctacaaccatcgcaatggaagcctgtggcggttctcactttatggcacgcaagttggaagagttggggcattccccaaagctgatatcaccacaatttgtccgcccgttcgttaaaagcaataaaaacgactttgtcgacgccgaagctatttgtgaagctgcatcgcgtccgtctatgcgttttgtgcagcccagaacggaatctcagcaggcaatgcgggctctgcatcgtgtccgtgaatccctggttcaggataaggtaaaaacaaccaatcaaatgcatgcttttctgctggaatttggcattagcgttccccgaggagctgccgttattagccgactgagtaccattcttgaggataatagtttgcctctttacctcagccagttattgctgaaattacaacagcattatcactatcttgttgagcagattaaagatttggaatcccagttgaaacgaaagttggacgaagatgaggttggacagcgcttgctgagcattccctgcgtcggaacactgacagcgagtactatttcaactgagattggcgacgggaggcagtacagcacgggaggtaggacgacattgctgggaattagtaagcgaggtaataaaaagatccgaactttgttggttcaatgtgccagggtattcatacaaaaactggaacaccagtctggcaaattggccgattgggtcagggatttactgtgccggaaaagcaactttgtcgtcacttgtgctctggcaaacaagatggccagaatagcctgggccctaacggcacgacagcaaacttatgtagcataacggcagaaatacaccggtttaaagaattactgatctggttttgcgaatactgatattgatgatactaacggcccaccggcctgttgaggaacctgtaaaacggaaaggctcattgaagccgtatattttctggaggttcatcaggcgcggaactcatcaaggcgcgggaataaaatcccattcagacgccggatagattcaagcaagccaacttgtcgtcaaaatcggtgttgcaaaaacgggagtgaccataga

SEQ ID NO: 1345 - DNA, 1097 bp, unidentified
  source 1..1097: mol_type = unassigned DNA; note = element_1a8ff85
  misc_feature 1..2: note = core
  misc_feature 3..160: note = LE
  misc_feature 161..1087: note = CDS
  misc_feature 1088..1097: note = RE
  misc_feature 1..162: note = bridgeRNA
cctgtgtgtcgtgactgtgcaatgttggacacgggcgggagaccgctaggtccctggtcgtagagaccgttgtccggctcggtccccgcccgctttggtcaccacctgaacagttgcacgaggccgttgcagcggacctcgcatcacagggacaggctccatgatgataagccctgatgtggtcgggatcgatgtctccaagcatcatctcgacatttttgacggattgaccggcaagtttgagcgtctgcccaacacggtggacgacgttggcaagctggcgatgcggctgtgcgaccggttcgtcgtcttcgaggcgaccggcgcctacgacgagacccttcgaagagcccttgccgccgccggcgtcgccttcgccagggtcaacccgacccaggcccgcagcttcgccaaggccgccggcttcctggccaagaccgaccgggtcgacgcccgcatgctgacggcgctgggctcggcgctgaggccgaagccggccgaagccaccgacgaggcccgcgagcggctgggccggctgcacaagcggcgagaccagctcgtagccagccgcaagcaggagcgaacgcggcggtgcgaaacccgcgacctcgacctggctgcggacatcgatcgccacctggtcttcctagaccaggagatcgccacgctcgaggcgaagatcgctgatctcatcgccgccgaaccaagcctgaaacgaaccttccagttgctggtctcgatccccggcgtcggccctctgaccggcgcctgtctgctggctcagatgcccgagctgggccagcgcaacccgaaggccatcgccgcccttgccggcttagcgcctatcaaccaggactcaggactgcggcgaggtcaaaggtcgatccgcggcggacgaaagcgtgtccgtgacgccctctacatggccgccgtcgccgccgctcgctccaagagccgcttcaagaccagctaccagaccatgcgagccagcggcaaaccggccaaactcgccttcatcgccctggccagaaagctactcaccgtcgccaacgccatcgtccgcgatcagcaacccttcgccgcatgaaacacagttg

SEQ ID NO: 1346 - DNA, 1372 bp, unidentified
  source 1..1372: mol_type = unassigned DNA; note = element_1a983b3
  misc_feature 1..2: note = core
  misc_feature 3..80: note = LE
  misc_feature 81..1109: note = CDS
  misc_feature 1110..1372: note = RE
  misc_feature 1083..1359: note = bridgeRNA
cgatggggtggacgcccctccgacggcatcgatgtgccaaggtcgtggtgtttaggaccgcgacaagaggagaggcgtccatggagaatgttagcatcatcgggctcgatttggcgaagaacgtatttcaagcccacggagcgcgtgcggacggttcgacggttttccgcaagaagatttcccgggctaagctgctgtcgttttttgcgtccgtccccgtgtgcgttgttgcgatggaagcttgcgcgagcgcgcactattgggcgcgtcagatcggcgccttggggcatcaggtgcgtctcatcgcacccatttatgtgaagcccttcgtgaagcgaaacaagaacgatgcggccgacgccgaggcgatcgccgaagcggcgtgtcggccaaccatgcgttttgtcgccgtgaaaagcgtggagaagcaggcctccggaatggcgttcaagacgcgcgacctgcttgtccgtcaacgaacccaaaccatcaacgccttgcgcgggcatatggcggaatacggcgtcgtggccccccaaggacccgtccatgtcgaacgtctcgccgaggctctgcgagatccgcgcggcggtctgccggctcctgtgatttcgctatgtcagttgctgcttgcgaacatcgccgcgctcgccgaacagatcggtctgctcgaccaagagcttcgcgagcgagcacgccgcgatcaaaccgctaagcgactcatgacaattcctggcgtcggcgtcatttgcgccgtcgcaatggaagccttggcgccgcccctagaaggctttgcgaaggggcgcgacttcgccgcctggcttggcctcacgccacgacaaaactcatcagggggcaagacgcgcctaggcggaacttcgaagatgggtcagcgcgatctgcggcgattgctggtcagcggcgcgatgaccgtcgttcgatgggcttcgcgcaagggcgctcccgagggctcctggctcggacgcatgttgaagaaaaagcctcgccttgtcgtcgcggtggcgctggcgaaccgcacagctcggatcgcctgggcgctgatgacaaaaggcggggtttaccaagctcctgacgcggttcgcgcttgaggcgccgatccgggttggagacgtcggagatgtgagaaggccaatccaagggtaagggcaaacggtcaatgagacggggtcgggaaaaccagtgtgtttcggagcgcttcgagcgcgccacgccgatttggacccgatcctcgtacttccatacaggcccgcggcgtgtgaactgccgcactatgaggccggacacacgaaagcgcctgaccacatgccggaacccaaagaaaaacacttgcatccaacggggcgtccacaca

SEQ ID NO: 1347 - DNA, 1451 bp, unidentified
  source 1..1451: mol_type = unassigned DNA; note = element_1aa33ae
  misc_feature 1..2: note = core
  misc_feature 3..228: note = LE
  misc_feature 229..1434: note = CDS
  misc_feature 1435..1451: note = RE
tctaccattgcattttgcacggagacggggacacccctgttgatgtaaactgaggttgacgggggtgtggctcatggggtccgcggtctttgaccgctcggctctgaaatgccgcccccgtcatttgtgccatccaggagcgtctgccgggatggtgccaagttgtggctctgagcagtagacgagatcgcctggatgagcgaactcttgctgcaaggaggcagattgatggaaccccacctttgtgttgggatcgacgtcggttacagagcgcatcgagttgggattgcacacccagatggaacgatcctggatgaatttgacatctcgcacgaccaagcggggtttggagagttcttccggcgcgtcgagggctaccggagggagttgtcacttcccgttgcagtggcgatggaagggttcaatggatatgcccgaccgctcgatcggcttgttcacgagaaggggtaccggttgttcaacgttaacaacctgaagctcgcccggttcaaggaggtttttcccggggcggcgaagaccgatccgatcgacacgcgaaagatcctcgagttgttccgtcttaaggaccagcttccacttgctaaggccgccatccaggaggtagtgatggccccagcagtgaatgggaagctgaagcggctgagccgccgtaggcgtcatcttgtagacgagaagatgcgcgtcctcgctcggatgcagaccgatcttcaagccgtatgccctgagctcctcgcgttgacacactccgcggacaacctctggttccttcgctttctcacgctccgagacgatctgcggcaactcgcgcgattacgccactccaccgttctgcagatccccggtgtggggcagaagtactcacgggtgatcctggaatggcggaagaaagcgtgcttctccaacgaggtggagtacgtaggtccgatgatcatcgaggacgcggcacgggtcctggagcttcgaaagcagatccaggcattggacgaagcgatggcagagctggcggcacagtccgagatcgctcgtcgtcttgcgtcgatcccggggttcggcaagacctcaatcgctgagctagcaggagagatcggaacattggagcgattctccagtgaggcgagtctggcgttgtacgtcgggatgtgcccgctgacgcatcaatcagggcagatgtacaagacgcgggtccccagacaggtgaacacccgttgcaaagcagcgatgatgactgctgttgcaagacacattgcgtgcgtacctgagtcccgggtctactacgatcgcaagcgagcggaagggaagacccacaaccaggcgatccgtgctcttggccgccatttggtacgtgtcatctgggctatccttcgagatggacgagactacgaaatccgcgaggacttacaccccatgacttgaaaatttaagagggatgt

SEQ ID NO: 1348 - DNA, 1167 bp, unidentified
  source 1..1167: mol_type = unassigned DNA; note = element_1aa90cc
  misc_feature 1..2: note = core
  misc_feature 3..177: note = LE
  misc_feature 178..1146: note = CDS
  misc_feature 1147..1167: note = RE
  misc_feature 34..198: note = bridgeRNA
cttgtatcttgaaaataatttaaaatacccctgactggatttggcaaggtgtatgcagcccgacttcccctggggttgtaagcccgcaaaacagcgactggcgcatacactgagccactcatctgaagcccgaacagttgtccgtactccataacgcatttgcaaggatgggtaattatgagtcagccaggtccactttgtgtgggtattgatgtttcgaaggctacgctggatattgctgccaacagtgacattacaccgtttacagccagcaatgacactgacggttttgatgccatcattgccgaactgagcaagcgtccggtgtcgctagtattgatggaggccacaggcgggcttgaggccgcggtggcctgcacacttcaggccgaaggctttgacgttacggtgataaatcctaggcaggccagagactttgcccgagctatggggtacctggcaaaaaccgatcaaattgatgccagaatgctcgcccaaatggcagaggtcattaatcgtcaccccgagcgggagcgctttatccggtctcttccggatgttgagcgccaggttcttgctgcaatgatagtgcgcagacgtcagttgattgccatgttggtggcagagcgtaatcggctgtataccgcacatccacagagcaagaaaagcataaatatcatcgtcaaagcgctggaagatgagcttgccagaatcgatgaggatatgaacaaccatataaggaaccactttaaggatctggctgcccgactgagcagtattaaaggtgttggcaccatgacggttgctgcgttgcttgcagaggttcccgaactgggcagtctctccagacgatcgatcagcgcgcttgtaggggttgcccccataaaccgggactcaggtacgatgcgaggtcggcgaaccatctttggtggaaggaacggcgttcgggcagctctttatatggccgctcttgtggcaacccgatttaatccggtgataaaagccttttacatgcgtctgcttgtcgcgggaaaacccaaaaaagtggcgctggttgcctgtatgcgcaaactgctaaccatcctgaacgcgatgctcagaaagaacgaagaatggagtgagtcgtaccatcacgttgttccataatttttacgttcaagacagttg

SEQ ID NO: 1349 - DNA, 1451 bp, unidentified
  source 1..1451: mol_type = unassigned DNA; note = element_1aaf2a5
  misc_feature 1: note = core
  misc_feature 2..127: note = LE
  misc_feature 128..1177: note = CDS
  misc_feature 1178..1451: note = RE
  misc_feature 1210..1449: note = bridgeRNA
atgttatggacgcctccctcccgccgtgggtggggagagggtgagggagccctcgctgtacccgacggcatcggagtgccaaagtggtggtgttgcgaaggaccactgagggtaaggagggctcgacatgaaggttacgacgtttgggctggatttggcaaagtcggtgtttcagctgcactgggtggatacggcgacgggtgaggtctgtcggcggcgattgcggcgggagcaggtgctgccgttctttgccaaccgggagccggcggtggtggcgatggaggcctgtggcagtgcgcactactgggggcggcaggtgcgggccttggggcatgaggtgaagctgatcgcggcgcagttcgtccggccgttcgtaccgaccaacaagaccgatgcggcggatgcgcgggcgatctgggaggcggtgcaacggccgcagatgcgcttcgtggcgctgaaggacgaggggcagcagagcgtgctggcgctgcaccggatgcgggagcaactggtgaaggcgcggacgatgcagagcaaccagctgcgcgggctgctgtacgaatttggggtggtgctgccggtgggacgggaacgagcgctgctggtgctgccggacaagttggagcaactggcgtcgcggttgcccgcgatgctgctcacgatgctggagcgacaacaggcgcggctggccgagttgaccaaggacatcgtggcaatcgagttgcaactcaagggctgggccaagaccaacgcaccgagccgccggctgcaggatatccccggcgtcgggttgctgacggcgacggcagcggtggcgatgatcggcgaggccaagcatttccgctccgggcgcgagttcgccgcttgcctgggcctcgtgccgcggcagagcgggaccggcggccgggtcaagctgctggggatcagcaaacgcggtgacgtgtatttgcgcaccctgctgatccacggggcgcgagcggtgctcaatcggcgccaggaacccgagccgtggctgcagaagctgttggcgcgacgaccgccgaatgtcgtcgcggtggccttggccaacaagatggcgcgcaggatctgggccctgctggcccacggccggacgtatgagccaggctacgtttcgacccgcccggtccggggacaacccgtcccccagggacactgacgcgaggttatcgagcatgagctgttgttgtcgctgcattccaggttgcgcaggttgatatcagcgtgatggcaccaccggtcggaccacggggaagcaaacctgcaaggcgctcgtccttcgaggacaagtgggagatgaggccttccccggcgtattccatcagggcccgcaggcacacccgcctgcaccacaaggccggatataagactgcaaccagaccgtccatgccaaaatgccaatatcgcttgccaaaccgggaggcgtccatata

SEQ ID NO: 1350 - DNA, 1458 bp, unidentified
  source 1..1458: mol_type = unassigned DNA; note = element_1ab2f0c
  misc_feature 1..2: note = core
  misc_feature 3..135: note = LE
  misc_feature 136..1182: note = CDS
  misc_feature 1183..1458: note = RE
  misc_feature 1224..1454: note = bridgeRNA
agatggcacggtccgcccacctacagcgctgctgctgaaatgaggctgccatcggtcgacggtggggcctcgcagaaacggcatccgagtgccaaagtggaggttcttgcaaccacttgatctggaggccccgccatgcaatctactgcaaatctgcccgtcattggtctggatctggccaagtccgtcttccagctgcacatcgtcgatattcagactggtgaaatccagcgtcgccagatcaagcgcgccaagctcaccgagttcttcgccaagtgccagcgcagcctagttgcgatggaggcgtgcggcacagcccaccactgggcgcgggtgatcagttccctggggcaccaggtcaagctgctgcctgcccagcacatcaaggccttcttgctgcgcgacaagaccgacgccatggacgcgcaagcgatctgggtggctgctcaacagccgcacctcaagcccgtgcctgtcaagacggagcgccagcagacttgcatggcgttgcacggcatgcgtcgtcagctcatgaagatgcgggtcatgcaaaccaacgcactgcgcggcatgctggccgagttcggcatcgctctgccggtcgggcacagccagttgctcaaggcgattcagggcgagctggccaaggcgcagcaggctgatcagctaactgccgatctggtgctcagcgtgcaggagcaactcaaacgcattgacgccttgcaagaagacatcgaccaccttggtcagcggctacgtgccatgattcgcgaggaccgccagatgcaggcgatccagcaaatcccgggcgttggggacttgacggcctcggcgctggtggcggccgtcggagacttctcgaccttcaaatccgggcaccagtttgcatcgtgggcaggcttgacaccgcgacaggtgggaacaggtggaaagacacaacagcttggcatctccaagcgtggtgatacctacttgcgcaccctgctgatcgcgggagccagggccgtgattgccagagccgacaagtcgagttggatcactcgacttctggcgcggcggcactacaacgtggtcgtcgtggcattggctaacaagatggcacgtacggtctgggcggtcctggctaaaggcacagcctttgaacaagtgaagtggaatcccgttgatccggtcgctgtctgatgtaaccacaacagaacgccataccgtcaaacaactgaaccgaaccgttttgaaggagcgcctgcagaaagcggagtgatggattgaaggtcaaaccaggtaggggacattccggtgttgcactagtaccttgagtacggtctgaagattggagcctcgaccgcgaatagccatcatgggcagcagaaccaactgcacaaacagcccgaatgtaaggcagcagtcctttcaagctttcacgacgccaacgcttgcactccttgggcggaccatgta

SEQ ID NO: 1351 - DNA, 1464 bp, unidentified
  source 1..1464: mol_type = unassigned DNA; note = element_1ab5560
  misc_feature 1..2: note = core
  misc_feature 3..232: note = LE
  misc_feature 233..1447: note = CDS
  misc_feature 1448..1464: note = RE
  misc_feature 1..227: note = bridgeRNA
ccgttacctttctggtgaccccgtagggcggggttacggtcgccgggcccggcatgacttactgcccctgtctcacgcatgatccggggggtgttgtcaccgaacctggtggcgccagatgaccgctgatagggacacggcctcaacacaggtctcttcgtaacgtgggtgccggcagctgacgcatcaccactccgacgaccgtcgtttcgatggaaggatggtggccgtcatgcacaacgacctcggcttcgacatctggtgcgggctcgacgtgggcaagcaagcccaccatgcctgcgccctcgacgccgccggcaagaaggtgttcgacaagcccttgccgcaggaccagtccaagctcgaagacttgttcacgaggctgtccgagcacggtcgggtgttggtgatcgtcgaccagcccaacacgatcggcgcgctgcccatcgccgtcgcccggtcgatgggcatccaggtcgcctacctgccaggcctcgcgatgcgaagggccgccgatctctatccgggcaacgcgaagaccgacgcgcgcgacgcgttcgtcatcgccgacgccgctcgaacgatgccgcacacccttcgccgggtcgacctgggcgaagagaccttggcggagttgaaggttctggtcgggttcgatgaggacctggctgcggaagcgactcggttgtcgaaccggatccggggactgctcacgcagatccatcccgcgctggaacgcgttgtcggaccccgattggccaccaggcaaggcctcgctgtgatcgagcagctcggcggaccccaaggcatgaccgcagcatcgaagtccaagctgctgcgggtcatcaccaaagccaacccgcgtcacgcccagaacttcgccgacgccatcacccagaccctgtccgagcagaccgttgttgttgccgggactgccgcggccgaacaggttctgccgaagctcgccgcttccctgccccagacgtgggaccagcgctccgagttggctgcgcaggtcgagaaggtcgttgatgctcaccctcttgccgaggtcctgacctcgatgccaggcgtcggggtcaggaccgcagcacggatcctgctcgacgttggcgacgcctccttgttcccgaccgccggacacctggccgcctacgccggcctcgcacccgtcacgcaccgctccggaaccagcatccggggcgagttcccagccagatcgggaaacaagcacctcaaacgggccctgttcctgtcatcgttcgccgcgctcagatccgatcccgtcagcagggcctactacgaccggaaacgagcccaaggcaagaaacacaacgccgcactcatctgcctctcccggcgccgagtcgatgtcctgttcgccatgctcagaaaccgcgagccctaccgggcccccaacccgacgccacaacccctcgcagcttgacgagaaacatagggaca

SEQ ID NO: 1352 - DNA, 1589 bp, unidentified
  source 1..1589: mol_type = unassigned DNA; note = element_1ac1e9a
  misc_feature 1..2: note = core
  misc_feature 3..247: note = LE
  misc_feature 248..1423: note = CDS
  misc_feature 1424..1589: note = RE
  misc_feature 3..226: note = bridgeRNA
ctcgtattataaagtagtagtgtttatagaccctctccaaggtctgtatgctatactattggagatactgtggattgctttttcattcctaccacttgatggtttcagaaaggctgcaaccacagtctctttgtatatttgttaatcagttagataccgcatgacggtttatttagaacgaggttacaatcgcaaagagtaccagtggttctaaacagtatcaaatattcattcaaaggagatttttatgatttacgcaggaattgatgttgccaaagacaaacatgattgttttattactaactcagatggtgaagtattattcaaatcttttactattcctaacaaccgtgaaggttttgaaaccttatttcagaaaatactatctgtatcagatgatttaaccaaagtaaaagtagggcttgaagccactggacactatagttacaatcttctgggattccttcttaacaaaggtctgaccacctttgttatcaatccgttacatacaaatctgtacagaaaaagtctaagccttagacagacgaaaacggataaagttgatgcccgcacaattgcttctatgctaatgtctgatgtaaacttaaagtcctactcagacatatcttatcacaacgaagaactaaagtcattaactcgttatcgctttgataaagtacaggagcgagcaaaactcaagacctctgtatccagacttatctgtatcttatttcctgaattagaaaaattagttccaacacttcatatgacatcggtttatgctatgctatctgaattcccaggagctaaacatgtagctaacgctcatcttaccaaactttctaatcttctttctgaagcttcaaaaggtcattatggtaaagaaacagcaatcacatttagagaagctgcaagaatctctattggttcaaatatgcctgcaaaatcacttgaattgaagcataccatcaagcttattcaggaactcacatctgagattgatgaaatcgaaaatgaaatcaaaatcatcatggataaaatcaattctcctattcttagcattccaggaatcaactatcgaatgggtgccatgattattgcagaaattggtgatttcagtcgttttgactctcctgataaaatcttagcttatgctggcttttcaccttctacttaccaatcagggcagcttgatggagcatactcacacatggaaaaacgaggttccagatatttacgctatgccttatataatgctaccaagtatgtctgccactgggattcaacatttgctgaatatctggcaaagaaacgagccgaaggcaagcattacaatgttgctatatctcatgctgttaaaaaacttgttcgggttatttaccatctcgagaaaactaaccagcaatacattaaagttgcttaaatttttctaattcaatactccttttttgagcacctataatgatgctctttttgtcatgcagttttcaaggtccaaggaactctaaccgagttctgaatatatctgaaatgcatttctgcaattcattcaaaaaattcatttttagtcttgacttttaatagttagt

SEQ ID NO: 1353 - DNA, 1394 bp, unidentified
  source 1..1394: mol_type = unassigned DNA; note = element_1aca842
  misc_feature 1..2: note = core
  misc_feature 3..79: note = LE
  misc_feature 80..1126: note = CDS
  misc_feature 1127..1394: note = RE
  misc_feature 1126..1381: note = bridgeRNA
tgttggggtggacggcccccaagcggcatcagttgtgccaaaaagaggtcgttgaagatctcaatgaaggaggccgtccgtggagaatattagtcgtattggcatggatacgtccaagagcattttcgtgcttcatggcgtcgatgcatccgatcaggtggcgctgcgcaagaaactgcgacgcaaggaagtcgtggagtacttcaggaaactcaggccaacgcggatcgggatcgaggcttgcggcgcatctcattactgggcccgtgagctcggcgcccttggccaccaggtgctgctgatcgccccgcagcatgtgaagccctatgtgcgccgcaacaagaatgacgccgccgacgcagaagcgatctgtgaggcaatgagtcggccgcgaacatggttcgttccggcaaaaacggccgaacagcaggcggggctgatgctggcgggaacgcgggaggcgtttgttcgccggcggacacagctcagcaacacgatccgttcgtacgcagcagagttcggcctggtgtcttcgcgaggcctggacaagatcgaacctttgctggcgcggatcgcggccgacgacgacctgccgacgctcgccaaagagatgttcgcggatctcggggaggactatgtccttctgcagaagcggctcgacatcatcgagaggaagctgcgcctctggcatcgcaatgacgaacagagccgtcggctggctgagataccgggcgtcggtgtggttggggccgcgctgctggcgatgaaggttcctgatccgaaggcgtttcggtcagggcgcgacttcgccgcatggcttggccttacgcccaaggatcactcaacggcaggcaagcagcgccttggcgtcatcacacgcgccggcgacgagacgctgcgcagcgtgctggtggtcggcgccactgctctgctgcggcaagtacggttgggcagaagccatcattcacgctggcttgtagatttgctccggcgcaaaccgccgaagctggtcgccgtggcgctcgccaacaagacggcgaggatcgcatggaagctgatggtcagcggcgaatgctatgatcgaactcgtgtcgggacagccgctcgcgaagcggcgcccgcataaccgcaatcccggctgagagacgccgccgggatgtccgaagcttgctggagaacgagtagatggcgtgatcgatcgatcccaagacgcgagccaatccgtgggccccactggccaagttattgaaggtcacaatggtgttaggacctcgcgtcgcggaacccatcttggcagcggtcatatgcgaccgcgacatcagaccggacatatgagcgcaagcgatccggtcactcattcactcagctcttgcaagcggggggccgtccacata

SEQ ID NO: 1354 - DNA, 1146 bp, unidentified
  source 1..1146: mol_type = unassigned DNA; note = element_1ad01b4
  misc_feature 1..2: note = core
  misc_feature 3..192: note = LE
  misc_feature 193..1134: note = CDS
  misc_feature 1135..1146: note = RE
  misc_feature 41..201: note = bridgeRNA
cttgtgtgttgggaatcggccaaagtggcgattgccgccggtcgggtcatgacccgaccggcggcggcgaccgcgagcccgtgaccccaggggccagcaagccgtggatgagccggggccgcggtcgtcgtcttcttcaacccgaacagttgcagggggcaagaccccgcacgcaaggatgggattccgaagatgagcaaagccgaagcggtggtgggtatcgacgtgtccaaggcggtgttggacatcgcgatcctgccgatgaacgagacgttccaggtggccaacgatgaggccggctgggttgcactgatcgagcgggtgggcgccctcgcggtcaaggcgatcgggctggagccgagcggcgggtacgaacgcggcttggtgaaggctttgcgccaagccggcctgccggtgcgcctggtcaacccgtaccgcgtccggcagttcgcacgcgccttcgggcggctggccaaaaacgaccggatcgatgcggccatgatcgcccgcttcgccgccgaactgccgcctcgcacgccccggatcgaccccgtggtcgaacggatggccgagctggtgaccgccagacgccagctcaccgaagaccgggtccgcctcaagaaccggctcgaacaggtgcgcgacccggtcctgcgccgcatgcaccgccatcgcttggcgaggatcgatgcggagatccttctgatcggcaagcgcctgacccagatcgtcgccgacactcccgaactggcggccaaggaccggttgatccagtccatgcccggcgccggtccggtcctcagccacaccctgctcgcgatggtccccgaaatcgacgacgtcgatcgacgagagatcgccgccctcgtcggcgtcgcgcccttcgacgacgacagcggaaagcgcgccggcaaacgcgccatctggggcggccgagccgaggtgagggaggtgctgtacatggccgccctcagcgcggcccgctgccacccgaccctgaagcccttccgcgagcgcctgatcgccgacggcaagacccccaagatggctatcatcgccgtcgcacgccgcatgctcggcatcatcctggccatgttgcgcaacggccaggaatggaatcccgccctcgcctgaacaacacagttg

SEQ ID NO: 1355 - DNA, 1535 bp, unidentified
  source 1..1535: mol_type = unassigned DNA; note = element_1aed8a5
  misc_feature 1..2: note = core
  misc_feature 3..242: note = LE
  misc_feature 243..1418: note = CDS
  misc_feature 1419..1535: note = RE
  misc_feature 3..219: note = bridgeRNA
cttgtattatagagtggtagtttatgaagcccctctccaagggctgtgctacactgtaagggatgctgtggattggtgcgttacctcctaccacgagatggtttaatgtaggttccaaccacagccctttgcagaattgttaatcagttaaataccgccagacggttgatgtggaacaaggttacaagagcaaagtgtcctgtggatgcagcatcacaaattttaccgccggagggtttgctatgatttctgttggaatcgacgtggccaaggacaagcacgactgcttcatcatcagtttggagggagaagtcctcgcagatgtgtttaccatcccaaacagcatggagggctttcgccatctgctgcaaaagattcgggattgcacctcgccgcaggacaaaataaaagtagggcttgaggcaaccggacactacagctacaacatcctcgggtttcttcttgacaacggtctggtcacctatgtcttgaaccccttacacaccaacctgtatcggaaaagcctcagtcttagaaagacgaagaccgaccgtgttgatgcacgaacgattgccgctatgctcatgtctgatgtgggcctcaagccctacacagacacagcttaccataacgaggagttaaagtcactgacgagataccgtttcgacaaggtgaaggagcgcgccaagctcaagcagtctgtttcccgcctggtctgtattctgttcccggagctggaaacgctggtgccgtcgcttcacatggcctccgtctacgctctgctcaacgagttctccgaagccaagcagattgccgaggcacatctgactcggctgaaaacactcctgcacgacgcgtccaagggccgctacggacgggatatggccgtggtgatccgcgacgctgccagagattccatcggctctgttatgccggcgaagtcgctggagctgcgccacaccatccgcctcatccgggagctggatgccgagattgacgaaatcgaatccaaaatccaggtgctgatggacgagcttcattctcccatcaccacgattcccggcattggttatcggatgggcgccatgatcctggctgaggccggagacttctcccgcttcgattctcccgacaagctgctggcctacgccggactttcaccatctacctaccaatccgggcagctcaaaaattgctatgcccacatggaaaagcgcggctccagatatctgcgatacgccatctttaacgccgccaagttcgtctgcctttggaacccgacctttgccgcctatctttccaagaagcgtgccgagggcaagcactacaatgttgccatttcccacgctgccaagaagctggtacggctcatcttcgccttggagaaatccagaaagccttaccgtttacctgcctaacctttccttgatagcctgccgggggcttattagccctctgctttgctatacccttttttgaaccatctgctttttcaccgccatccgcatttttaggcttgacttttaatagttaat

SEQ ID NO: 1356 - DNA, 1588 bp, unidentified
  source 1..1588: mol_type = unassigned DNA; note = element_1af5af1
  misc_feature 1..2: note = core
  misc_feature 3..250: note = LE
  misc_feature 251..1426: note = CDS
  misc_feature 1427..1588: note = RE
  misc_feature 3..228: note = bridgeRNA
ctcgtattataaagtagtagtgtttatagaccctctccaaggtctatatgctatactgttggagatactgtggattgtttttttgctcctaccacttgatggtttttgaaaggctacaaccacagtctctttgtatatttgttaatcagttagataccgcatgacggtttatttagaacgaggttacaattgcaaggagtaccagtggttctataaacagtatcaaaatatttactcaaaggagatttttatgatatacgctggaattgatgttgccaaggacaaacacgactgttttattaccaattcagttggtgaagtattattcaaatctttcaccattcctaacaatcgtgagggctttgaaaccttatttcagaagattcagtccgtatcagatgatttaaccaaagtaaaagtaggactggaagccactggacattatagttacaatcttctgagattccttcttgataaaggtttgccgacctacgttatcaatccgttacataccaatctttatagaaaaagtctaagccttagaaagacgaaaacggataaagttgatgcccataccattgcttctatgatcatgtctgacgtgaacttgaagtcctactcagatacattttaccacaacgaagagttaaagtcattaacccgttatcgttttgataaggtaaaagcacgggcaaaactcaaatcttctgtttccaggcttgtttgtatccttttccctgaactggaaaaacttgttccgactcttcatatggtatctgtttactctctgttatctgaatttccgtctgctcatgtcattgcgtctgcacatcttaccagacttacgaatctgctgtctgaaagttccaggggcagatacggtaaagatacagctatctgtttccgagatgctgccagaagctccatcggatctcatatacctgccaaatctctggaactgaagcataccatccgacttattcttgagctgacctccgagatcgacgaaatcgaagccgaaattaaaaccattatggataaaatcaactctccgatccttaccatccccggaatcagttataaaatgggagccatgattattgcagagatcggtgatttcagccgttttgattcccctgacaagatactcgcctacgctggaatgtcaccatctatctaccaatcggggcagctggataactgttatgcccatatggaaaaacgtggttcccgttaccttcgatatgccctttacaatgccactaaatacgtctgtcactgggatgaatctttcggaacatatcttgcaaaaaaacgagccgagggaaagcattacaatgttgccttatcccatgccacaaagaaactggtaagaaccatttatgcaatggaaaaatcgggtcaggcatacaccaatgctgcgtaatcttttctgaaagtatcagtatgacacgttggtatcccctgtttgagtgccgataaagacactctattcatcatgcagttttcaaggtacaaatatatctgaatgcatttctgcaattcattcaaaaaacttttattttagacttgacttttaatagttagt

SEQ ID NO: 1357 - DNA, 1408 bp, unidentified
  source 1..1408: mol_type = unassigned DNA; note = element_1b06edb
  misc_feature 1: note = core
  misc_feature 2..87: note = LE
  misc_feature 88..1125: note = CDS
  misc_feature 1126..1408: note = RE
  misc_feature 1175..1400: note = bridgeRNA
taatggaatggtcgcccctccctaaacggcatcgcatgtgccaaagtgggcgttcgtttagtccacaaaacagaaagggcgacgaccatgaacattactacagtaggcattgatctggcaaaaaatgtattccaggtgcatggcgttgatgaacgaggtaaggcgagtttgaaaaaacagctgaaacgtgcgcaattgctgccgttttttgccaaccttccgtcgtgtttaatcggaatggaagcctgcggaagtgcacattactgggccagaaagctcaaggagcatggacacacggtcaagttaatggctccacaattcatcaagccttatgtgaagacgaacaaaaatgatgttgcggatgccgaggcgatttgtgaggcggtgagcagaccaaacatgcgcttcgttcctatcaaagagggtgagcagcaagcggttctcggtttgcaccgggcacgccagggtttcgtcaaggcgcgaacggcacaggccaatcagattcgaggactattggccgaatacggaattgttatacccaagggtattggctatatcgccagacgactgccggaaattctggaagacggcgataatgaattgccggatgcctttcgtcagctgatagagcgcttgggaacgcatctcaaggagcttgaccggcaagttgatgaactggatgcccagatacaggtgtggcacagagggaatgatgccagcaagaaattggagaaaatccccggcataggcccgatcacagcgagcgccttggtggcctcgattggcgacgccaaaaacttcgagaatggccgacaactggcggcgtggctgggtcttgttcctcgtcaaaattccagcggaggaaaacaaaccctgcttggcatcagcaagcgtggcgacacctacctccgaacgttgttgatccacggcgcgcgcgccgtgataagggtctcggagcacaggcttgagcaagccaatggctggcccactcggatagtggacaggcgaaacaagaatatcgcaacggtggcgctggccaacaagaatgcccgcattgtttgggcgctgctggcacacgaaagcgaatttcagccagattactccgtggcggcagtcgctgtgtaatagaacggattgattttagataaattaagcttaaagaagagggttaactccaccgattgcacaggcaatcattgttatgatggcaagacaggtcagaccgtgaccgaataaacctgaatgagacaaggcacgtttgagtgcgccattttgttgaggattcggtcagcgcattccatcagggacagaggcgacggcctcgattaagtccgaatatatggcagcaatctttatctgaaaccgccttgatcaaatgaacgcttggcaaaaccggggcgaccatata

SEQ ID NO: 1358 - DNA, 1157 bp, unidentified
  source 1..1157: mol_type = unassigned DNA; note = element_1b0a640
  misc_feature 1..2: note = core
  misc_feature 3..208: note = LE
  misc_feature 209..1150: note = CDS
  misc_feature 1151..1157: note = RE
  misc_feature 47..207: note = bridgeRNA
gccttatacattagaggccggaacacctgttaggatgttccggcctctttgccgttgtgttgtcgcacttcacgatggcgggtgcaaagtggttgagcccatcggggcatgaactttcgttcgtaaaaaagcagaaccctttgcatccttgaggcttcgtcgaaccgttgagagagcttcgcgctcgcgtataagggagaccagcctcatgactgatattacccgttttgtcggcatcgacatatcgaaatcttccttcgatgtctgtgttttgccagatggccgctcggcaagctttgccaattcggcagaaggcattgccgatttcctcgtgttcattgagcctttgtgcggaatagaacgcctcgttctcgagccgaccggcggttacgagcgtcatgtctttgcagccttgcaggcagcacaattgccggtcgcacgcgtgaatgccaaacaggtcaggcaatttgccaaagcctgcggccagctctccaagactgacaagatcgatgccttcatccttgccgattatgcaagacgcatggaaacacgcattgtgccgcaacgctcttctcagcaaggcgctctggtggatttggtccgtcgttacagacagttatcgcacatgatcgtgcaggagaagaaccgcagggaaaagcagaacgagaccctcaaggactggattgaggagatgttgcacgtactgctcgaacagcgccaggcagttgtcgatgcgatggaagcttgtctgaaggctgatctggaacttgcccgtaaagccgatatcctcatgtcgctcaaggggatcggcctgcggacggcctgtttcatcctggccgatctgccggaattgggccgcatcggcaaagggcagattgccaagctggttggcgttgcgccgcttaatcgcgatagcgggctgatgcggggcaagcggatgattgcaggcggaagacagccggtgcgcgacgcgctttacgtcgcagcgctaccagccattcgcttcgatccagccatcaaggcattcttcatgcacctcaagcaaaagggaaagcccggaaaggtcgccctcgttgccgtcatgcgaaaaatgatcattatcctcaacgcaaaaatgcgagacgcatacgcaacggtgcttgaccactaacaccgtt

SEQ ID NO: 1359 - DNA, 1407 bp, unidentified
  source 1..1407: mol_type = unassigned DNA; note = element_1b0adcd
  misc_feature 1..2: note = core
  misc_feature 3..118: note = LE
  misc_feature 119..1150: note = CDS
  misc_feature 1151..1407: note = RE
  misc_feature 1162..1402: note = bridgeRNA
agatgccgtaatgggccggccttcgcgagcatagccaagttggacggctgtccctcagaatgatggtgttgaaactaaggccgagcgatcggctcgaagcatcttatgaggaacagccatggagtattatgcgggaatcgatgtgtctttgaaagaatgcagcgtgtgcgttgtggacggcactggcaagatcgtccgcgagatcaaggtcgccagcgagcctgaggcgcttgtccgctatttcgacgagctggaattgcctgtcagccgcatcgggctcgaggccggaccgttatcgcagtggctgtatgccgggcttgtggcctccggacgcgatgcggttttgcttgagacgcgccacgtgaaggcggcgctctccgctatgacggtgaagaccgaccggaaagatgcacgcgggatcgcccagttgctacggatggggtggtgccgccaggttcacgcgaaatcggtgccttgcaaggatacccgcgccctacttgttggacgcaagcttctgcaaggcaagcttctcgacgtcgaactcagcatccgcgggatcctgcgcggctacgggttgatggtcggcgaagtgagccgtggcaggtttgagatgcgcattcgagaactgacagcagggcatgtcaccttgaagacggtgattggggcgatgctggcagcgaggacggcattgtggaacgagttcaccaagctgcatcgtgaaatgctgaagatcgcacgggccgacaagatttgccggagattgatgagcacacccggtgtcggcgccttggtcgccttgacatatcgctcggctgtggatgatccggcgcggtttggaaaatccagcacggttggcgcctatttcgggcttacgcccagaaaatatcaatcaggagagactgatcgggacggtggtgtcagcaaagtcggcgataccatggtgcgaaccgcactctttgaagcggcgcacatcatgctgacgcgtgcgatccgattttcgagcctgaagcgctgggcgctcgatgtggcgcaacggcgcggcatgaagcgcgccaaggtggcccttgcccgcaagctgggcgttatactccatcgcatgtgggtagacgcgaccgagttctgctggagcaggaccgctacggccgcataggagataggggaggttcggaacgagccttaaacggtaacgctctcctgaggtcccgtcgccgggacgagggcttggcaaggtcgtgagtagtgctgtgagtgccgtgaatgcttcggcagatcacgcttcctagatagacctgtcggctctggatctgatggcatggtgtggcggcccagcgctgaccacggacagaagcatgatcctggcgatgagaatcgttcagagggacttgacgaacgatggcccattacaga

SEQ ID NO: 1360 - DNA, 1537 bp, unidentified
  source 1..1537: mol_type = unassigned DNA; note = element_1b2c54c
  misc_feature 1..2: note = core
  misc_feature 3..236: note = LE
  misc_feature 237..1412: note = CDS
  misc_feature 1413..1537: note = RE
  misc_feature 6..221: note = bridgeRNA
ctagtatattgatgttacgtactccaaagagttttgagataaaattctcgtagcggtcggggtactacgatcacctccttgggaccattggttctcgacagaaagaatgtagtccccgccttgcgagcgtttacgaatgagctggatgttggaggggttgacccctgtcttcgaatctcaaactaggttgtagatcgcaaggttgtgcggttccgacccatttggaggtacgtgctgtgtattttgttggtattgacattgccaaacgccatcatgaagcctgtatcatcgactcagctggacagagtcaaggcaagacactacgttttccaaacacgcaggctggtggccagaagctgatccagtggatgcagcatgtcgatcccgatttgtcatccacagaagtcgctctagaagctacaggccactactggttggcgttacactcgtttctccgtaagcatggtgtcaaggtgcaggtcatcaatcccattcagtcggatgcatttcgcaacatgtacattcgacagaccaaaaatgacacgaaagacgcattcatcattgctgaggtgttgcgctttggacggtacaccacgacagaactcggcagtgacgaaatcgttgctttacggcaattgagccggtttcggttcagtctggtcgattccatttcagacctaaagcggcaagtcatcagtgtgctcgatatgttgtttcccgaatacgagcgactgttctccgacctatttggcaagacatcctccgaattgttgatggaatacacaacaccggaagaaatccttgccgtagatacagaagaattggcggctttcatggccaaacacagtcggaaccgtctcggactggacaaggcggaggagctcaagtctgccgctgcctcgtcgtttggcattgacacagcgctggatgcgtatcggctacaattgcgcctgcttcttcagcaaattcgctttacagaggaacagttagaatccctggacgccgagatagaaaaacgcctaaagagcatggacaccaatctcgtaacgattccgggaatcggtccggttcttgctgctgcgatactcggtgaaatcggagacatttccagatttccaactggcgtcaagctcgttgcgttcgccggaatcgaccctacggtgcgaagttcgggcgaatttaccggaacccacaaccgaatgtccaaacgaggctcaccgtacttacgacgggcgatttggcttgctgcaaatgtcgccaaaatgcacaacccaatccttagggatttttacgaacagaagcgtgcccaagggaaacatcacctggctgcaacgggcgctgtcgcccgcaaaatgacgtacatcattcatgccgttctgcgggataagaagccatacgaaccaatggcgtaaggtggcgaatcgactgaacattcaaaccacgtctgtctttgacaggcttatatagatgcgcctaaaaatcacttcccttcatggttcttagaactcgaaagagtgcttgacattagatagctggt

SEQ ID NO: 1361 - DNA, 1207 bp, unidentified
  source 1..1207: mol_type = unassigned DNA; note = element_1b35686
  misc_feature 1..2: note = core
  misc_feature 3..186: note = LE
  misc_feature 187..1179: note = CDS
  misc_feature 1180..1207: note = RE
  misc_feature 12..196: note = bridgeRNA
cttgtatcttgaggttttggatgattagctatctccaagctctaaaatcagtgaggatgtttgaccacgtaatgtttaacattgatctgtagattatcccctgattttactttctctaatactggatggtatccgagcgcttagttattaactaatgacgctgtatgcacaagtggagtcgttgatatgagagtaaatgttggaattgatataagtaaagattctttagatttctgtttattactaaatcaaaccaagagcggtcgtaaatttagaagctttaaaaatcggaaaatcgattatttcattattaatgattggttgttaaaacaagctaaatgccagccacatgagatcgttattacgatggaatctacaggtgtttatcatgaagctatcgctttatttttacactcgtcaggttttcaaatcattatttcaaatccaggcaaagcgaagaagttttctcaatcgctagggctagttcataaaactgacaaattagactcatatatgcttgcaaggtacggagatgcacaatatgaacatgtttctttctggaaaccagatgccgagaatatcaggtcaatcaaagtgttagtccgtagactttctgcattggaaaaagatagattgagagaaaataaccgacttgaagctagcatcattagtggctcttatgagcgagtgttgctatcaattaaacgaatgattcatattttagatgatgagattaaagagattgaacatgagattgattgcatcatttcggcttgccctgtcatgagtaagaatcataatttactcatgagtgttgtcggtattggtaaggtaatgtcgagagaactggtttatctattttcagctaagagcttctcaacagccaagcaagcggctgcatttgtcggtcttacaccaaggttaaatgagtcaggttcattcaaaggaagaacaacattgagtaaaattggcccatctcgaattcggtcaaaaatatttttagccgcagttagcgctagcaaatataaccccgatatcaaagcccaaaaacaccgccttttatctgctggaaaaacaaaaatgcaagcgttaggagcagctatgcgaaagctaattcaaatctgttttggcgttataaaaaaccaaacaaaataccagtcagaaatactcctaaattaagtttgttgtcgattctgaaagatggtat

SEQ ID NO: 1362 - DNA, 1501 bp, unidentified
  source 1..1501: mol_type = unassigned DNA; note = element_1b3d345
  misc_feature 1..2: note = core
  misc_feature 3..245: note = LE
  misc_feature 246..1481: note = CDS
  misc_feature 1482..1501: note = RE
  misc_feature 7..242: note = bridgeRNA
ctaatgagagttaacgggtccgctgtccggcagactcgttaactggtggccgccggcgggtgagcactttacctgacagggcgctggagcccctgagcccaagaacgtgcccccgccggtgtccgggagagtggatcgctgctgggatgtcgtgcccgccatctggcgtgagcactgttcattagtctgctgatggttctcccggtggctgctgaccggaatcgacatcgtgcgcgggaggatgcatgcgtctgctggtaggggatgactgggcgcaggatcatcacgacatcgaggtgatggacgaggccgggaatgtgctggtccgcaggcgggtgccggaaggcgtggccgggatcgcgcagctgcatgagctgatcagccggttcctgccagaacagggcacggacgtggaggttcaggtcgggattgagaccggccgcgggccgtgggtggcggcgctgatcgccgcgggatacacggtgttcgcggtgaacccgctgcaggcgtcccggtaccgcagccggcatagcgtgtcgggggccaagagcgacgccggggatgcgcacatgctggccgacgtggtgcgcaccgatgcgcaccagctgcgcccggcggccggggacagcccggcggccggggcggtcaaggtgctggcccgcacgcacaagacgctgatctgggagcgggccgcggtgacacagcggctgcgggctcagctgctggagtacttcccggccgcggtgaccgcgttcgacgacctcgacgccccggacaacctggagctgctggccaaggcgcccgacccagcccgcgcgaagaagctgacccgcgcccagatctcggcggtcctcaggcacgccggccgctacaagatcgcggccaggaccgatgccatcctggctgcgctgcgcagcccgcagctgggtcagccgcccgccctgacggccgcctacgccgctaccgtgcggtccctgatcgcggtgatcgccaccctcaacgagcaggtcgccgtcctgcaggggcaggtggaggcacattttggccagcacccggacgctgagatctaccggtcccagcccggcctgggcgcgatcaccggcgcccgggtgctcggcgagttcggcgacgacccgcaccgctatgcctgcgccaaggcccgcaggaactacgcggccaccagcccgatcacccgcgcctccggcaagaagaagatcgtcgcggcccggttcgtgcacaacgaccggctcatcgacgcactgatgatccaggccttcgccgcgctcagggtctcgcccggcgcccgcacgttctatgacggcctgcgcgcccgcgggatcgaacacaacgacgccctgcgccgcctcgccaaccggctcgtcggcatcctgcacggatgccttaagacacgcacccgctacgacgaggccaccgcctggggccaccgggaaaccaccggccaatctcccgtcgccgcttgacatccaaattcctgggatgt

SEQ ID NO: 1363 - DNA, 1665 bp, unidentified
  source 1..1665: mol_type = unassigned DNA; note = element_1b42c6c
  misc_feature 1..2: note = core
  misc_feature 3..300: note = LE
  misc_feature 301..1269: note = CDS
  misc_feature 1270..1665: note = RE
  misc_feature 58..273: note = bridgeRNA
ctggtatattgtaattgacccatctagctggtcatttacaacatacatctcctttctttcaacctttaataaccgtagttgaagacgattttgttaatttgtaaaattgaatatgtgaatgtggatttgtatatttataccctgtagcttgactactttagggaggttcttaccacaccttattccaaaacagtgattagttagatgagtctttgaattcgtattttgaaccaggttttgtggtctaagtgttgtggataaccattttcacaaattttaatcaagaaaggatgtttatttatgaaattagttggtatcgatgttggaaagaacagtcaccacttctgtgttatggacaaagaaactggtgaattcaatgttacaccttcttctttttctaacaacaaagaaggatttgactttctgatcaactctcttaaaccatattctaaaaaatcaattctattaggtatggaagacactgggcattaccatgttgctcttcttaaatttcttcttagcaacggatatacggttgccttgatcaaccctaaaaccactgatctcacacgcaagatggaaggtggcattactaagaatgacaaactggatacaatcaccatttgtgatgtcctcgatactcctgagcgcaagaaacagtatcgtattactaaagttgaccgttttgatttatatgaacaaagacaattgactcgtcatcaccataatctaaaggaagaactcaatatatactgtaatcgactacagaaatcaattgatcttgtttttcctgaattcaataccttattcggttctaaatatggtgttgtttacatgaatcttcttaaaacgtttggcagtgctgaagctatcgcttctacagatattcgtacaattcgtaaatgttttgaaatcaaaggtagaggcggccgcatttcattgactgctgaaaagttaaaagaatgtgctaagaattctatcggaatctcttctgaagttgaaactatacagatcaaacacttggtaagccaaatcatgcttattaaagagcaaatcgctgaaatagataaaaaaatagaagagttctcgatcaaaaacaactctcctatcctaagcattccagggatttctcatttctctggtacttctattttagccgaattaggagatattggcaattattccaagccttctcggatcattaaatttgcaggagtagcccctatcactatgaatcgagtcaatacaacgcccagcacactgccataactaagaaaggatctaaatatcttagaaagactttgtatcaagtcatactgcctgtaattaacaataatcctgtatttaagaaatactatcgattgaagatatctcaaggtaaaggacaccgttgtgctcaaggtcactgcattagaaagctgcttagagtcatttatcatttactagaaacaggacaatcatttgatcctgcattattaagataagacatatgcatctaaagcatctgaacttttaaaaaatcatattttaaaagttcttttcgtcatgcctaaatttaatccaatattcacattttcaaagatcaatttaaaactaactaaaaaatctagttattttgtattttcaaactttttcataaaaaatacttgaattttatatagttag

SEQ ID NO: 1364 - DNA, 1291 bp, unidentified
  source 1..1291: mol_type = unassigned DNA; note = element_1b4da17
  misc_feature 1: note = core
  misc_feature 2..212: note = LE
  misc_feature 213..1184: note = CDS
  misc_feature 1185..1291: note = RE
  misc_feature 34..202: note = bridgeRNA
tcttaagtttgtcttttaataaatttggtacttaatcagaaagaataaaagagagaattaaggttagtatacacggtgaagcttaggacttcgacaacattgataatcctctctcttttctactaaaaatcacgttcagttctgtgagacctagatctcgttttcaagttgttgtgagtcaagtagcttattctttcataaatcattatcttatgaataaatatacagaaacttttggaatagacattagtaaagatgtttttgactgtcatggaagcaatcaaggtcatttacaatttaaaaacacagagaaagggttcattaagtttctaaaaattttaaatgataatactttggttgttatggaagcaacaggatattatcattaccgattagcacaatttttatataagaaaaggcatgttgtatctgtagtaaatcctttatcggtaaagcgttttatccagatgaaattagcgaaagtaaaaacagataaaagtgatgcaaaagctatttgtgaatacggaattattaatgaagttccattgtataatgcactcacagaagttcaaagtgagtgtttacaactgtttcgattattagataattttataaagaaacgtaccgctactaagaacaaattacacggagaagaagtgttaggaattccttcaaattgggtgtatcgttctttgaaaagagatcgtaaacatttagacaaagagattttaggaattcagaccaaactactttctttagtacgacaagaccaacaagcacaattaactttattgcagagtattcccggaataggaataaaaacggctttatttttaatcgtaataaccgatggttttaagaagtttgaaacggcttcacaattatgtagctatgtaggaataacacctaccattagggaatctggaagtagtgtaagagggcgaagtagaattagtaaagtaggaaatagaaagttgcgaacgctcctgtttctgtgttcttttaatgcttgtaaacacaataaaggctgtagggatatttatgagcgaatcataaataaaggaaagagtaagaaattagcattaattgctgtgtctaataagttattaaaacaagcttttgcaattgcgaaatcaggaaatccgtatgacgcaagttttgtttctgtattgaaaattaaatagtaaaacttccataaaaactaaaaaaaaacagtttaaatagctatttaagcttagaatactaatgtgcaaaattaatgaagaaaaaagttgttttttacctcagttct

SEQ ID NO: 1365 - DNA, 1451 bp, unidentified
  source 1..1451: mol_type = unassigned DNA; note = element_1b4e15a
  misc_feature 1..3: note = core
  misc_feature 4..135: note = LE
  misc_feature 136..1158: note = CDS
  misc_feature 1159..1451: note = RE
  misc_feature 1190..1449: note = bridgeRNA
agatggtatggacgcctcccactcttcgggcaggctacggcggacagatgagtgaagtggggcctcgcaatccgacggcatcgatgtgccaaagtgggtagtgctgaaacaacccctgcggaaggaggccccgagatgaaatgtacgacgtacggtgtggatatcgcaaagtcggtgatgcaagtgtattgggtcgatggcgaatcgggagagatcggacagcgtgcgataaagcgctcgcagctttcggcattctttgcccggcgcccggtgggacggatggtgatcgaagcgtgtggcagtggacaccactgggcacggacgctggcagagctggggcacgaggtgcgactgatccatgcccggcacgtgaggccgtacgtgcgtggaaacaagaacgacgtatcggatgcacaggcgatctggagcgcggcgcacgcgccgggactccgctgggtaccgatcaagagcgaggagcagcaggcggtgctgtcgctacaccgcgcacgtgcgcaatgggtgaaggtacgtacacaaaccgtcaatgcactgcgcggcctgctctacgagttcggtgtggtgttgccgggtggcagacgggcaggcgtaaaagcgattggggttcaccgtgctgagattgatgatcagctgccggcgccgatgcgtgagctggtcgatgggcaattacagatgctggcgaatgttgagcagcggatcaaagcgctggaggtgcaattggagcggctcgagggacagatgagcagtgcgcagcgggtgcgccggatacccggggtaggtccgctgggtgccacggcgctggcggcggtactgggtgaggacgggcgcggattccgcaacgggcgcgagttcgcggcctgcctggggttggtgccacggcacgccggcacgggtggaaaggtacgaatcgggcacctgagcaaacggggtgatccctacatccgaacactgctgatgcatggggcacgctcggtgatcttccatgcgaaggaacgaagcccgtggctcgaacaaatgctggcgagacggcctttgaacgtagtggtggccgcactggccaacaagatggcacgcacggcgtgggcgtcggtcgcgcacgatcgtgattatcaggcgggcgggctcgcgtcagcggcctgacccatgggacaactcaaccactgaaggagtggatgctgcaaagagtgcgtaactcgaatcgatgaagtgatggcagacgcggtcggtccgcgggtcggtgaagctggatcgtggttcgagccaggcgcaagccaagctcgccaaaggagatgagccccgaccttgcgaatacccatcagggccagcagccggcatatccggcaatgcataaacaggccggatataagactgcaaccgttttcgcagagtcagggcttcaacgaatcgattggcacacgggaggcgtccatata

SEQ ID NO: 1366 - DNA, 1386 bp, unidentified
  source 1..1386: mol_type = unassigned DNA; note = element_1b50e91
  misc_feature 1..4: note = core
  misc_feature 5..83: note = LE
  misc_feature 84..1115: note = CDS
  misc_feature 1116..1386: note = RE
  misc_feature 1133..1374: note = bridgeRNA
atgatgaggtggacgacgcccgctccggcatcggagtgccataaggtgatcgtttgagggaatcacctaagggggtcgtccacatgcagattagcaccattggcgttgatctcgccaagaacgttttccaggtccatggcgtcgacagtcagggcaagattgtgctcgttcggcaactgcgccgccagcagataatggagttcttcaggaggcttccctcgtgtctcgttggtatggaggcgtgcgcgaccgcccatcactgggctcgcgagctgatgaagctcggccatacggttcgattgattccgccgagctacgtcaaggcctacgtcaagcggtccaagaatgatgcggccgatgctgcagcgatttgcgaggcagtgacgcggccatcgatgcggttcgtccccatcaagactgccgaacagcaagccaccttgaccgtgcatcgcacgcgcgaccttctgatcagccagcgaactcagctgatcaatgcgctacgggcgcatttggccgaactcggctttgtcaccaaccagggccgtgatggtgtgacgaagctcatagcgatcgtgacagcggagaataacctgcaagcgctgccggccatgatgcgggaagccttgcgggtggtcgttgcccacttggcatcattgcagcagcagatcagggagctggagcgctccatccacgcccagcatcgcgcgagcgacgtcagccagcggctcgagagcattcctggcatcggcgtgatcggcgcgacggcgattgcggccaccatcaccgacccgaacgtgttcacatcaggccgagacctcgcagcctggatcggcctggttcctcgacagagctcaaccggcggcaaggaaaggctcggtgggatatccaagcagggagatcgatatctccggcgtctcctggtggtcggagcaacggccgtcgtgcgacacgccaggcgtcatccggacaagcatccctggatcaccaagttactcgccagaaagcccgccaagcttgttgcgatcgccgttgccaacaagacggcgcgcatcgcctgggcgatcatgaacaaaggtggaatttaccggacgccggctcttgcggctgccgcctgaagggctcagcaatgggagtatgaggcagcgttggtgcaaacaatccaattgcgagggtgatgatggcgtgatgtgaagcggtcgatctgtcgatcgggagaacccgcttttgggtcatgggtgtcgagcccgcgcaaatgattgggacccggtccgcggactacatcagggccagcggtcatgaaaccgcgcaaacaggccggacacatgacttgcacccgaccgcgagccgaacgtcagattcctcttgcaatgcgggcgccgtccacac

SEQ ID NO: 1367 - DNA, 1433 bp, unidentified
  source 1..1433: mol_type = unassigned DNA; note = element_1b529da
  misc_feature 1: note = core
  misc_feature 2..62: note = LE
  misc_feature 63..1100: note = CDS
  misc_feature 1101..1433: note = RE
  misc_feature 1211..1427: note = bridgeRNA
tactggcatggtccgccgccttaacctcctcggaggtataaggggagaacaggaggcgtcccatggaaattcacacaatcggtattgatcttggcaagacagtcttttacttggttggtcttaacgcgcgcggcgaagtcgtggtgcgcaagaagtgttcgcgcgatcagattctgcgtttcaccgcgaacctgcaagtgtcattgatcggcatggaagcctgcggaggagcgcactttttggctcgggccctgcgcgaacagggacatgatgcaaggctgatgccggccaagtatgtgaagccctacgtgaagaccaacaagaacgactacatcgatgcggaagctattgcagaagcggtcggtcgtgcgaggatgcgcttcgtgcccatcaagacggacgatcagctcgatctgcagtcccttcaccgggtgcgcgagcgctgggtatcgggtcgtacggcggtgatcaaccagatgcgtggattgctgctggagcgaggcatcacgattcgcaagggacgtcgtcatatcgaagagtctctgcctgggatcctggaagatgccgacaacaagctgtcaggcgcattgcgtatattgctgacacaactgcgactggagatgcaatacctgcagaggcagatcgacgagtgtgacaagttgatcctgcggatcgccgacgagctcgatgactgccgacggatgctttcggtaccgggaatcggaccgatgacagccaccgccacgatcgccgcgattggcaacggatcggcgttcaagaagggtcgaggatttgctgcctggttaggcgtggtgcccggagagcactctaccggtggcaagcaaacactgactggcatcagcaagtgcggaaacaaatatctgcgcaagctcttcatccagggtgctcatgccgtcctgcaacagaggatgaaacaatcgaacggcctcaacacgtggctggctcagctcacctcccgcaagcgcattcaggtggcggcggttgccctggccaacaagatggcacgcatggtctgggcagtactgtcaaagggagaatcctatcgccctcctcttaagattgaaactgccgcagtttgaaacaactggcctgcaattgacgcctggcgaaagacgccaggcttggaaatcgcattcgcgattcccacaattacagaccagcggcggctgatatgaattgttgattcctgccaggtttgctggtgaaccatgagatggtacaacggtcgaacccggcactcttgaaacctgtgatccggaataggcttaaaagcctgccttactaaaaaggacaagagtgcagcgcattccatcaagggccagagcagtagctcacacaaaggccggatacattcgcgcagacctacaatgtcattctcatttttcgcttgcaatgcggcggcggaccataca

SEQ ID NO: 1368 - DNA, 1366 bp, unidentified
  source 1..1366: mol_type = unassigned DNA; note = element_1b6c328
  misc_feature 1..3: note = core
  misc_feature 4..107: note = LE
  misc_feature 108..1118: note = CDS
  misc_feature 1119..1366: note = RE
  misc_feature 1136..1364: note = bridgeRNA
agatggaatggtcgcctcccgccttaacggaccatccggcgccacaaaatcgcgttgtgagcatgcgacattgcgggttcggcagtcctgccgccaaggagaaacagatggaacccacgaccatagccatcgatcttgccaagcgcgttttccagattcacttcgtggatcctgatactggcgcgatccacagcaaggttctcaaacgtgcccaactcgtgccgttcttcgctaaccggccagcgagccgcgtcgtcatggaggcctgtggcagcgcccatcactgggcccgcgttctggcgcgccttggccacgacgtgcggctcatcgcagcccagtttgtgcggccgttcgtgaagtccaacaagaacgatgcagccgatgccgcggcgatctgggaagcggcccagcgtcccggtatgcggtttgtggccgtcaagacggaggatcaacaggcgatgctggcgttgcatcgcatccgccagcaactggtccggatccgtgtcatgcagatcaaccagcttcgcggattgctctatgaattcggcgttgtcctgccgcaaggtcgccgggcatcgatcgaggctgcgaaggtcgcactgggatcactggccgaccagctgcccgccatgctgacacacagtctgcaggaccagctctcgcgacttcgggtgctcgacgagcagatcgcacggattgaacaacgcattctcgactggcggcgcaacgacgatgcatgccgccgcatctcggagattcccggcgtcggtgtgctcaccgcgactgcggcggtgtcggtgatcggacaggcaaagacgttccgctcggggcgagagtttgccgcctatctgggcctggtgccacgacagaacggttctgggggcaaggtgaagcttggcggcatcagcaaacgcggtgacgtgtatttgcgcacgctgctgatccacggtgcccgatccgtcatctcagcggcaaagcatctgccggaacgactgcgtgccctgttgactcgacgtcccacgaacgtcgtcgctgtcgcgctggccaacaagatggcgcgaacgatctgggcactgctggcgtatgggcgaacgtatcaggcagcacccgcgcagtgaccctcacgcgtcaaggcaaataaccatccacggttgcacaggtgaattgaacgatggcaagacaggttggaccgcgcaaaggcaagcctgagacatttctcggatctcgagtccgccaattagattaggacctttgcggcgaaatccatcggggccggcgggcatgcccgcgatcgagtccggatataagtccgcaaccaccctcctcgccacgcacaattgccttgcaaatgggaggcgaccatata

SEQ ID NO: 1369 - DNA, 1596 bp, unidentified
  source 1..1596: mol_type = unassigned DNA; note = element_1b6cbbd
  misc_feature 1..2: note = core
  misc_feature 3..262: note = LE
  misc_feature 263..1465: note = CDS
  misc_feature 1466..1596: note = RE
  misc_feature 14..285: note = bridgeRNA
ttggtactgtataagtgtaggtgtaaaccataaataaagggttatacatttgcacttatttttatttataattaagggagtaattggtctggcggagctctttttggatttctacatccgtcacaaaaactgtcagccatcccttattatagagattcgattaagcaggttgaaaccttatggctttcgtgtaactaaccaaaatgaattgtaataagtgcagatggaatacaattacaataaatcaagttggaggaagcaaatgatgattagcgttggaatagacatatcaaaaggaaaaagtacaatctgtatattaaaaccatatggtgagattattagtatgccatatgaattaacccatacagaaacggaattatctgcattggttaagtgtattttgaattttaatgaagaaactagagttgtcatggaagcgaccggtgcataccatcttccagtacttagttaccttaaagaacatggcatatttgtatctgtgatcaatcctttagttatgaaaaagtatgctgctatggcacttagaaaaggtaaaactgacaaaattgattctattaagatagcaagctacggaattgataattggtttcgcatggttgattatcatgcatcggatgaattgtattcagagttaagagtattaggtagacaatattctcattacatacgtatgcgggtagagagtaaaattgtgcttagtaatatgctagatcgaacaatgccagatattaagagtttattaaaaaatagatcaagtaaacctgataaggataaattaagttcttttgtagaagaatactggcattatgacaacattactagcaaaagtgaaaaacagtttataagaagctatttaaaatgggcaaaaaataatggataccatcaaaatgaggcaaaagcaaaaaaaatatatactttagctcaagaaggtatccccactttatcttccgttacaccatcgaccaaaatgttagtattggaagcagttcgagttctccgagaagtggataaaactctatgtttaattttatcacaaatgcaagaactagcaagtagtttagaagaatataaaattgttagagaaatgcccggagttggagatacactagctccacgtttaattgctgaaattggagatataagacgtttccatagtaaaaaagcattaattgcttatgcgggcattgactctccaccttatgaatcgggagagtttgttggaaacaaacgtcgaatatccaaaagaggttcctcattattgcgaaagactggatatgagattatgaaatgtataaagagcaataagcctcaaaatgatgcaatatatttatatatgataaaaaaagaagcagagggaaaggccaaaaaagtagctaaaattgctgcatttaataaatttctgagaatttactatgctagattaaaagaaatatatatgacctgattcttaaggatttagaagctttctgagctaagcaggatatctggttggcttgtttgcgatgcccctaaaaataaatataaatatttatttttaaaaaacctactaaaaaagtgttgatttttcttagcagg

SEQ ID NO: 1370 - DNA, 1453 bp, unidentified
  source 1..1453: mol_type = unassigned DNA; note = element_1b78105
  misc_feature 1: note = core
  misc_feature 2..231: note = LE
  misc_feature 232..1440: note = CDS
  misc_feature 1441..1453: note = RE
  misc_feature 14..236: note = bridgeRNA
ctacttgtttgattgacggtaggaccggtgcctggccaggctcggtctaggcgtcccggactgtcgctcggattgcggctgtccacgcttcggcgtgtggctcaactttggcctgcgcggtccggggtgccgacagagcgggagaggcttaagaggggtttgctcggctcgaagtagcggtgccctcccggctcgacatccagttggtttgtctcgaggaagggagcagcgatgtccgggagtgatgaccaggtcgtgtcgaggtcgcaggtggtgatcggcatggatccgcataagcggtcggtgacgattgagatgatgaccggcgtcgaggagattgtcggcggcggccggttcggcaccgatggtgctgggttcgccgacctgctgcggtgcgcgcaggagtggcctgaacgggtgtgggcggtcgagggctgcaacgggatcgggcgacacgtggcgacccggctggtcgaggctggtgagcgggtcatcgacgtgccaccgaagctgtcggcgcgggtgcggatcttcgcgaccggtcagggtcgcaagaccgatgcgacggacgcgcactccatcgcgctggtcggggtacgcatgtccgggctggcgccggtggtccgtgacgagcagcgtgaggtgctgcggctgctggtcgaccggcgacgacgcatcggtgaggaacacaccgtcaagacatgtcagttgcattctctgctcttggaactcgtccctggtggggcgaagaaggacctgtccgctgcgcaggcccgggccctgttggcgacggtgcgcccacgtgacctggtcggcaagactcggcgacgggtcgccgccgagctggtcacggacctcgagcggatctatgcgcgcaagaaggacgcggacaaggagcttcggcaggtcctcgacgacgtcggcaccggcctgctcgacctgtacggcatcggaccctccggcgcagccaggctgctggtggaggtcggcgacgtcacccgtttccccgaccgtgggcacttcgcttcctggaccggaaccgcaccgatcgacgcctcctccggcgaccacgtccgacaccgcctgtctcgcaaaggcaaccgccagatcaaccaggtcctgcacatcatggccaccgtccaactgcgccaccgcgacacagaaggacgggcctactacgaccgcaagaccgcggccggcaagacctccggagaagcgatgcgggccctgaaacgtcgcctgtccgacatcgtcttcaccgccctgctcaacgacgcggccaaggccgcagccggtccagcagcgggcccgggaggacactcgggaacgtcaacgaactccagcgtgaccagctcacatcccgacgccggctcttcgaagaagtcacttcccgaacccgccacaacccagcctagaaccaccctccccaccgcgtcttgacacagaggggtgc

SEQ ID NO: 1371 - DNA, 1232 bp, unidentified
  source 1..1232: mol_type = unassigned DNA; note = element_1b7b21d
  misc_feature 1..3: note = core
  misc_feature 4..238: note = LE
  misc_feature 239..1207: note = CDS
  misc_feature 1208..1232: note = RE
  misc_feature 48..215: note = bridgeRNA
catcctgtgtttgcaaaaggaagttctttgaaaattttataaatttatttcaacagaagaaagagaaagataaaagctaaatcttgtcattggtcaattaagactgttcggaatgctagttcctttctctctctgcttttgaacttggacagttcattggtcataaagaccgtatttaggattgataagtctcaagcagatttcttccgtttactttaatttccttaaaaacaaatgtatgaaaaaaagtaacaattatgttggaattgacatctcaaaattaacttttgatgtagctatttctggttctgatgacaagtataagtattttaaatttgctaacaatcatgaaggttttatgatgtttttagaacatttaaaagtatctgaatcaatttgtgttatggaagctagtggtccatattatttaaaattagccacttttttgtcagagcaagcaatagatgtttgtgtgataaatccattggtaattaggaggttttctcaaatgcgaatgagtagagcaaagacagataaaaaagacgctatgcttattgcagaatatggaaaaacagaaaatccaggtatatggaaacctgaagcaaatcatgttctagagcttaagcaaatgcaagcctatctagaacaattaaataaaaacagaactggatttgtagttcaaaaagaagcatttaatcaaaatcctattaagagtgaagcccttgaaaaaagtatcaattctattttagaaaccatagaacaagagatgaaaaacattgaaaaaaaaatggagttaataattaaaacacatcatcaagaaatgtttagtcaactaaaaagtataccaggaatgggaactaaaacatctttgctattgattgtaatatctggaggctttagtaagtttaataatcacaagcaacttgcttcgtatgttggaatatcacccagaatatttgaatcaggaacaagtgttaagggtagatcgaaaatttgtaaaatgggaatgagtaaaattagagctttgctttacatgtgcgcttggtcagcaaaaagatgtaataaaagttgtaaagaattatacgatagattggtagaaaaaggaaaatcgaaaaagcttgccttaattgcagttgtaaacaaactattaaaacaagcttttgcgattgcaacaaaaaaagaatattattcagtgaaaattaactaaaataaatttggaaaaaaacacagtt

SEQ ID NO: 1372 - DNA, 1245 bp, unidentified
  source 1..1245: mol_type = unassigned DNA; note = element_1b7b2de
  misc_feature 1..2: note = core
  misc_feature 3..209: note = LE
  misc_feature 210..1148: note = CDS
  misc_feature 1149..1245: note = RE
  misc_feature 12..191: note = bridgeRNA
cttatctgttcggattctgccagtctgggtgtcgagagccgacgtgggccaccgtgagagcctagatcattgccgatcgtcgtggagacaggtgcccacgtcggtttctcccccgtatcgcccgaacagttgccagtgttgccacgcgtagacgtaaggctgggcaggcgggggagctctcgacccttcaagcctaacggagttcgcctatgaacggcatcgggattgatgtgtgcaaggccatgttggatgtggccgtccatcgcggccctttcgcgcggtttcacaacacaccggcgggccatcgcaagctgctgtcctggctggcgaggcaggaggctggccaggttgtcctggaggcctccggcggttacgaacagcgggtactggatgccttgttcgatgccggtcaccaggtcgtgcgggccaacgcgcaccgctgtcatgccttcgccactgccatcggcctgccggcaaagacagatcgtctggacgccatcaacctggcctgcatggcggccacgctggagctgcgtgcctatcaaccaatggagtcttggcggcgcaagctgcgcgagttcgtgcgcgcgcgccagcagctggtggacccggcaacaagcgcgcaaaaccagttggaacaggtgaccgacacgaccttgcgccgtgtgctgcaggccaatatcacgcagatgaaaaagcactgcgtgcgactggaaaaacacatcgccgaacaggtccgccagcaaccgcagttggaagcgatgcgttcgtttaaaggcgtcggagcgatcctgcaagcggtgatcgccagttatctgccggagctgggcacccttgatggcaaggccattgccaagctggtcggcgtcgctcccatcgcccacgatagcggcaccacgcgcggcatccgcaggatcggcggcgggcggatcgaggtgcgcaacgtgctgtacatggcctgcctgtcggccatccagcacgagccccggatccgggagttttatcggtcgctgcgggcacgcggaaagcccggcaaggtcgccgtcgtggcggcgatgcgcaagatgctggtcatcctcaacgcccgcgccagagatgcgctagccggagaggcccaagccggagaggcccaagccatcccgacctgagtgtcaatgcgctcgatggggccatggctgccgacaggcggccagcaccaccgcgcccggcttgcggagcggcagagccactccaacaacacagttg

SEQ ID NO: 1373 - DNA, 1428 bp, unidentified
  source 1..1428: mol_type = unassigned DNA; note = element_1b84263
  misc_feature 1: note = core
  misc_feature 2..89: note = LE
  misc_feature 90..1142: note = CDS
  misc_feature 1143..1428: note = RE
  misc_feature 1202..1423: note = bridgeRNA
caatgggatggactcctccctcccgaaacggcatctgagtgccagactggaagtgtcagccaccagtcgaaagaagaaaggagtccaccatgaagattatgcgcatcggtcttgatttggccaagaatgttttccaggtctacggcgtggacacgcagggcaagaaggttttgagccgccagttgaagcgccatcagatgcgggagttcttccagaagctctcgccttgtctgatcggcatggaagcctgcgccagtgcgcactactgggcgcggacattggccgcactaggctatgaagtgaaattgattgccccgcagtttgtaaaaccctacgtgaagggcaacaagaacgacgccaacgatgccgaagcgatctgcgaagcggtcagtcggccgaacatgcgctttgtcccggtcaaaaccatcgagcagcaggatattcaggcgctacaccgcatccggtctgagctggtgcgccagcgcactgccaaggtgaaccagatacgcggcttgttgggagaatacggtattaccgtggaacagcgggtaccggctttgcgcaagaaactgccggagatactggaggatgccgagaacggcctgagcgcagaatttcgagtactgctcgatggtctgcgagaagacttggtgaatctggatacgcggattgccagcatggatcaggccctccagaagctggcgcaagaacacgcgggagccaaacgcttgcagcaactgcgcggtattggccccgttaccgccaccgcactgatcgccgccatcggcgatggcagcatgtttaaacgcggacgcgatgccgcagcttggtgtggtctgacaccggcacaacacagcagtggcggcaaagaccgactactgggcatcagcaaacgcggcgatgcctacctgcgcaccttgctgattcacggtgcgcgggcggtgctcaaaaccgccaccggtaaggaagatcgactgagccaatggctgcaaagcttgtgcagccggcgaaacaagaatatcgctgccgtcgcactggccaacaaaacgatgcgaatggcctgggcgctgctgactagcgaacaggattacgatcctgagtttggtatggaaacagaatcggcttgcgccgaacccgcctgagaagtgaccaggcaagcaggccccgtctcagacgggttgatgaacagagcaacagtcttcacgattgcgaagcatgaaacgttgatggcaaacaggtcgaaccggcgcctggaaaaccttacgagaccgatgtgcctttgagcacgctagggcgatcaggaccggacgcgcgaacagcccattatggcccgggcaattgagcccaactcagaggccggatatacgtgtgcagtcgaacctacagtcaaaagcgtgaaatgcttgcaagccgggaggagtccatata

SEQ ID NO: 1374 - DNA, 1363 bp, unidentified
  source 1..1363: mol_type = unassigned DNA; note = element_1ba8093
  misc_feature 1: note = core
  misc_feature 2..63: note = LE
  misc_feature 64..1116: note = CDS
  misc_feature 1117..1363: note = RE
  misc_feature 1131..1357: note = bridgeRNA
taatgggatggtccgccccgcctcttcactgcatagtgcagtaacagacagaaggaggagactatgcctagaacaccccaaccccgagacgccgcggttttcggcatcgatcttggcaagaacattttccacgtggtcagcactgatgcgtcaggagtcgtcgcgcaacgactgaagtttcgaagagataaggttctggcgtttttcgagactgttgcacccgcgctgatcggtatggaagcttgcccaggctcgcagtggctcgcccgcaagcttcaggctatagggcacacagttcggattatgcctacccagttcgtgaagccgtatctcaagaccaacaagtctgacacacttgatgccgaggcgatcgccgaagctgtgaccagaccctccatgcgctttgtgccggtcaagagcgtagatcaggtcgacattcagggcctgcaccggatcagggatcagatgatccgtcaacgcaccgccctcatcaatcagatgcgggctttctgcctggagtatggtgtcgccatgcgccagggtgccggccagttcaaggccgactttccgcgtgtcgtagcggatgaggataacgatctttcaccctcgatgcgccgacttctgtcggatctctttgaagatcttcagcgcctggagctgcgtatcaagacggaaacatccgggatcgaagctctggttgctcgcgacgacgtcgcgcgccgtctcacgacgatccctggcataggcccgctcggcgcaagcgctcttctggcggcggtcggagacggtaggcagttccggcgcgcgcgtgaccttgctgcatggcttgggcttacaccaagagagtactcgaccggaggcaagcagaagctgcttggaatttccaaacgaggtaacacctatgtcaggcgactattgatccatggtgcaagagcctgcctgatccatctcgacaagagccgtcatcggctcggcgactggctggtcagcttgcaaggtagaatgcacatcaacaaggtcgtcgtggccttggcaaacaagatggcgcgcatggcttgggtgatcatcacccgacccggcgcaacataccaacggcagggtccagccttcggctgagatcaatcgccccaacagattgcgaggctcgggaggatgatgacgagacagtcgatcggcacgatgtaaacccggtaaagaaagtgggcgatcagcccgaattgctaatcagggaacgacgtgcgcgaatctcatcatggccggactacaacagcagtccactcacgagaggccggatacatttacgcaaactgttcttcgtcagacgatacccgatatcccttgcaatgacggggcggaccataca

SEQ ID NO: 1375 - DNA, 1480 bp, unidentified
  source 1..1480: mol_type = unassigned DNA; note = element_1bafd5b
  misc_feature 1: note = core
  misc_feature 2..262: note = LE
  misc_feature 263..1465: note = CDS
  misc_feature 1466..1480: note = RE
  misc_feature 10..239: note = bridgeRNA
ccgttatcttcttcgcggtcctgcaagagggccgctggcctccgggcccggcatggctgttgccccctgtcgaacggatgacctggggggtggtgtcaccgggtccgaggggtgccgtcacagacgctgatcagaggtccggccaccgccccgccgagcgcaatgcccggctgcttccgggcggcaggcctgcataacgtggatgcgcgcgaacggcccaacccggtgaggccggcacggcatcgacgcatctgggggcccggtgatcgacatcgatgagacgggtgttttccttggcctggacgtcggcaagagcaaccatcacggccacgggctgaccccggccgggaagaaggtcctcggcaagccgctaccgaacagcgaaccccagctgcgggccgtcttcgacaagctcaaggccgcgttcggcaccgttttggtggtcgtggaccaacccgcttccatcggtgccctgccgctggcggttgcccgcgacgtcggctgccaagtcgcctatctgcccggactcgcgatgcggcggattgccgacctgtacccgggagaggccaagaccgacgcccgcgacgcggccgtgatcgccgatgccgcccgcaccatgccccacaccctgcgcaccctcgacctgaccgacgaggtcaccgcggagctgaccatgctggtcggcttcgaccaggacctcgccggcgaggccaaccgcgcctccaaccgcatccgcggcctgctcacccagttccaccccagccccgaacatgtcctcggcccacgcctcgaccacccagccgtcacctggctcctcgagcgctacggatccccggccgccctacgcaaggccggccgccgcaagctcgtcgaggtcatccgcccgaaggcaccccgcatggcccaacggcttgtcgacgacatcttcgacgccctcgacgaacagaccgtggtggtcccgggcaccggaactctggacgtcatcgtgccgtcgctggccaagtcgctggccgccgtccacgaccaacgccgggccctggaagcccggatcgaggccctgctggaggcccaccctctttccaaggtcctgacctcgatgcccggcatcggcgtcaggaccgccgcagtcctgctgaccaccgtcggcgacggcaccagcttccccagcgccgcccacctggcctcctacgccggcctcgcaccggccaccaagcagtcgaggacctccatccacggcgaacacgctcccaggggcgggaaccgacagctcaaacgcgcgatgttcctatccgcgttcgccgccctccacgatcccgcctcccgcggctactacgaccgctgccgagcccgaggcaaaacccacacccaggccctgctccgcctcgcccgacaccgcatcagcgtcctgttcgccatgctccgcgacggcaccttctacgaaccacggaccccacagcccgcttgacgaaggacatagagg

SEQ ID NO: 1376 - DNA, 1717 bp, unidentified
  source 1..1717: mol_type = unassigned DNA; note = element_1bb6fa9
  misc_feature 1..3: note = core
  misc_feature 4..279: note = LE
  misc_feature 280..1443: note = CDS
  misc_feature 1444..1717: note = RE
  misc_feature 22..245: note = bridgeRNA
cttgtataatatatttaggtttttaaaaaggatttacctataaacctgttatagcattttataccaatttatggtataatttatgttaacactgtggactctttcattctccttgtagctttgactacttttgaaagaatattgccacagttttattattaattggttattagttagatagagcttagactctttatctcatgcaaggttacaagtaataaaactaagtggaccacgtcacaagtgttataaatttatttgcaaaggagctgatcttttatgatctttatcggcattgatattgccaaaaattctcactttgcctctgctgttaactcagatggcgaagttttagttaaacctttttcttttgaaaattcaaaagatggatttaatatttttctaaacaagtttaaggattatcctatagctgaatgttttgtaggtcttgaatctactgggcattatggtgataatcttattaattacttatttcctaaaggatttagaattggaatgattaatgcaattcaaacaaattcattaagaaattccaatattagaaaaactaaaaatgacaaaattgatacttttctaattgctaaatgcttaattttaggagattatactcttgttcaagaaaaagatattaagcttataaaacttagaaccttatgtcgttttagatttgatattatacaatctcaaaccagattaaaaacccaacttacatcttgcttggatttggtttttcctgaactttataactttttcaaaggaaatttgcatttgaatacctcttataaattacttgaaaaatattctacacctaaagagatttctaaagttagaattgatactttatctaaactttttcattctgcctcaagaggaaaatatcgctacgaagatgcagaaagattaaaaggaatagctaaagaaagtattggtattgataacactgctatttctattcaaattaaatttcttattaagcaattggatttacttaaagaacaaattagtgatattgataaaaatataaagaaatttatggatgaactaaattctcctatattaacaattccaggtgtggggtatacaattggtgctattattcttagtgaaattggtaacattaatagatttagtaatcctacaaaattattggcatacgcaggtttagaccctagcgttaaacagtctggaaactttaacgctaaaacaacacgaatctctaaaagaggctctaaacatctacgatatgccatcaatagagcagcattcgttatcgtttacaataacgatgtgttctatgattattatatcactaaacgttcaaaaggtaaatctcattataatgctttaggtcatgtaagcaataaacttgttagagtaattttcaagctattaactgaaaacataccatttaatttaagttaacaaattttcaaagtacatatcgcaacaatactgttgcttgcaactgcttaatcaccttaaatctgaataattaatatatgtcaatacttgatatatatcaatgcattttagtattgacatatatcaattattcagatatgattatccttacagttgcaacggttttagaagtttttaaaaaatatactaaaaacttcttttaagcatgcctattttttgtgcttaaaattttttaaaaaaacttttaattttctattgacaattgatagttagt

SEQ ID NO: 1377 - DNA, 1910 bp, unidentified
  source 1..1910: mol_type = unassigned DNA; note = element_1bb8097
  misc_feature 1..3: note = core
  misc_feature 4..129: note = LE
  misc_feature 130..1413: note = CDS
  misc_feature 1414..1910: note = RE
  misc_feature 1592..1851: note = bridgeRNA
gagcattcctgtaatgaataaaaaacaaagaagaatgaactttgaaaaaataagtacctcctgataaaatacagagtgtaagtttaagaacttacctcgaattatcaaaataaacaggaggtacttaaaatgaagtatacacaaaatgaaaagattttgcaagtaacagaagacacattaattgcgggagtagacatagcaaaagaaagccattatgccagagcatttgactacagaggagtagaatatgggaaatacctaagatttgagaacaatagagaaggtatgacaaaattttttaaatgggcaaaagacttgatggagagacataagaaaaacaaactaatagtagggatagaaccgacagggcaatattggctatgttttgcccaataccttaaagacaataacataaaggtagtattggttaatccattccatgtaaagaggagcaaagaattagatgacaattctcccacaaaaagcgatagaaaagaccccaaaacaatagcaatgctagtaaaagacgggagatatgtagagccgataatacctgaaggagtatatgcagaattaagggtagcgatggacataaaagacaggttgaacaaacaaatagggatgacaaaaaatcaaataacaagatggatagacatatactttccggagtttaacactgtattttcagactgggaagggaaagcagcacttatcacattaaaagaaattccaacacctgagaagatagcagaaaaaagcactggagaaatcctatcgatatggaagaaagaagtacaaagaggggtaggagaaaaaagggctataaagctgatagaaactgctaaggagagcatagggaagaagcagggcataaagatggcagaatacgagataaagactctcattgaacaatacgaatttctcaaaaaacaaattgaagaagtagagaagaagatagaagaattaatagttgagataccaggggttaaagaactactagaaatcaaagggatagggataaatacagtagcgggttttattgcagaagtaggagacattgagaaatatgaacacccaaaacagatacaaaaactaggaggattaaacctagtagagaatagctctggtaagcataaaggagaaacgacaataagtaaaagagggaggaagcgattgaggagagtactatttaatgcagtaatggccttggttgcaaaaaacgaagagtttcgtgaactacacaaatattacactaccagagcgcaaaacccgctaaaaaagaagcaatcactaatagtattgtgcaacaaactgataagggtattttatgtcatattaaagaaaggagtaaaatatgacccaatcaagatgatgaaggacataaagaggccagccttacaggaagctgcataaaaagtactaacatactatcaaatcaattaagggttaattatcttctcttcagctttaacttactcacatctaaaaagctgacccttaataggaaaattaaaagtgtgaacgacgtgacataaaaggtaaagtaaggaataaaacaaaaacaactaatcaagagatgggatattgacaacaagagcgggaattgtcatacaagaataatcaccatacgggcaaagaccctgcaatggagcagaaatgacatccacctcatggcaggtagaacgaaggaattaaggactaagatccagtgagacatgggagggtaaaccccatgagataagtggagctatcccgccataatatggaaataggatataaggtttattaaacttacctatttaatgggtaaataagtaagaaatggtaatataagccatgagatgctcttgttgtgatgagaaatttaaagaaaaactaagatattaagagaaaataaaagataatagagg

SEQ ID NO: 1378 - DNA, 1388 bp, unidentified
  source 1..1388: mol_type = unassigned DNA; note = element_1bc4f08
  misc_feature 1..2: note = core
  misc_feature 3..84: note = LE
  misc_feature 85..1113: note = CDS
  misc_feature 1114..1388: note = RE
  misc_feature 1087..1375: note = bridgeRNA
tgatggcgtggatgccccctcccgacggcatcgcaatgtgccaatgtgatccgcgtgaagcgatcacagaaggagagaacatccatgaccgaagctaccctcatcggtatcgatctggcaaagcgtgttttccagctgcacggggcgcgcggcgacgggtctgtggtattccgcaagaagctttcgcgcactcagcttgcggccttcgtggcgcagcacccaaggtgcgtcatcgccatggaggcctgcgcgacggcgcatggctggggccgcgagttcgagaagctgggacatgaagtccgcctgatcccgccaatctacgtgaagccgtttgtaaagcggcagaaaaacgatgcagcagacgccgaggcgatcactgaggcggcctcgcgtccgacgatgcggttcgtggcagtcaaagacgagatgcaacaggcgcgcgcgatgctgttccggacgcgcgacctgctggtgcgtcagcggacacagacgatcaatgcgttgcgcggtcacctcgcagaacacggcgtggtagcggcgcagggcgccgttcaggtgaaacggctcgcggaagcggtgaacgacgaggcgtctcaactgccgacgatggtcgaggacctcagccgaatctatcttgagcagatcgatgtattgacggtcaggatcactgatctcgacaaacggcttcgcgcggctgccgccgaggcggaaacgacacggcggctgcagtccatgccagggatcggccctgtcacggcggtcgccgtagaaacgtttgcaccgccgatggaagatttccaccgcagtcgggacttcgccgcttggctcgggctcgtgccgcggcaacattccaccggaggaaaggcgcgccttggaaaaacatcaaagatgggacagcgcgacatccgacggttgctcatcatcggcgcaatggcagtgatccaaggggcggcgaaacgcggcgcgcccgaggggtcgtggctggagcgtatgctgaagaagaaaccacggatgctcgtcgcgatcgcgctcgccaacaagatggcgcgcggcctctgggcgatgatgacgaagcggcaggactacaggaatccggcggcgatagcggcctgatcaagcagatcgggaagttgcgttccggtacgtcggcggtgtgaggaggtcaacgaacagtaagggcaaacgatcggcaagatcgggatcggacgaaacagggtcacccaaagagccgacgagctcgcgaatttgatctgtctccgatctgcgtatcgccataccggcccgcggccacgatcagcgccgcaactcgaggcctgacacatgaccgtatccgatcacatgcttgaagcgttcgaaaaataccttgcaccgacgggggcatccacaca

SEQ ID NO: 1379 - DNA, 1156 bp, unidentified
  source 1..1156: mol_type = unassigned DNA; note = element_1bd6e5a
  misc_feature 1..2: note = core
  misc_feature 3..205: note = LE
  misc_feature 206..1144: note = CDS
  misc_feature 1145..1156: note = RE
  misc_feature 36..211: note = bridgeRNA
cttgtcttatgactttctgcgccgctgaggcaaagaaggaccgctgggagagggtggcagccctctcgtcagcggcgagggtcggatcgagaaaccgcagaccggttgatgggtcgagctagagtttgatcgccctcgtcttttcctttggcctggacggatacccgggggacagccccgaatgacaagcagaggcgcggaaaagatgcagaacgataccatcggcgtcgatgtctcgaaagaccatctcgacgcccaccggttggtcgacggcgcaagccggcgcttcgctaacgacaaacgcgggcacaagacgctgatcaaatggctggcgcagacgcctgtgcagcgcgtcgtcttcgaaccgaccggcccttatcaccgagcactggagcgcgcattgggcgccgccggcgttcccttcgccaaggtcaatccgcgccaagcgcgccgctttgccgaggcgacaggcaagctcgccaaaaccgatcgcctcgacgcggcgatgctcgcgcgcatgggcgcgatgctggagctggcgactcgcccggcccgaagcgaggttctgcttgaactcaaagagcttcatcttgctcgcgaagccttggtgaaagatcgcaccgccgccaaaaatcgcgcaaaggcgctgacgctggcgctactgaagcgccacaacgcgcagcgcctcgaacagatcgaacgtcagatcgaaacaattgaagccacaatcacccagatcatcgaagccgacgccgatctggccgttcggttcgctatagtgacgagcattccgggaatcgcgaaggtcaccgccttcgcgttgctcattgaaatgccagaactcggccttctcgaaccaggccaagccgcaagtctggccggccttgcgccgatcgcgagacagtctggacgttggaacggccgcgccttcattcgcggcggccgggccaacgtccgccaagccctctacatgccagcgctcgtcgcgacccgattcaatcccgacttgaaagcgaaatacgaccagctcgtcgccgccggaaagccggcaaaggtagtcctcacagcgatcatgcggaagctgatcgtcctcgccaacgcgcttctccgcgccaatcgaaaatgggcgccaaaacccgcttgatcaaaacggata

SEQ ID NO: 1380 - DNA, 1242 bp, unidentified
  source 1..1242: mol_type = unassigned DNA; note = element_1bd7dbb
  misc_feature 1..3: note = core
  misc_feature 4..211: note = LE
  misc_feature 212..1144: note = CDS
  misc_feature 1145..1242: note = RE
  misc_feature 18..194: note = bridgeRNA
gcttgtgtcttgagacaggattaagctgaaggtgagagggtgagtggcaagctgaatgcccgaagtgcttaaagcacgtgtgggagcccatgctgccactcacttctccgctctggacatgagcccgaacagttgaacgagcccacctcgaacagttacaagcgtgggccaagccagagcgctctcactttgagtgtaagagggtttggctatgttttcctatccagcaggcattgatgtttccaaggacagccttgaggctcgagttaatctgattgacgttggggtaagttgcgctaacgccgaagatgatttccctgggttgattgggtggctattgcttcaccaggtcggtcgcgtgctgttggaggccactggcggttacgagcgcaaagtcatgaaggcgctccaggctgcgggcctcaacgtcatctgcatcaatccccgtcgagccaagagtttttccactgcgatgggccaacaagccaaaaccgacccgatagatgcaaagtcccttgcacagttcgcagcggtactcgactcgccaaacagccgaatcaccagcccgaaacatgacgagttgcgcgcgttagtccaacagcgagaaaactttattcagcagagagacgatgacaaaaggcgcctgaaaacggcctcatgcgacgtagtaaaaccagcgttgcagagtcatatcgactacctgatcaaggctgtgaacgcgatagaccagttgattcgtcaaagcgccaacgtgttagatcgcgaaaaagtcgaacgcctgtgttcagttaaggggatcgggctcgttacggcggctagccttatggcatacctgccggagttgggtgaggttggcaagcgtccgatcgctgccctagcgggcctcgcgccgtataacaacgacagtgggaagcacataggcgcgcgtcacattcgtggcggaaggttttccgcacgtcgctcgctatacatggcctgctgggtcgtcattcgggaccagcctgaattccaggcacgctataaagcactgcgtggcaaaggaaaatgcgcaaaagttgcgctaatcgcatgcatgcgtgttttgttaatccggctgaacgcaatgctgcgtgataggactgaatggaaagaacacgctgcctaaatcggcagcgatgtgtcgttgaaggtcacacggcttgaagctgtgggagtttggctgtctttgaaagcgatggccaagatatggtcatcaagacagtt

SEQ ID NO: 1381 - DNA, 1930 bp, unidentified
  source 1..1930: mol_type = unassigned DNA; note = element_1bd9ec2
  misc_feature 1: note = core
  misc_feature 2..134: note = LE
  misc_feature 135..1424: note = CDS
  misc_feature 1425..1930: note = RE
  misc_feature 1591..1861: note = bridgeRNA
aaggagcttcttgtataattcaaatataaggaattccgagaaagaaggttgagaaaaaaatacctcagagtaaaataagattactgactttggacggttagtaaaaaatcttattaaacagtgaggtacttgaaatgaattataacacacagaacgcaaaaattgcatctattacggaaaagactttaatcgttggtattgatgtgggaagtgaaacccattatgcaagagctttcggctggcgcaattatgagtactcaaagaaaccgtttgccttcagcaacgatgaagctggattttcctcattcaaagactggatggacgatatagcagagaaacatgggatggaagctgtgattccgggaatggaaccaaccggtcactactggctgaaccttggagcgtacctgcaggaacagggaatgaagccggtacatgtgaatccgcatcatgtcaagaagtctaaagaactggatgacaataatccgagtaagaatgaccgtaaagatccaaaaacaattgcaggtctggtaaatgaaggaagattttcatatccatatattccaaccgggatttatgcagaaattagaaatttgtccaaccttcgtattcagacacaggaagagattacaagaatcaaaaacaggatcgcccgctggttcagcatctattttccagagatcaaagacgtttacaggaatccggatgcagtaagcggactgatggtaatcaaacaggcaccattgccctgcgatatcaaagagcttggcgtggatggtgttaataagatatggagagatgcaaggctgaaaggcgctgggataaagagggcaacgaccctggtaaccgcagcggagcacagcatcggaaatacggaagcaccaagaagtgccaggaaagagatccgaaacctgttgaatgactacgaaatatataagaatcgtatggatgaacttatggaagagatagaggaaacactttctgagattgcctatatagataagctgatggagatcaatgggattggaataaaaacggtaagctgctttattgcagaggttggagacattggacgttttgataatccaaagcaggtgcagaaactggcaggatatgctattgtcgcagacagctccggaaagcataatggagaaagtcgtatcagccacaggggaagaaagcgtttgagatatgcgctgtatgaagctgcgatatcggtgattgggaaaaataaagaatttaaagagatccattgttattacaggacgagggaaaagaatcccctgaagaagatgcagtcggtgatagcggtggcatgtaaactgatccggatattttatacaatactaacaaaaggcatagagtatgacggtcagaagatgttaagtgacattgtaagacctaaaatgcagccagcagcataaagagaaagaaacagtgaatcatggccggtctgagcctttgaaaggaaagaatggaaggctgaggccagccatgatagctggaagaaacaagtaaatggaatgtaacaggaaaacgtccaccgagaggtgctgttgcaggaaaaagtcagtaataaaaaaacaaagaatggagccagtagtcggcaggaatattcaccagagggcatgaccctgtaaaggagctgagctgacaccctggttatggacaggcgggacgagagaagttaggactcagcaatggtctgatgatcctggtagacatgggaggttcgctgccgtagatggatgggtacacacaaggccatgtagaacgaaaagagaagacgttttattttgtgcacccaaaatccactactttcgtaccagatacagagaaatgtccattccaatggttctttcttctgagatatttattgatgaaacattaaaaaatccttgattttcaaggaaaaaagacttgactatat

SEQ ID NO: 1382 - DNA, 1579 bp, unidentified
  source 1..1579: mol_type = unassigned DNA; note = element_1be0fb5
  misc_feature 1..2: note = core
  misc_feature 3..288: note = LE
  misc_feature 289..1467: note = CDS
  misc_feature 1468..1579: note = RE
  misc_feature 10..268: note = bridgeRNA
gtataatgtatttaggttgttcaagggatacctataaacccttagacctatttctttacatctccagtctgataggagataattgttttattagattgagaggatgatcgtttgctccttgggcgcttctgctcgtacttgaaagactgatccctctctctaataagcattccgcgtatgagttggatgttggttgccttttggcttctctccgtatttagcacaaggtagtggcgcttattagatgagtggtctcccaatctgaaatctttctgttgaggtatttttatgctctttgttggtattgatattggtaaaaataatcatgttgcctctatgatggatgaaaagggaaaagttgtttttaaggcattctcgttctccaatacaactgatggtggaaatgctctgttttccaaactttcctctttttcttctgatccttccgattttgaaattggcatggaagctacaggccactactggctctctgtttactcattcctctttgaaaaaagtttccttctccatgtcattaatcccatccaaactgatggctggcgtaaaggtacggaaattcgcaagcggaaaaacgatacgattgattcggttcttatcgctgacctgatccggtatggacaatttgtggaaactcgtcttgcagatgaagatttgttctctctgcgtactctgacccgtttccgaacctatctggtggaatctatcagtgatttaaaacgaaaggtagtctgtatactggatcaggtctttcctgagtatcaatccattttttccaacatttttggcagaacctcaaaagaaatcctccttcagtttccttcgccaatcgattttgaaaacatttcatccgaaactctggcaaaactgcttgcacaactcagcaggcagaaagttggtgccacaaaagccgaacagttgaaggcagctgcttcttcttcctttggaattacctttgcccaaaatagctttacttttcagctaaaagcactgattgaacagatctcttttattgaaaaccaagtgaaagaaacagaaactgaaatctcccgcatcatggaaaaattgaagtcccctattaccacgattaccggtattggcaacgtcaccggagctgccattatcagtgaaattggtgatatttcaaagtttgacagtccaaggaaactggtagcatttgcaggtattgatgcttctgtaacacaatccggcgaatttgaagccacccacaatgtgatgagcaagcgcggttcaccgtatctcagaaaagcgatttttcagtctgccctgattgcttccttcaaagatcccgtgctaagtgcctattatcagaaaaaaaggagtgaaggaaagcatcatttaacttgtgttggagctgtttccagaaaaatgtgcaacatcatctatgctgttctaaaaaacaacgagccttacgttccaaaagcgtaactccttatatctctgttctggcttgcatgaaagcaggcctcattgttgtactctttttaccagaaaatatcgttttacttttttcaattatctacttgacttttaatagttg

SEQ ID NO: 1383 - DNA, 1382 bp, unidentified
  source 1..1382: mol_type = unassigned DNA; note = element_1be82b1
  misc_feature 1..2: note = core
  misc_feature 3..75: note = LE
  misc_feature 76..1116: note = CDS
  misc_feature 1117..1382: note = RE
  misc_feature 1148..1372: note = bridgeRNA
tgatgctgtggacggcgctccaccgagcgtcgccagccgaggtaaggttggcttccgctatcaggaggaagtcggatgcagcagcgtgtggtcaccgtcggggtcgatctggcgaagaacgtcttcgcggttcatggagtcgatgagcaaggtaaggtcgtctttcggaagagcctcaggcgcccgaaggtcgaagcattcttcgcaaagcttccgccctgtctgatcgggatggaggcctgtgccacggcccaccactggtctcgcgttctcaccgaactcggccacgaagtgaagctgatgccgcccgcttatgtgaagccctacgtgaagtcgcagaagaacgatgcgacggatgcagaagcaatctgcgaagcggtgacccgtccaacgatgcggttcgtcacgccgaagtcggtcgaacagcaaggcgttctcactctgcaccgtacacgcacgatgatcatgacccaccgaacgaggctggtgaacacggtcagagcccaccttgcggagttcggcatcatcgcgccgattggtcggctcggcttcgagcagctcgcggccatagtggcggaccatgaggatgaccgcattccggggccggttcgggactgcctggtgatgctgatcatccagttcgatcaggtgaaccagcagatcctcgatctcgatcgccagatcaaccgctggcatcgcgatagcgagctcagcaagaggctcgcgacaatcccaggcgtcgggcctctttcggcaaccgcactggtcgcgacgattggcgacgggaaggccttcagctctggtcgaagcctgtccgccttcatggggctggtaccgaagcagcgatcttccggaggcaaagagcgtctcggtggcatctcgaagcgtggcgatcgataccttagaggcttactcgtcaccggagctctcgccgtgatccggtacgctcagcgccacggtacgcgccgaccatggctcgtcaggttgcttgagcgccgatcgacgaagatcgctgccgtagccctcgccaacaagatcgcgaggatggtctgggcactgatgacgaagggcggaacctacaaggacccggtacctaccgtaccggccgccgcttaaacgagatcgcgtctcttcgcggagacgccaacgaggttggagagagcatcttcgcagtcatgcggaaccggtcgaaaccgggaaagagaaaaacccattctatccagggcgcctcgagcgcgtgcttttgatcgggatctcattcgcggaaagcatgaaggccagcggtgttcgcgccgcatcaacaggccgaacacatggccgctatcgaccaacatccgctacgacgcctgaagaaaactcttgccaacagcgccgtccacaca

SEQ ID NO: 1384 - DNA, 1464 bp, unidentified
  source 1..1464: mol_type = unassigned DNA; note = element_1be89bd
  misc_feature 1..2: note = core
  misc_feature 3..138: note = LE
  misc_feature 139..1209: note = CDS
  misc_feature 1210..1464: note = RE
gaggtggcatgaaagagaccgcgtccgctgagagaacggatcactgagatgcaggtgatgattgagggacagccacgcttccagcctttcggcttatcctgttggggttttggagatctcaacacgggagttggaagcatgactgcgtcctatgattaccatatcggggtcgactaccacaaatcctacagccatctggtggtgcaagattcaggcggcaagacgctcagatccggccgggtgaagaacgatcgccagtcgctcggcagctttctcgagcggtaccgcgaaaacagccatgcggttgtcgaggcgacgcgcaactggatggtgatctacgactggctcgacgacatttgtgatgatgtcgttctcgcccacccgttgaaggtcaaggcgatcgccgacgccaagatcaagaccgacaagatcgatgcgaccgtgctggcgcatttgctgcgcgccgacctggtgccggaagcctgggcgccaagcgagcggtcgcgggacctgcgtgtcgccctgcgggagcggatgttctacgtgcggctgcgcacgatgacgaagaaccgcatcgtcacggtgtttgatcgctatccggagcagacggcgcaactgaagacgctcggcgatctgtttggtaaggccggccgcattcagctttcgcaggtcaacgtctctgagatcgaccgcatccagatcgaccgtggcctcgctttcattggcgccatcaatgagcggatcaagcagtcggaagcgacgatccgggcgatgaccaaggccaatcccaacgtgaggctgttgaagacgatccccggcatcggcgagttcttcgcccgtctgatcgacgcggagatcgatgacatagcgcggttccgcaacccgaagaagctggccgcctatgccgggctggtgccctcgacctattcgagcggcggcaagacctatcacggcaagaccatcaagcagggcaacaagtggctgcgctgggcttttgtcgaagcggtcaccccggcgatcgccagcgatccacagcttcgcgcccaatatgagcacctgaagatcagaggaaccaacaaggcgcgtgtggcgatggcgcgcaagcttttgacgatcgccttccagatcctgcgcgaccagcgcgcttacgagccgcgcggcgaaagcatcatcacggaaggcgcgtcaatgaaatcccgactgtcctgatgactttctagcgagcctagcagtgccgggctgcgctcctcaaggagaatgggaagccgggagccgaacgccactctgtgaccgaagccaaggcatcaggtcacgcattggagaatggttcagaaccgaaggacggccctgtccagcggaacgaagaccattgagccgatcggcaaaaaggccggtcagaacaaaaccgaacccaaggaaagccgccaactcaaggcgttctgccccttgcgttctttcattgga

SEQ ID NO: 1385 - DNA, 1345 bp, unidentified
  source 1..1345: mol_type = unassigned DNA; note = element_1bf3f29
  misc_feature 1: note = core
  misc_feature 2..103: note = LE
  misc_feature 104..1108: note = CDS
  misc_feature 1109..1345: note = RE
  misc_feature 1129..1340: note = bridgeRNA
gaatgaaagggacttcccctgctccgagcgggtgatagcccgcacggcatcggagtgccaagattgagtttcgcatcttcaatctaaaaggagaggggaagtcatggataaggttactacgataggcattgatttggcaaaacgggtatttgcgctgcatggggtagacgcggctggacgggtagtgctgaggaagacggtgcggcgcgagcagttcgtggagacggtggcgaagctcccgccctgcctcatcggcatggaggcctgctccgggtcgcacgaatgggcgcggcggtttcaggggctggggcatacggtgcggctgatggccccggtgttcgtggctccctataggaagagcggcaagaacgacggcaacgacgccgaagcgatctgcgaggcggtgagccggccgaacatgcgctttgtgccggtcaagagcgccgagcagcaggcattgcttgccctgcaccgggtgcgccagggcttcatcgaggagcgcacggcaaccatcaaccggctgcgcgcggtgctcaccgagttcggcgtggtgctcccgaaccgcacgcagtgggtacgccgcggtgcgttggcggcggctgaagcgttgcccgtgctcgcgcgccaggcgattgaggatctgcgcgcgcatctgacacagctcgatgagcgcatcggcgcctacgacaggcaaatcgaacaacaggctgggcaaagcgaagcggccaagcgcctgatgcagattcgcggcatcgggccgctcaccgccgtggcgatcgtggccaccgtgggaaacgcgcgcgacttcgagagcggccgccagttcgctgcctggctcggcttggtgccgcgccagaactcctcgggcggcaaggctcgcctgggccacatcagccggcgtggagatgcgtacctgcgcatgctgctcgtgcagggcgcccgctcggtgctcaacaccgccgcacggcataccgatcgtctgtcgctctgggcgctgtcgctgcaggcgcgccgcggtatgcacaaggcgctggtgggcatcgccgccaagaatgcgcgcatcgcctgggcgctgctcagcaaagagcagacgctgcgcacggtttgattgatttttagaaggggcacttccagagaagactgcaatcgttgatgacgaacaggtcagaccggcgcccggacactccggtcacctcggcggcaagaacttctgccgactaacgtatgggaaccgggcgtgcggctttcatcagggccagagctcaagagctcgcaaacaggccggttatagtgacgcagtcaggccttttgaaatcagccttgcagttccggggaagtccttata

SEQ ID NO: 1386 - DNA, 1709 bp, unidentified
  source 1..1709: mol_type = unassigned DNA; note = element_1bf7310
  misc_feature 1..3: note = core
  misc_feature 4..248: note = LE
  misc_feature 249..1463: note = CDS
  misc_feature 1464..1709: note = RE
cttatacagtaaactaagaacaagccctctcgacacagggctggaacaagggtacacttgttcaagataactgttgaacgcgccagggaaagtctaccagctccacacggctcgaccgattcagaaagctcgcacttccctggccccgttcctgagcgagaccgatcatgagagagtcgcgcttcgagcgccacagtataagggcacgcgtgcggaggcaaccatttgtacagagaggagcgtttctgatgtggtatgccggtattgactgggccaacgaccatcatgacgccctggtcattgatgaccagggccgtcaggtcggctcgctgcgtgtcgatcacaccccgcaaggaatgaccagactgaacaccttcttggagcagatcgttggtgcggagtcgaaagaccagatggcctgcatcatcgagacgacccatgggttgttgattgctcacctgttggaagcaggctggcccgtctaccccgtgaatcctcgcaccgtggatcgtcggcgatccgcatcgggtgccaagaccgacacgattgatgcctacttgctggccaagaccggacgagcggacctggccgatttgcaccgcctcaccccagacagcgagaagattgccgaactcaaactgctcacgcgcgatcaagatgccttgatccggatgcagacgcgcctggtcaatcagctcaccgcctgcctcaaggcgtattatccggtggccctggaattgtttacgaaactgccacaaaagagcaccttgcggttcttgcaaacctatcccaccccccaggcagcgatggcagtttcggccgaacagatccagcaagtcctcagacaagccaagcattccaatccgactgccgtggctgcgacgatcttcgagcggctgcatcagccccatttgcaggccgatgccgtgatcactcggagcaaatcgcgcttgatgctggcactggtgagtcaactgttgccgctgatcgagcaaattgctcagtacgagaaggagattaagaccctttttttgacccatgaggaccatgaaatctttgcgagcttgccgcgtgcaggcaaacggctggctccgcgactgctggcggaaatcggggatgatcgcacgcgctatcaggatgccagcagtctgcaagctctgggaggaacctcgcccgtgctgtttcaaagcgggatgtactccaaggcgcatcgacgtctgggctgcatcaaaccgttgcgcaatgcgctgcaccaatttgcctggcagagcacgcaaagcgagccgtgggccaggcaggattaccaacgcaagcgtgcggaaggcaaaagccatacggtagccgtgcgagcactggccaatgtgtgggtcaggatcatctttgccatgtggctgcatcaccaatgctatgagacggccacctttgagcaagcacaacagcagcatgcacgccgagcggcttagcgaccccagctcgtgctgatcacgctcaacaagagccaaaacccctgcatttttttggctttcaactgcgcatgcccatttcagaccacgccactcacgcctgtcaaggaaagcgaagcggcttgacaggcgtgagtggcgtggtacactgcctcatgctcagttgaagacatttctccacccctcttttcttctgattttttctcttgctccaaattgatcctcaaaaggcttgacatagagagt

SEQ ID NO: 1387 - DNA, 1599 bp, unidentified
  source 1..1599: mol_type = unassigned DNA; note = element_1bfc2cf
  misc_feature 1..5: note = core
  misc_feature 6..259: note = LE
  misc_feature 260..1447: note = CDS
  misc_feature 1448..1599: note = RE
  misc_feature 9..240: note = bridgeRNA
ctcctaatattatattatcgcaagacataacagtttattgaactagaacaacatgcgataatgaaaccatgctaggtgagtgtcgccgtaaatttccttggggttaaacctcgtaaaggagagtggtgcctcacctcttgtggcagtttacgaatgagctggatgttgagaccttacggtctactccgtttgtccaaggaggttgtgagttgcaagagtgtgaggaatgcacctgcaaattaatcgctggaggtgccatatgttctatcttggtatcgatgtaggaaaaaacaatcatgaagccggattcatccgcgaggatggttcccatgtcggtaaatctctgcggttcccaaacagtcaggatggctttgatgcattaagtgcattcatcatcagccgtctgcctgaaaatgagtctttctgtatcggtatggaagctacaggtcattactggcttgctctgtattcgtttctgcatgctcagggtatggttgttcatgtaattaatccgattcagtctgacagtcttagaaacttccatatccgtcagcagaagactgatgctgttgactgcttccttgtagctgaggtcatacgtttcggaaaatttaccgaaacacatttagctgacgaggacatccttattctccgtaatcttgccagattcagggaatccctaaaagacacctgtgccaattttaagcgtcaggtagtgaccatactggatcaggtttttcccgagtatgacaatctattctccaatatgttcggtcagagttcaaaggcttttctgaagacctatgggacacctgatcagactatcgatcttaataccaggtcactagctactctgcttcgcaaggccagccgtggtcgtcatagcacagataaggcaagagaaatcaaagctgctgctgccaaatccgtagggctgacactttgcagtgacgcttttgcttttcagctgagaattctcattgaacaaattgagtttacggaaaaacagctggatgagatcgaaaagaaaatcgcacagcagctgaagaaaatcaactccgttatcctgacaatcccaggagtaggcccaactaccggggccatcatcctgggagaaatcggtaatatttcccgtttctccaaccctaaaaaactagtagcttatgcagggatagatcctaccatgtaccagtccggcaacttcaacggtcagcacaacaggctttccaaaaaaggatcaccctatctcagacgtgccgtctggatgtcagctctaatcgcatatcgatttgaccccgtatttagggcctactacgagaagaaaagagcagaagggaaatcccatggcaccgcattaggagcggtctcaagaaagcttctctacaccatatatgcggtgctcaaggagaataaaccttatgtggttcagctggacacgatacagtaaccagatttgatttatagcccgtttccatacgggcttattaggcatgctcttctagttcaatattctgttgtcaaatagcgattccttacttggtcttaagcagattagccatgaaatattttagattttactcttgacatttaatagctggt

SEQ ID NO: 1388 - DNA, 1454 bp, unidentified
  source 1..1454: mol_type = unassigned DNA; note = element_1c01ac9
  misc_feature 1..3: note = core
  misc_feature 4..143: note = LE
  misc_feature 144..1439: note = CDS
  misc_feature 1440..1454: note = RE
tccctaagtttgtggctgtctggggttggtgccctggatgcccaggacggtggggtgtggctgatgattgcttgccgctgttgtggctcccgaggaatggctgccccgccgtgctggacgctccggccacttattgagatctgatgcggttcgtgctggttagggacctgatggcggggttgtccacgggcttcggcggcgtgaacgggagtgtgagagtggttcggcgtcaacggctctggatcgggatcgatgtcggcaaggccaaccatcacgtgtgcgtggtcgacgagaacgccaaggtgtgctggtcgggcaaactcgccaacgaccagcgggcgatcgaggcggtgatcgaccgcgcccgcaacaccgggatcgagttgcggtgggcgatcgatctgaccagcccctttgccgcgctgctgatcacggtgctgctgagcgccggcgagtcggtggtctacgtgcccggccgcatggtggccaccatgaccggcgtcttccgcggtgagggcaaaaccgacgccaaggacgcccgtgtcatcgccgacaccgcccgcatgcgcaacgatctgacgccggtgaccgcgcccgacgagctgatcgccgagctgacccagctggcgagctaccgcgccgacctcatggccgactgggtgcgcggggtcaaccagctgcgcgccaagctggcctcgatctttcccgcgttggaggccgcgttcgactactcggcgcgttcgccgctgatcctggtcgccggattgtgcaccccggcagagattcgtgacgccggaatcagcggtgtcgcaacatatctcaccgagaacgacgcatggcgcaaaggcattgccaccatggccacggcgggggtggccgccgcggaaactcaagatatcgccgtgcccggcgaggccaccaccgccacactgatcaagcggctcgcggccaaactgctcgatctcgatcgcgagatcaaggacctcgacaagcacatcgccacccgcttccgcacccacccgcaggcggcgatcatcgagtcgctgcccggcatgggcccgcacctgggcaccgacttcctcgtgagcaccggcggcgacgcgctggccgagttcaccaccccgggtcggctggcctcctacgccgggctcgtgccggtgccccgcgattccggccggatcagcggcaatctgcaccggcccgaacgctacaaccgcagactgcggcgcgtgttcttcatggccgccctgtcctcgatccgcaacgagggaccctcgcgaacgttctaccaacgcaaacgcaccgaacgactcattcatacccaggccctcctagcgctggcccggcgcctggtcgatgtgctgtgggccctgctgcgtgacaaccgcgccttcgacaccaagcccccaagcgtcaccggagtcccggccgcggcttgacatcgtcattgagat

SEQ ID NO: 1389 - DNA, 1504 bp, unidentified
  source 1..1504: mol_type = unassigned DNA; note = element_1c0c7fd
  misc_feature 1..2: note = core
  misc_feature 3..244: note = LE
  misc_feature 245..1483: note = CDS
  misc_feature 1484..1504: note = RE
  misc_feature 6..241: note = bridgeRNA
ctaatgggttttagccgggcttctggcaggctcggttctgtagcggctggcgggtcagcacttcactcatctgaccgttgttgaggtctcgcggcagaccgtgcgcccgctggtcgtggggaggcagtaccgctactgggatgtcgtgcccccttggtcggaccggggtgagcactcgcgccgttagatcgctggcagtcctcctccgcgctgctgagtgttccatctgagaggaggcggtcaggtgttgttcgtgggtgatgactgggctgaggagcatcacgacatcgaagtccaggatgaggctggcacggttttggccaagaagaggctgcccgagggattgagtgggatggtcgcgttccacgaactgctcggtagctacgtgccagcgagttgggcggatctggaccccgccgaggccgccgcggaggtggtgatcggaatcgagaccgaccgtgggccgtgggtggcagggttggtagcggctggctatcaggtgttcgcgatcaacccgacctcggcgtccaggtatcggcagcggcactcgatgtcgggcgccaaggccgatgccaccgacgcgcacctcctcgccgagattgtccgggtcgaccgggcgcatcaccggccggtcgccggcgacagccctgacgcgcaggcggtcaaggtggtggcccggatgcaccagtcgctgatctgggaccgcacgcggcacctgctcaggttgcgttctgcgttgcgggagtactttcctgccgcgatccgggtcttcgacgaccttgatgccccagaggcgttggagctgcttgcggccgcgccggcccccgatgcggcggcgaagctcaccaagacgcggatcgcggcagcgctcaagcgtgctcaccgccgcaacatcgacgagcgggcgatggcgatcctccaggtgctgcggtcaccggagctccggctaccggggccggtgcaacaggcttacgcggccgggatagccagccaggtcgccgtcctgggcgtgttgaaccagcagatcgaccagctgagcgtggtggtgggcgaccattttggccgtcaccgtgacgctgagatctacaccagcctgcccgggttaggtgtggtcctggcggcccgggtgctgggcgaatttggcgacgacacggacaggtatgtcgacgcgaaggggcgcaaggcctatgccgggacggccccgatcaccagagcctcgggcaagaagaaggtcgtccttgcccgctatgcccgcaacgaccgcttggctgatgcccttcagcagtgggcgttcggatcgatgcgcggctcggcgggcgcgaaggcgtactacaaggcgctgcgggcccggaagatcggccaccaggcagcacttcgccagctcgggaaccggtgggtcggcatccttcacggctgcctcaagaccggacagacctacgacgaacacctggcttgggggcacatccacgccgccgcctcttgacaccaccggaacctgggatgt

SEQ ID NO: 1390 - DNA, 1379 bp, unidentified
  source 1..1379: mol_type = unassigned DNA; note = element_1c127d5
  misc_feature 1: note = core
  misc_feature 2..93: note = LE
  misc_feature 94..1137: note = CDS
  misc_feature 1138..1379: note = RE
  misc_feature 1156..1374: note = bridgeRNA
caatgggatggactcctccccacccgctaatcggcatcgagtgccagactggagatgtgttgtaaccagtcgaggagtgaggaggaatccgagatggagattaagcgcgtcggtgtggacttggcaaagaacgtatttcaagtgcacggcgtgaacgtgcacgagaagccggtatggaagcgcagcttgcgtcgagggcagtggttgcaggagctgcagcggcgtgtagcgccaggaggagccgagatcgggatggaagcatgcgctggagcgcatcactggggtcggcggttagaagcgcttgggtatcgagtgaagctaatagcgccgcaatttgtgaagccgtacgtgaagagcaacaagagcgatcgaaacgatgccgaggcgatctgcgaagcgatgagtcggccgtcgatgcggttcgtcgaggtgaagagtgtcgagcaacaagatatccaagccgtgcatcgagtgcgcgctgagctcgtcaagcagcgcacggccaaggtgaatcagatccgcggcttggtcggggagtatgggctggtggcaccgcagggcgtatcgcaggtacgcaaggcgctgccgcagtggcttgaggatgcgagcaacggactgagcgatcggttccgacgcttgttgtcgggcttggcagaagatctccgcggcctcgagggacgaatcgaagagctggacgagcagatcgaagcgatcgttcaagagacgcccgcggcgcggcggttgcttgctttacgtggtgtcggtcccacgacggcgacggcactggtggcggcgctgggttgtggccgatcgtttactcgagggcgcgagttcgcggtcgcgatggggttgacgcccaaacatcatggcaccgggggcaaagagcgcatcttgggtatcagcaaacgaggcgacgcgtacttgcgccagctgttggtgcatggggcacgttcggcggttcgcgccgcgcgcggcaaagacgatccgctgagtcgctggatccgagggttgctcgtgcataagcacagtaacgtcgtgacggtcgcgctagcgaacaagaccgcgcgaatggcgtgggcgttgatccgccatgacgtcgactacgacgcggagttggcggctcatcccagctgttagtgctgcgacacacttacctacgattgcagaggagtctgattgacggcaaacaggtcgaaccggcgttggcaaaacccgacctccgcggcgagcaacaagctcttccctccgctagggagccaacgcgcgaatagcccatcatggtcccgtgccttcggcacgacactaaagaccggatacacgtgagcaatcgaacctgcagcccaacatcagatccttgcaaacggggaggagtccataca

SEQ ID NO: 1391 - DNA, 1368 bp, unidentified
  source 1..1368: mol_type = unassigned DNA; note = element_1c1399a
  misc_feature 1..2: note = core
  misc_feature 3..75: note = LE
  misc_feature 76..1110: note = CDS
  misc_feature 1111..1368: note = RE
  misc_feature 1083..1356: note = bridgeRNA
tgatggggtggacgccccccggcggcatcggtgtgccaaagtggaggtgttgaacaccacttgaaggaggcgtccatgtcagaagttaccacaatcgggttggatatcgctaagactgttttccatgcgcatggcgcggatgggatgggccggatggttttcagccgcaggctcacgcgggccaagctgctcgacttcttcgcggcgcagccagcgtgcacgattgcgctggaagcatgcggcggggctcatcactgggctcggcaactgacccatttgggtcatgacgtgcggctgataccgccggcatatgtgaagccgttcgtgaaacggcagaagaacgatgcggtcgatgccgaggcgatctgcgaagccgcgcaacggccggggatgcgcttcgtggcgatcaagaccgaggagcagcaggccgccggcatggtgttccgcacccgcgatctactggttcgccagcgcacgcagctcatcaatgcgctgcgcggtcatctgacggaatatggctgggccgcgccccgcggccgggcgcaggtgctgatgctggccgatctgctcgacgaggaggaaatggcatcgtccctgcccgaagcagcgcgcgccatgttcaaggtgatggtcgatcatctctaccggctcgatgcgcagatcgccgatctcgaccgcgagatcgagcgccgggcgaaggcagacgaggcggcccgcaggctgatgactatccccggcatcggcccgatcgcggcgacggcgatcctcgcgttggcaccgccgatcgagaccttcgccaagggccgcgacttcgccgcatggcttggtctgacaccgcggcagcactcgacgggcggcaagcagcggctcggatcgatctcgaagatgggtgaacgaaccataaggcggctgctgatcatcggcggaagttcggtcgttcggcaggcatcgcgcaggggtgcgccggcaggttcgtggctcgaaggcatgttagcgagaaaaccgcggatgctggtctcggtggcgctcgccaacaagatggcgcgcacggtctgggcgctgctcaccaagaaggaagattacagggctccggcaccggtcgcggcgtaaagccgggactggcgtcagaggtcgccgggaggcgtaggcggtcgaaggagagtatggcaaaaacggtcggcgagaccgggtcggaaaaccagggtatggcagagcgccttacgagcgcgcaaagctgatatggatccgatccgcgaactcccatacgggcccgcagcaaggcgctgcaccaagaggccggacagatggcagcacccgactacgccaatactcgatttaaccccttgcttctttgggggcgtccacaga

SEQ ID NO: 1392 - DNA, 1578 bp, unidentified
  source 1..1578: mol_type = unassigned DNA; note = element_1c18a13
  misc_feature 1..2: note = core
  misc_feature 3..245: note = LE
  misc_feature 246..1448: note = CDS
  misc_feature 1449..1578: note = RE
  misc_feature 7..223: note = bridgeRNA
ttcgtattatatggttagccagaaatttctggttgacctattttttataggtaatatgattacagtagccagggtagaacgtaactgccagtgggaccaggatcccgtcgacaaaactgttctccctctacttatagaaacatgtttgaggctggttgggacttgatcccgaataacaagcgaagctatgaaactataagaagagatagaggttactggtaaataagagttaaggagagatgttaatgaatccagtagttggtctggatgtttcaaaaggagaaagcgaagtacaagcctttttaaataagagtattccttacggaaaaagcttcaaaatttatcacacaagcgaaggtttaactttctttctacaatttttaaaggatttagaaaacaagacattagttaaacctactatcattctagaagccacagtacattatcaagcacctgtcattcaattcttagagaaatacaattacttgtatattatgattaatcctttagtgtcccatcagtctaaaaaaacaagcttaagaaaagtaaaaactgatgccatggatgcctataatctttgtcaattgttttataaagaagaattagagccctataaaaaacgaggaattaatctcttaaacctacgccatttaacgagacaacatgaggcgataactggtctatatatccaagcaaagctacaatttcacaccatgttagatcaagtttttcctgaatatagacgcgtatttggtgatttattttctaaagtatctttaaatctattaaatgtatatcctacttctgaaaaggttttaaaagaatgtgaagttaatttagctgagaagatccgttcactatgtaaaacacgttcttaccaatgggcattaaaaaaagcagctaaattgaaagaagctgccatgaataatccttttgataaaattatttatcaaagtcatttaatcagtctaaatatgtttattcaaatgcttcttcaataccaagagcacctatctatcttagaggaacaaatagctactctcactaaagatatcgaagaatataagataatccagtctattccaggtatcggagaaaaaatcggtgcaacgatactctctgaaattggtgaaatagaacggtttaatcatcccaaaaaattagtagccttcgctggagttgatcctagtgtatttcagtctggtaagttcaatgccacaataaatcgtattaccaaaagaggttcaactaggctccgtcacgttctatatatggcagtcctttgtggaattaggagttccagaaataaacgattaaaagaattttatgatagaaaacgtgtggaaggtaaacccgcaaaagtagcaataattgcttgtgtaaataaattattacattggatatatactcttttaaaaaggaaagaaacattccttgatctaaactaaatgccaaaattatgatgaaataacaaatccttccaacaatgaaatggaaggctatttggtatgtgcatttttagtatatcatgtgctaaaaaaaatgtttattggaaaatattgacattctattagctgg

SEQ ID NO: 1393 - DNA, 1225 bp, unidentified
  source 1..1225: mol_type = unassigned DNA; note = element_1c2497b
  misc_feature 1..2: note = core
  misc_feature 3..211: note = LE
  misc_feature 212..1201: note = CDS
  misc_feature 1202..1225: note = RE
  misc_feature 12..194: note = bridgeRNA
cttgtatcttagaccctgtggtgattagctatcaccacactgaaacagagagagtttcatcaaaacgccgctaagggaaaaccttgagtcgtagaaaaaaccctctgtttcacctttcacgccagcataaatcttgaacggttaccaagagctatgactctgaatgaacaagcaaaacaggcgtgatggtttctgtgaaaggaggtaaaccatgtatcacgttgggattgatgtcagtaaggcaaaactggatatctgtttgttggctgatggactggacggtaaacgaaaaacaaaatcattacccaatggcatctcatcggcagaggcagtcataaactggttggtgatgcaaaaacgcgagccaaaacaggcgcgtatcgttatggaagccaccggtatttatcacgaacacttagcgtatggtctgcatagagcaggggtcagtgtgtcggtcgttaatccctgccgaattcgtgagtttgccaaaggaatggggattttaacgaaaaccgataaggttgatgcctatgttttagcctgttacagcagcctgaaacagccgcaggaatggcagcccccgtcagaagaagtcagaaagctcagggcattacttcaacatcgtgatgtgttgttggaagacaaattacgcacagaaaatcgtgtgaaaacattgagttcaacacaagcgccggaagaggtcatgatgtcactgtctttgatgataaatcatctcaaagatgaactggcaagaatagagtccctgatatcaaagcatgtggataatcatccggggctgaaagatgaccttgcgctactgacctcgataaatggcgtgggcgcccagacagggcttaatatgttggcagagctgcggggaaatacgtttgaaagtgcatcgcaggccgcggcttatctgggtgttgtaccgatagagcggcgttcagggagttcggtgcgtggaaaaagccggttatcgaagacaggcccgtcaaaaatcagggcaaaactatatatggctgcattaacagcgataagtaagaatatgcatgtaaaaaatcaatatgaacggctgttactcaaaggcaaggcaaaaatgcaggctttgggagcggcgatgcggaagttggtgcatctttgctatggcgtgctgcatacgcagcagccatatagtcaagattacggaatggtgacagagtaaacgtgttgacaagcaagacggtta

SEQ ID NO: 1394 - DNA, 1272 bp, unidentified
  source 1..1272: mol_type = unassigned DNA; note = element_1c28c75
  misc_feature 1..2: note = core
  misc_feature 3..232: note = LE
  misc_feature 233..1258: note = CDS
  misc_feature 1259..1272: note = RE
  misc_feature 66..223: note = bridgeRNA
tccattagacttatattgtaattaataataattttataaaaatatttataaacaaaaaaggattaattaaaatacccaaagaaccgattaagtctatgctccgctcaagaaaaaactatagcgcgattaagacccggtgctttggtggttaaagctaaataatatttccgtaaaaaaagattattaaaatggagtaagctccaccacttcgggtattttattagaaagaacaatgcaaaagagaaaatatttttccggccttgatatttcggcagaagacttttctgctagttgcattatcagtccagataatcttgtcttctcaacgcaaaaatttccaaataacttagatggctttaataactttacttctctattccataaacacaatgttaaagcatcagagttaattatctgtatggaagctaccggcgtatattcggaaaatctctcttattatctggtttcaaaaggattctcagttgctattgaagctcctcataaaataaaaaataagaccaaagattctccaagaaaaaatgattttatcgatgctctttctattgctgaatatgcattccggtataccgacaaactttctccttggaagcctaatgatgagattatagagcaaattaaagtccttttaagcactcgtgaacatttaacttctcaattgaccgctaacaataatgctcttaaagctcttaagcataagtattatcaaactcctctggctaaccagatctatgtcaatacaatcaataaactcaaagaacatataaagcagattgataaggaaattaagaacttgattgataaagatgattcctttaagaaaaagatttctttagctaaatctgttccaggcgttggccttcttttatctgcaaaccttctggttcttacaaatggatttacagaacatcttaactacaagaacactgctgcttacacaggaatatgcccatatgagcagaaaagtggaacatcacttaataaaccaccaagatcaagaaaagcaggaccagctaagttaagaaaacttctttatcttgctgcattatctgtaaggacacataatccgattttcaagaaatatttccttcgtaaagtagctgaaggtaaaaataaacgattaatcttaaacaatattgaaaataaattacttaaaataatttttgctgttattaattctggggttgcatttacaaataattataaatcaataaacccaactcaattaaaaacagcttgactttatcataatat

SEQ ID NO: 1395 - DNA, 1386 bp, unidentified
  source 1..1386: mol_type = unassigned DNA; note = element_1c2d134
  misc_feature 1: note = core
  misc_feature 2..291: note = LE
  misc_feature 292..1371: note = CDS
  misc_feature 1372..1386: note = RE
  misc_feature 1..301: note = bridgeRNA
cagtcagaagatgatagccagttcccgggcggtttgtctcaaacaccgatcgatcgcttggtaggctggcgctgcaaggcgtccaggtgtggcttgacccacactccgatcgaccagcgtgtctttccctggacctgtcagccgcccgggagcgccttgcggtgaggctttgcctcggcgtttgcttgtgacccaagaagggcctgaccgcgttggtcacatgactgtcctgtccatgcatatgcccgtggttgagccgtgcgatagcggtcaaactccagaggttacggcatggaacagaagaacaagccagcgcgtcatgttgtcggcggcgtcgatacccataaggatttacatgtcgcagcggtcgtcgatgattacgaccgcgttcttgagacgcgcagtttcccgacgacccgtaacggctatcggttgatgcttgcctggatgcggacattcggagagttgcagcgcgttggtgtcgagtgcacaggcagttatggtgctgggctgctgcgatatatgcaggccgcgggcgtggaggtccttgaagttaccacaccagatcgtcacgaccgtcgaagacggggtaagaatgatgatctcgatgcccaggctgcggcacatgccgcctttgccaaacggcgaaccgtcacacctcgaagccgggacggcatggtggaatctctcagagttttaaaggcttgccgaaagacggcagtcaacgctcggcgcatagccttgcaattaatccagaatacgatcatcgcagcgcccgatgtgttgcgggatcagctgcgtcgcatgacccgcatgcaactggttcgattgcttgccgcctggcgtccggacttgacagcctatcgcgatgtggaagcggcgtatcggattaccctgaagtcgcttggtcgcagatacctcgaactgcatgatgagattgccgatctcgacatgatgatcgctgcaatcgtcgaagacctggctccggaccttgtcgaacgtaattcaattggacacaacagcgccgcgcagcttttgctcaccgccggcgacaatcccgagcgattgaagtcagaagcaagtttcgcggcgctctgcggcgtcagccctgtgccagcatcctcaggaaagaccacaagacatcgtctgaaccggggcggcgaccggcttgccaatagcgccctccatatcattgcaattggccgcctcaggaccgatgacaagacaaagcagtatgtcgctcgccgtatggctgcgggccactccaagctcgatgcaatccgggcattgaaacgttacatcgctcgggaagtcttcggcatcatcatgcgtcgccagaagcagatcaatcaaaccaggatcgtcgcttgacaaacagaagggcgt

SEQ ID NO: 1396 - DNA, 1183 bp, unidentified
  source 1..1183: mol_type = unassigned DNA; note = element_1c2fdfe
  misc_feature 1..2: note = core
  misc_feature 3..217: note = LE
  misc_feature 218..1162: note = CDS
  misc_feature 1163..1183: note = RE
  misc_feature 22..191: note = bridgeRNA
cttgtatgtttccgcacggcaggtcagaaagggcctgtcggggcggagggacgacgggcccatctggccgtaggcacagactgtgggagatatcgtcccgcctctcaccttagcgccgaaacggaatccatcggcctccgggaccgacgaaaagtgcaaggcagcgccacggtgagccccgacaagcccaagtcacactagcgcggagggttcagtcatggcaatgcccgtcacccccatcgagatcggcatcgacgtcagccaggaagagctggtcatcgcccgctcggaccaagcggggctggagaccatcgccaacgaccccgccgcgatccggtgctggctcaagaccctgccggggccggcccgggtgggggtggaggccaccaacacctttcatgtggcgctggtggaggccgcccatcgagctcggcacacggtctacgtggtggacggctactgcctgaaacagtaccgcaaagccctgcggggccgggccaaaaccgacgccagcgacgcccggctgctgcggcgctacgtcagccgcgagtggcctgatctgcggccctggagtccgccttcggccggctatcggcgcctgcagcgcctggtgcatcgccgcgctgtcgtcacccaggccaagcagcgcctccggcaaagcctgaaggatctgcccgagctcaaacaaaccgtcgccaagtccctgcgcacgctcaagaccctcgaggaccgcctcacgcaagccatgcagcgggcgctgcgtacccatgactggcgcgacgacgccgagcgctgccaagccatcgagggcatcggtgaggtgatcgcccccgccctggtcatggcttttcaccgtggccgattccgcagctcggacgccttcatcgcgtttatcgggtacgacgtgcgggtgcgccaatccggcaagtaccaaggccagcgcaagctcaccaagcagggcgatcccgagctgcgccgcctgttatatctcgccgccatgacggcaagacgcaccgccacctgggaaccgtactaccagcgctgtttggatcgcggcttgaccaccacccaggccctcgtcgccctagcccgcaagctcgcccgggtcgcattcgccctgctgaaaaaccagacgacctatgtgccccagaccgcctcatagggttgcccagggacatagaat

SEQ ID NO: 1397 - DNA, 1254 bp, unidentified
  source 1..1254: mol_type = unassigned DNA; note = element_1c43d32
  misc_feature 1: note = core
  misc_feature 2..68: note = LE
  misc_feature 69..1022: note = CDS
  misc_feature 1023..1254: note = RE
  misc_feature 1025..1247: note = bridgeRNA
taattagatggcacgccccacaccttaactaaacttagctatgtcgctgaacttctggaggtgccatcatgtcgactatcaaaactatcggtatagatcttggtaaatctactttccatgttgttggccatgactattttggccgacaactttatcgatacaagttttctcgggcgaaacttcttcaatttgtctcagtccatgatcctgtagtgattgctatggaagcttgttgcggagcgcattggcttgcgagacgatgccaagagtatggacaccaagttaagctaatcccgccacaatatgtaaaaccttatgtgaagagtcataagaacgactttattgatgcagatgcaattgctgaagctgcaactcgacctaggatgaggtttatctcccctaaaacggagcaagcacagttgggagtagtgatccgcagaattaggacaggctatattagggaacgaacagcaactatgaaccggctttttcaatggttagctgagacagggcaagtagttcatcctttacttatttttgagcttagaaatcagcttgatcattacaatgagctgaatgacaaaatcaaagagcaagataagaaactagagactctaaatggtgaaaatgagttattttctgtcttgcaaaccgtaccaggtgtggggcctatgaccgccgcttgttgtctatcttcagtctctgatcccaaagattttcccaatggacgcaattttgctgcttggctgggcctagttccatttcaatattcgacaggcggtaaaccaaggatgcttgggatatccaaacgaggaaataaagaactccgtgagcactttatacacgctgctcgagcggtgttatggagagatgaaacagcggaaaaatactttggtacgtggctaatatatctaaagcgtagaaaacctttcaatgttgctttagtagctttggctaataagctagctaggattacttggtctgttatggcaacgaaaaagccatttgaaataagggcataaatcaagtttgcatatgaaaatgaaagatgacaaaacggttagaccaccagattgaagaccttgtggacaggccagcaacttagagtgctttctcatttttgaggacaatctggagcggatctcatcgtagagctgggactaatgtaagtctcaaattgactctgaatacattagcgcaaactaactccgttatttttgggttttcacttgcaaaacggggcgtaccatacat

SEQ ID NO: 1398 - DNA, 1505 bp, unidentified
  source 1..1505: mol_type = unassigned DNA; note = element_1c45549
  misc_feature 1..4: note = core
  misc_feature 5..238: note = LE
  misc_feature 239..1489: note = CDS
  misc_feature 1490..1505: note = RE
gtcactagggcaccatctttctcatgggtaccgatacggtgctcgttgttgggactcggcgggagccggggtgacggtctgtgctggtcgcccgtgaagggcctgcatgacaccaccgcccccggtttctccggggacacggactggcaacagggagacgcgccgcagagcgccggttagtgaccgcccggtagctgtcctcctcgccgggtcgtcgctgccatcttgaggagtttctgtgtcgtttgcgctgcctgaagcgctgttcttcaccgggatcgactgggccgccgagacccatgccgtgtgcgtgctggacgccggggggaagatcgcggccgagttcacgatcgagcactccgcggacggaatcgccacgctgatccgccggctggcccgctatggtgaccccggcgatctgccggtggccatcgagcgcccggatggccgcctggtggacctgctgctggaggccgggcacccgatcgtgccggtcaagccgaacgcgatcaagacctggcgggacggcgaggtgctctcgggcgccaagtccgacgctggcgatgctgcggtgatcgccgagtacctgcggctgcgcgcgcacaagctgaaggtcgttgcgccctactccgacgagacccgggcgctgcgcaccatcgtgcgcacccgcggcgacctggtggagatgcgggtcgcggccaccaatcagctgtcggcgctgctggacgcgcactggcccggcgccagggccatcttcgctgacgtcgagtcgccggtcagcctggagttcctcacccgctacccgaccccggccgctgccgcctgcctgggcgagaagcggatggccgcgttctgcgtcaagcacggctactgcggccgccgcagcgccgccgagctgctcggccggctgcgctccgcgccaccgggcaccggccgcgaggcactcaccgaagcgctgcgcgatgccgtgctcgccgcagtcggcgtcctgagggccctgaacgcgtcggtgaagaatctcgaccggtcggtcaccgcccacctcggggaacacccggacggcgcgatcttcacatcgctgccaaggtcgggtcaggtcaacgccgcccaggtgctcgccgagtggggcgatgcccggcaagcctacgagcaccccgactccgtcgccgccctcgccggatgcaccccggtcaccaaggagtccggcaagcaccgggccgtgcacttccgctgggcctgcaacaagcggttccgcgtcgcgatcaccaccttcgccgacaacagccgccacgccagcccctgggccgcccagatctacaacgacgcccgcgccagcggcaaagaccacccgcacgccacccgcatcctggcccgcgcctggatccgcgtcatctaccgctgctggctcgacggcgtcccctacgacccagcccggcacggcgccgccgccgcgctcgccgaacaaccggctaagcaaatcgcggcatgaggttgacacagggagt

SEQ ID NO: 1399 - DNA, 1397 bp, unidentified
  source 1..1397: mol_type = unassigned DNA; note = element_1c4f211
  misc_feature 1: note = core
  misc_feature 2..90: note = LE
  misc_feature 91..1134: note = CDS
  misc_feature 1135..1397: note = RE
  misc_feature 1164..1389: note = bridgeRNA
taatggcatggacgcccctgcttttaacggcatcaattgtgccaaagtggatgtatcaagcagccacttaaatcagcaggagcgtccacgatgaacattacgactgtcggcctcgatttggcaaaagccgtcttccaagtgcatggcgtcgatatgcgaggtaaagtgaagattcgcaaacaactgaagcggtcgcaggtttctgcatatttcgctcaactgcccgcgtgtctaattggcatggaggcctgcggcggagcccatttctgggctcgtaagctcaccgagctcggccacactgtaaaactgatggcaccgcaatttgtaaagccttacgtgaagaccaacaagaatgacgtcgctgatgcggaagcgatctgcgaagcggtcggccggcctaacatgcgcttcgtaccaataaaaaatattgaccagcaggcattgctcagctcgcaccgcgttcgccagggcttcgtgagggagcgcaccgcacaagttaaccaaatccgcggattactggcggagtttggcattgtaatgccggtcggcattcgcagcatcgagggcaagttacccgggattctcgaggatgcggaaaacggtctatcgggagctagtcgatcgctattcgcccggttgtttgagcattttcgcgctctcgatcgccacgtcaaggagatcgagcgcgagatcaatgcatggcaccgcgacaacgccgacagccagcgcctggaggcgatcccgggaatagggccactcaccgcgagcgcattagttgccagcgtcggcaacgcgcacgcttttcgaaacggccgacaatttgccgcatggctcggtcttgttccgcgacagtgctcctccggcggcaagaatacgttgctgggcatcagcaagcgcggcgacacgtacttacgaaccctgctgatccacggagcacgcgccgtgatgcaaacgctacatagacaaccgaatcaagccgacggctggctggcccgagtgacgcaacggcgccattccaatgtcgcggccgttgcgtttgcgaacaagaatgcccgaatcgtttgggctttgctcgctcacggtcgtaaatatcaagctgagtaccgacttacacccagcatagcgatggcgtaaaaatcgcaaatcgtcctaaccctctcaccaccgagttgcacaggcgttttcaaagtgatggcaccacaggtaagaccagggccgactcaacctacatcttccaagggacctcaagagtccgaaaaagtgattaggcgtcgaccagcatattccattagggcctgcgaccttgagtcgcatgcacaggccggatgtatggctgcaaactactcctgtgatcctagaccaaacaaagcgcttggcatcaaaggggcgtccatgta

SEQ ID NO: 1400 - DNA, 1401 bp, unidentified
  source 1..1401: mol_type = unassigned DNA; note = element_1c4f403
  misc_feature 1..2: note = core
  misc_feature 3..87: note = LE
  misc_feature 88..1131: note = CDS
  misc_feature 1132..1401: note = RE
  misc_feature 1163..1399: note = bridgeRNA
tgatgtgatggacgactcccgcccttcggggtgcggcatatgccaaagtggggaagtcgtgacttccacggcaaaggagtgttcatcatgaagatagccactgtcggactggatcttgcgaagaccctattccaggttcatggagtggatttgcagggacatgtcatcgtacgcaagcaactacgccgcgttgatgtgctgccctttttcgcgaagcttgggccgtgcgtggtaggcatgcaggcatgtgggtcgtcgccctattggggccgggaacttacaaagcctggacactctgtgtgtctgattgccccgcagttcgttcgaccttacgtgaagagcaataagaccgatgcggccgacgcagaagcaatctgcgaggcggtaaatcgaccgcatatgcgatttgtgccgatcaagacgcaagcgcaacagacgatgctctcgctgcatcgggcacgcgcagggctggtcaaatcgcgtacggcattggccagtcaaatccgcggcttgctgagtgagttcggtattgtgttgccacagggcatcagactgcttgggcaaagggctatcgaagctctgtccaatcgtgagcctgagctttgcgaaccgttccgggcgttaatccagatgctcgtcgagcacttacgcgaactgggcaacaaggcagctgaactggagggacgcatccgtgcgatgcatcgtacagatgaggctggacaacttctccaaaccatacccggggtcgggccgctcaccgcctccgcgctggcagcctcaatcggcaacccgcgcgcctttcgggacggccgccaactcgctgcatggctgggtctggtcccgcgtcaacactcctcaggtggtaagccacgcctgctgggcatcagcaagcgcggggatacagcactacgaacgcttctgattcacggcgctcgcgctgttatccgcatggcagctaccaagcccgaaatggctgattcgtgggtcatgaaactatgtcgacgccggcacaaaaacatcgccgccgtggcgcttgcagcaaaaaacgctcgaacggcgtgggccctgctgattcgaaagcaggtctacgaagttagccacgttcccacgcgacctggcgtggcgggttgacaggtccagcttctaacatcggaacaacacttaccttccagaggttgcttgagcagactttaattcgatgacagaacggtcggaccgtggtgggccaaacccgctttgcaccaagggcaatcaagcccgcggctctgatggggtacctactcgcggatattcatcgtgggcctgcagcgagcgctgcgaatcgagcccggatacatggctgcaacctcgacctgatgccagagaacccggactgcttgacaacagggagtcgtccataca

SEQ ID NO: 1401 - DNA, 1616 bp, unidentified
  source 1..1616: mol_type = unassigned DNA; note = element_1c59a2d
  misc_feature 1..2: note = core
  misc_feature 3..286: note = LE
  misc_feature 287..1498: note = CDS
  misc_feature 1499..1616: note = RE
  misc_feature 14..312: note = bridgeRNA
ctactacaatgtatttatggttatagtacctaacaaccagttaggtttttatccatcttgttgcttaagctgttagaatgtaaagagcaatcggtatatcgtccttctttcttggacttcgcgtccgtaaaatagactgatagccagctcctcattcgcagcgttcgttttatgcaggttgaactgctgtcctacagtacgttcgtgtcacaccacagtagattgaataggcaatgagtaaaactggtatttatccattgcaataaactttaggagtgtcaaatttatgaatatgaacgcagtaggtattgatatttctaagggcaaaagcatgatcgctattatccgcccatatggtgagattgtttctttgccttttgagattcgccacacttccaatgaaatcagttctctcatcaaccagatcaaatccattgaaggcgaatctcgcatcgttatggagcacacgggtcgttattatgaaccactagcacgtgagctttctcagacaaatctttttgtgagtgccgtaaacccaaagcttattaaagatttcggtgacaattctctacgtaaagtcaaatctgataaagcagatgctataaaaatagcgcgttatgctcttgacaattggaatgatttgaaacaatataaccttatggatgaaatacgtaatcagttaaaaaccatgaaccgtcagtttggtttttacatgaagcacaaaacggctatgaaaaataactttatcgggatacttgatcaaacctatccgggcgttaatacttacttcaacagccctgctcgtgatgatggtagccagaaatgggttgatttcgctactgcatactggcatgtagactgtgttcgtaaactgtctcttcatgctttcaccgaccattatcagaaatggtgtaagcgaaataagtacaacttcagtaaattaaaagctgaagaaatctatggagcagcaaaggaacttgttcctgtacttcctaaaaatgatttgaccaaactcattgtgaaacaatctgtcgatcaattaaacattacttccaaaactgtagaagcacttcgtactctgatgaatgaaactgcctctaagctgccagagtactctatcgtcatggaaatgaaaggtattggtccatctcttggccctcagttgattgctgaaatcggtgatgttacacgttttacacataagggtgctattactgcatttgcaggtgttgatccaggcgttaaccaatctggaacctatgaacaaaaaagtgttcgtacttccaaaagaggttcttctaccttgcgaaaaactttgtttcaggtcatggatactcttatcaagaccaagccgcaggatgatgctgtttatcaatttctcgataagaaacgtgctcagggtaaaccttactatgtttacatgaccgcaggcgctaataagtttctgcgtatctactatggtagagttaaagaatacttaacagttcttccacaataattacctcttgcattccttctttcagaccagcgtataatgggtctatttgttatgcttaaaatccagcatataaccttttcaaaaaaacttcaattttctattgacttttatttgcagg

SEQ ID NO: 1402 - DNA, 1151 bp, unidentified
  source 1..1151: mol_type = unassigned DNA; note = element_1c6255d
  misc_feature 1..2: note = core
  misc_feature 3..185: note = LE
  misc_feature 186..1136: note = CDS
  misc_feature 1137..1151: note = RE
  misc_feature 34..201: note = bridgeRNA
cttgtatgtttactttgctggacaaggaagctggaataaggcgagtttgtttggcccgtctcggcagctcgatctccctctgggacgccaagcccgtggatgagcaaggagcgtcgaggcggtttctcactgacaacccgaacggttgcttgggccaataagcccgcatttttgcaaggatgggtatgagcgagatgacggtggagcaatttgttggcgttgatgtatccaaagccaccttggatatctgcattacgccctctggacacgcattgcatgtttcttatgacgaggttggcgtcagccagatcgtctcgactttgaaagaagccggcccgactctgatcgtgctggaagccacgggcggattggaggtccgtctggctagcgaactggcggcggttggcttgccggttgcgatcatcaatccacgccaggcccgagactttgccaaggcaaccggccgactggccaagaccgaccaggttgatgctgcgatgctggcggagtttgcccgagccattcgaccccaggcgcgcccgcttaaggatgctgacacccgtgcgctcgatgacatggtgaaccgccgccgccaacttattgcgatgcgggttcaagaggcgctccgattaggcactgccgcgtccaagccgctgcaaaagagcctgaataaacacatcacctggctggataagcagattgctgaagtcgatggcgatttgaataaacggctgcgcgagtctgacgtctggcggaccaaagatgatttgctgcgcgccatcccgggtgtgggtgcggtcaccagcctgacgatgttagcgaagtgtccggaactggggacactcaaccgccgcgagattgcggcgctgaccggcgtagcccccatggccaacgatagcggcacccatcggggtaaacgcttcgtctggggcggacgggctgatgtgcgtgccgtgttgtacatggcaacgatttcagccatacgttgcaacgagacgatcaaggcctttgcggatcgcctcaaacaggccgggaaacccgccaaagttgtgatcgtcgcttgcatgcgaaagctcctgaccatcatgaatgcgatgttgaaaaataacgccgcatggaaccccaaaaatacttgattttggacacggttg

SEQ ID NO: 1403 - DNA, 1299 bp, unidentified
  source 1..1299: mol_type = unassigned DNA; note = element_1c63dd7
  misc_feature 1: note = core
  misc_feature 2..70: note = LE
  misc_feature 71..1036: note = CDS
  misc_feature 1037..1299: note = RE
  misc_feature 1075..1293: note = bridgeRNA
taatgggatggtccgccgcttttaccaagccagcagcctgtatatgagaggcttgcgaaggaggcgtcccatggaactacacaccatcggcattgatcttggtaagacagtttttcatctggtcgggctcaacttgcgcggcgaggtctcggtgcgcaagaagtgcccgcgtacacagttgctgcgcttcactgccaacgtacacgtcaggttgattggcatggaagcctgcggaggttcgcattttcttggccgggcactgcgggaacagggacaccaggtgcggctgattccggcgcagtatgtgaagccgtacgtgaagacaaacaagagcgactacatcgatgccgaagcgatcgctgaggcggtcgcacggccgacgatgcgctttgtaccgatcaagaccgatgaccagctggatctgcagtccctgcatcgggtgcgcgagcgctgggtgatgcgtcgcacggcagtcatcaaccagattcgtggattactgctggaacgcggaattactctgcgaaagggacggcgttatgtggatgctgctttaccagggatcttggaagacgccgacgcgaaactatccggcgcgttgcgcatgctgctggcgcaactgaagctggagctcgatcacctggatctgcggatcgacgaagccgatgcgctgatcaagaagactgctcgcgaaaacgaagcctgccaacgactggtggccatccctggcatcggaccagtcaccgccaccgcactcatcgcggcgatcggcaacggaggggccttccgcaagggtcgagagttcgctgggaactcctacttgcgaagactgttcgtgcaaggcgcacgtgcggtcatgcaacagcgcacgaagcaatcttccggtctgagcgcgtggctggcacagctcacatcgcgcacccaccgcaacgtcgccgccgtggcgttagcgaataagctcgcccgcatagcttgggcggtgctcgctaggaatgaacaatatcggcctcccgtgctggctaacgtggctgctgcttgatcggcctgctgatactactgtgtagaaatgatctcttgccaggtctgctggcgaatgaggagatggcacaacggtcgaacccggcgctctccaaacccgtactcggaagaagtctctcaagactgaattactaatggggaagagagcgcagcgcattccatcctggccaggagtgattcactccaacaaaggccgaatacatttgcgcagaccaacttgtgacatcctcacatttcgcttgcggcgaagcggcggaccataca

SEQ ID NO: 1404 - DNA, 1422 bp, unidentified
  source 1..1422: mol_type = unassigned DNA; note = element_1c678cd
  misc_feature 1: note = core
  misc_feature 2..125: note = LE
  misc_feature 126..1145: note = CDS
  misc_feature 1146..1422: note = RE
  misc_feature 1184..1422: note = bridgeRNA
aattgaaatgaacgcgtcccacccacgcacgtgagagcaagagaggggtggatcctcacgggccaacggcatcgatgtgcccaggtggaaaatgcacgcatttcccggcaaccggaggatccacgatgaacagtatggccgtgggcgtcgatatcgccaagaacgtgttccaggtgcattacgttgatcaggcaagcggcgagatcgtgaacaaggcgatcaagcgtgcgaagtttctggagcacttcgcgaatcgtgagcggtgcgtaattgggatggaggcgtgtggcggtgcgcaccactgggcgcgagcgctgaagcggatgggtcacgaggtcaggctgatgccggcggagttcgtgaaggcattcaacatccgtaacaagaacgatgcggcagacgcgcgagcgatctggctggcggtacagcagccgggcaagccgatagcggtgaaaacggaaatgcagcaggcgatgttggcgctgcaccggatgcgggagcagctggtgaagttccgcacgatgcagatcaacgggctgcgtggactgctgacggaatacggcgaggtgatgagcaagggccgggcggcactggacaaggagataccggcggcgcttggccggatcgcggagcgtctgccagcggcactgatcgatacgttgcgcgaacagtggaatgggttggcacgacttgacgaacagattgccgagatcgagcgacgtatgcgcgattggaagaaggaagaccgggcagtgcaggcaatcagtgagattcctggcgtggggttgctgacggcgaccgcggcagtggccatgatgggcgatccgaaagcgttcagatcgggacgggaatttgcggcgtgggcgggtttggtgcccaagcagacaggctctggcggcaaggtgaatctgcacggaatcagcaagagaggcgacacgtatctgcgcacgttgctgattcatggcgcgcgcagcgtactcacccacgtgaagaagccggggccgtgggtcgagcagatcaagaagcgacgaccagcgaatgtcgtgatcgtcgcgttggccaacaagatggcgcggacgatctgggcggtactcgcgcatgagcgagcgtatcggaaggactacgtcagcatgaaaccagcctgatcggttcatgcgaggtagaagatcaacatttacatagggtgaacgtcgaaaggttgcgcagcaatcgagtgtgatgacgagccaggtaggacctgggcccgccaagcctgaatgtcaccaagagctttgagctcgttaggagaatgaggcgcgggtcagcggatttcataggggcccgcagcggcggtatcgactgcatcaaggccggatatagagctgcagcccatcctgtctgtcggaacacacgagaactgttgcaaacgggacgcgttcatat

SEQ ID NO: 1405 - DNA, 1429 bp, unidentified
  source 1..1429: mol_type = unassigned DNA; note = element_1c68ffd
  misc_feature 1: note = core
  misc_feature 2..132: note = LE
  misc_feature 133..1152: note = CDS
  misc_feature 1153..1429: note = RE
  misc_feature 1187..1426: note = bridgeRNA
atggtatgggcgcctcccacttgagcggtgagggttaaggtttcgaggtgaagaggaccctccagtgccaacggcatcgaagtgccaaaatgggaagaggtgaatctttccaggcgaaccggagggtccgagatgaagcttaacgtggtcggtgtggatatcgcaaagcgggtatttcaggtgcattgggtcgagcgagagagcggagagattgtgagcctgcagctcaagcgtgggaagtttctggagcattttgccaaccgagaggcctgcatgatcggcatggaggcgtgcggcggggctcagcattgggcgcgggagctttgcaagctggggcatcaggtgaagctgctggccgccaagaaggtcaagcccttcgtgggcgggaataagagcgacgcggcggatgctcgcgggatctggctggcgatgcaggagccgaagttgagggaggtggcgatcaagaccgaggcgcagcaagcggtattggcgctgcaccggatgcgcgagcagctggtgaagtttcgcacggcgcagattaacggactgcgcgggttactgacggagtatggggaagtcatgccggtgggccgagcggggttcaaacgggagattgcggccgtgctggggcggctagctgagcggttgccgggattattgatggacacgttgcgcgagcagctggaacggattggggagttggacaaacagattgttgagatcgagcggcggttaaagcaatggcatgagcaggatgaaaacagccagcggattgcgcggatcccgggtgtcggggtgttaagcgccacggcagcggtagcgacgatgggcgatccgaaggtgtatcgctcgggacgaggattttccgcctttttaggcttggtgccgcgccaaagcgggacgggcgggaaaatgcggcttttgggcatcagtaagcgtggcgaccggtatgtgagaacgctgttgattcacggcgcccgagcggtgctgacgcacagcaagaaccccggtgagtggttgacgaatttacagcgacggcgtgcgaagaacgtggccgtggtggcgcaagcgaacaagatggcccgcacgatttgggcgttggtcgcgcatgagcggaactatgaatttgggtacgtggggcagtctgtgtaaggctgcacacgagtgtattaaattttgtagaggatggcacgctaaaaggttgcgcaagatcgtcaacatgtgatggcagataggtcagaccgtgactcgccaaacctgaatatttgtccgagcttcgagctcttaggagaaatgaggaccgagtcagcggaaatccatcaaggccaacagacttcggtctgtgcaaacaggccggatataaatctgcagcctgagcctgtcgaacatcacatcaagagggtcttggcaaacgggaggcgtccatata

SEQ ID NO: 1406 - DNA, 1554 bp, unidentified
  source 1..1554: mol_type = unassigned DNA; note = element_1c83ea4
  misc_feature 1..2: note = core
  misc_feature 3..246: note = LE
  misc_feature 247..1425: note = CDS
  misc_feature 1426..1554: note = RE
  misc_feature 5..222: note = bridgeRNA
ctactattagtattgtcatagtcattctttaccttttctacaggttagactatgctattttaagatactgtggattggtttctttctcctaccacttgatggtttaaataaggctccaaccacagtctctttgtccggttgttaatcagttagttaccgcatgacggttgatcaagaagtaggttacaatttcaaagagccctgtggatcttaatacagtatcaattcatttttaggaggtcctatatgatttttgtaggaattgacgttgctaaagataagcacgactgctttatcacaaactcagatggcgaagttctttttcattccttctccatcaccaataacctatctggttttactgaactctatcaaaatattctatccgttatgaacgatgttgacaaagtaaaagtaggacttgaagccactggacactatagttacaatcttctcggatatctcttagataaaggtttcccgacctacattatcaatccattacatacgaatctgtacagaaaaagtctaagccttagacagaccaaaacggataaagtcgatgcccgcacaattgcttctatgctgatgtctgatgtgaacttaaagtcctactcagacacatcttaccacaacgaagaattaaagtcactgactcgatatcgttttgataaagtaaaggaacgctctgctcttaaggtatctatatcccggcttgtctgtatcctttttcctgaacttgaagaacttgttcctactctccatatggcatccgtctatactttgctgtctgagtttccaggtgcttcttatgttgcatccgctcatcttacaaagctgacaaatctgctttctaaagcctccaagggccattacggaaaagatactgctgttcttttccgggaaactgccagaagttctataggctctgttatgcctgcaaaatctctggaattgaaacacacgattaaactcattcaagaactaacttctgaaattgatgaaatcgagacagctatcaagcagatcatggatgaagaaatccaatcccctattctcaccattcccggcattagttaccggatgggagcaatgatcattgccgagatcggcgatttcaatcgttttgattcagccgataagatcctggcctatgctgggatgtctccctctacatatcaatctggtcaactggataactgtcattcccatatggagaaacgtggctccagatatcttcgttatgccttatacaatgcaacaaaatatgtctgccattgggacaaaactttcggtgcatatcttgagaaaaagtgttctgaaggaaaacattacaatgtagctttatctcatgctgcaaaaaaacttgtcaggactatctttgcactggaaaggtctggtcaaccatataaagcatccgtttaactctttttataaaccacttcttttttagagcacctacaaagatgctcttattgtcatacagttttcaaggtactgattgcaacgaaaagtcgttgccacttttttacttgactttctttaatagttagt

SEQ ID NO: 1407 - DNA, 1445 bp, unidentified
  source 1..1445: mol_type = unassigned DNA; note = element_1c85c26
  misc_feature 1: note = core
  misc_feature 2..402: note = LE
  misc_feature 403..1428: note = CDS
  misc_feature 1429..1445: note = RE
  misc_feature 9..234: note = bridgeRNA
ccgttaccgtttaggtggtccttaaccgcggggccacggtcgccaagttcggtatgacttctttcccctgtcactgtgatgatctggggggtggtgtcgccgagcctggtggcgtcgatggaccgctgatagggacagggccaccgcagtggcggtaggtctcctcgtgacgtgggtgtcgggtatcgacgccggatcggcgaccggccggaccggacgaaggatactgctacatgaacacgagttacgccgtgttttgcggcatcgacgtgggcaaaggcgaacaccacgctgtcgggttggacgcctccgggactcgcctgttcgacaaggcgctgccgaacgacgaaacccgactccgggcggtgttggacgggctcgccgcgagcgggcccctgctgggtgatcgtcgatcaaccgaacaccatcggcgcgctgccggtcaccgtggcccgggcctgcgggcacgacgtcgcgtacctgcccgggctgtcgatgcgccgaatcgctgacctgtaccccgggcaggccaagaccgatgcgcgggacgcgttcatcatcgccgataccgcgcgaaccatgccccacacactgcgccgggtcgacaccggcgacgagaccttggccgagctcggtgtgctcgtcggtttcgacgacgaccttgccggcgagtcgacccggaccagcaaccgcatccgcggagtactcaccggcatccatccggccctcgaacgggtcctcgggccccgtgtcacccaccccgccgtcctcgagatcctcgcgcgcctcggcgggcctgacgggatccggagagccggcaaacgcaagctgacctccgtcgcggtcaaacatgctcccgggatgggggcacggctggcggacgagattctcgctgcactcgatgcgctgaccgtgaccgtgcccagcagcaaggccgcagaaattgtcctgccgcacctcgctgactccttgaaagagattctgctgcaacgtaaacgcatctgtgtggacgtggagaggatgcttgatgaccaccctctttcccacgtcctgatctccatgcccggtgttggggtcaggaccgcagcccggatcctgctcgaggtgggtgacggttccgcgttcaagtccgccggccacctcgccgcctatgccgggatcgcgccggtgacccaccgatccggctcctcgatccgcggcgagcaccccgcccgatcaggaaaccgcaaactcaaacgtgccgtgttcctgtccgcgttcgccgctctgcacgacccgactagccgcgcctactacgaccgcaaacgcgccgaaggcaagaaacacaatgccgccctcatctgcctcgcccgacgccgatgcgacgtcctctacgccatgctcaagaacaagactctctaccaaatcccagccgccgctgcggcttgacaggaaccatagggaca

SEQ ID NO: 1408 - DNA, 1343 bp, unidentified
  source 1..1343: mol_type = unassigned DNA; note = element_1c980ff
  misc_feature 1: note = core
  misc_feature 2..70: note = LE
  misc_feature 71..1093: note = CDS
  misc_feature 1094..1343: note = RE
  misc_feature 1110..1340: note = bridgeRNA
taatgagatggtccctcccgcctcgcgagtgagttagcctagcggtgctaaatcccgatcggagaccatcatggaagacgtgacactcgttggcattgatttagggaaacacacgttccacttgcatgggcaggacaagaaaggaaaaggcctgtttcgcaagaagctaaaccgcaagcagacgatcgaattcttcgcgacgttccatgcctgcaccgtggtgatggaggcctgtgccggcgcacatcacatggctcgcaagctggcgtcgtttggacatcaggttaagcttatctcgccgcagttcgtccggcccttcgtcaagtcgaacaagaatgatttcgtcgacgcagaagccatctgcgaagcagcttcccggccggccatgcgattcgtgactccaaaaacagaggcgcggcaagtcctttcagcgttgcaccgggttcgcgaatctttggtgcgagatcggacgaagaccgtaaaccaagtccacggatttctgctggagtttggcgtcagcttgcccgtcgggaaagccactatgacgcgccttgcggctatcctcgctgaacattctcttccaccgactcttgtagtgatccttgagcgattgcatgcccactataaatatcttaacgaacaggtcacggaaaacgacaaggaaatatcccgtcaccttgccgccgatgaactcggccagcgtttgctcgctattcctggcgtgggccccatcacagcaagcgtgctaacggcggagatgggtgatggaacccagtatcagaacagtcgcgatttcgcagctgcggtcgggttagtgccacggcagtacagtacaggcgggcgggccaacctcctcggtatcagcagacggggggacaagaacattcggcgattgctcgtgtcgtgcgcgcgctcgtacatgatgcgactagacaagcagaccggcgccttagcagattgggttcgaaccctgctgacgcgacggcactcgaacgtcgtcgcctgcgcactcgccaacaaattggcaagaacggcttgggcaatggccacgcaccatactgtattccacagtgatccgaccgctgttgtttgagaagacggctaacactgcatcacccaactgcttttgcgacgactgaaatttgatgacgtgaacggcataacggcctgacggacaacctggacaactaatcggccttttaaagccgcccaactttttaggactgtcaggcgcgaatctcatcgtggcgcgaggagcgatcctcacaacgacgccgaatagatttgtgcaagccaacaacgacattgaaaatcagggttgcaaaaatgggagggaccataga

SEQ ID NO: 1409 - DNA, 1440 bp, unidentified
  source 1..1440: mol_type = unassigned DNA; note = element_1ca7c68
  misc_feature 1..2: note = core
  misc_feature 3..122: note = LE
  misc_feature 123..1157: note = CDS
  misc_feature 1158..1440: note = RE
  misc_feature 1193..1393: note = bridgeRNA
agatggggtaatcggccggcccagcttgtggatagctgaagattttgggtgctgcgcttcaggctgatggtgaaaacgaggtccgtggtcacggcctcaagcatcagaaggagaagcgcagcatggaccattttgctggattggacgtatcggtcaaggagaccagtgtctgcattgtagatgacacgggcaggatcgtgaaggaagtcaaggtagcgagcgagcctcaaagcttactgaaggttctggggagccctgcctaccgcttcaagcggatcggactagaagccgggccgctgtcgcaatggctgttcagtgctctcgcggaagcagccttgccggtgatctgtgtagaaacccggcacatgcaggcggtgctgaaggctcagatcaacaagaccgaccgcaatgatgcgcgcggcatcgcgcaaatgatgcgggcgggcctttaccgtccggtgcatgtgaagacgctacgcagtcagaaacagcggatgctgctgacccatcgcaagctgctgcagtcgaaggcgattgcaatcgagaacgacctgcgcggcactttacgcaacttcggcctcaaggtcggaatggttggcaaggtaaggttcgaggcccgcatccaggagcttgtcgagaaccagcccgatctagccattctggtcgaaccgttgctcatcgttcggcgggtgctccgcgaacagatcgtcatcctgcatcgccgtttgctggcgactgtccggaatgatgaggtttgccggcgcctgatgacgacccccggtgtcggccctgtggtggcgctgacctatcgcgctactgtcgatgtgcccgcacgcttccggaaatccaagtcagtcggggcggtgtttgggctgacgtgctccagatatcaatcgggcgagatcgattggagcggcaaaatatcgcgctgtggcgatgagatgatgcggacgatgctctacgaagcagctcagagtatgatgcattcaaaaaaatggtcctggctcaaggcgtgggccatgcaaatcgccaggcgccgcgggatgaagaaagcgatcgtggccctggcgcgccggctggccgtgatcatgcaccgcatttgggttgacggaactgagttccgctggactcgggagcaagccgcggcagccgcatgaagaccgttcaggatcaaacccgataggagaaaactcgagctccaccgcgcggtggtaagatgtccctcgcgggacgatggatgaggtgagttcgtatgtccgcttggacctaccgtccgtctgacggcaaggccgatcaaaagattgttccgcctcgtcctcggatcccatgatggaagggccttggtgccgattccgaagagaagcgcgagcccgcgagcgacatcgacaccgcattgaaggatagtctgaaagtgcttgaccccgaacggccgattagaga

SEQ ID NO: 1410 - DNA, 1393 bp, unidentified
  source 1..1393: mol_type = unassigned DNA; note = element_1ca97e6
  misc_feature 1..2: note = core
  misc_feature 3..89: note = LE
  misc_feature 90..1121: note = CDS
  misc_feature 1122..1393: note = RE
  misc_feature 1092..1380: note = bridgeRNA
agatggggtggttgccgccctccccagacggcatcgcgatgtgccaagatagtggtgttgagagccactgagcgggaaggacggcatccgtgacgaaggatattatgattggggtggacctggcaaagagtgttttccagatccacgcagcaagcatgacggggcagttgaagttccgcaaaaaactctcgcggcagaatttccccaagttcatggccgaccaacctccagcggtagtcgtgatggaagcttgcggcagcgcgcattattgggcgcgcgagatggtcaggcttggccatgaggtgaagctgatcgcgccgcattatgtgaggccgttcgtgaagcgccagaagaatgatgcagcggacgcggaggctatcgtgatcgctgcccagaggccggagatgcgcttcgtcgagcccaagtctgccgaacaacaaggcagggctattctgttccgcgcccgggagcggctcgtccatcagcgcaccgaactggtcaatgcgctcagggcctatctatatgaatatggccacgttgttccccaaggcatccaccagatcaaacgaatcgagactattctggaagaaccacacagcgacttgcctgggttgatgcgcgaggaatgccgcgatcttctggatcagatcgcagccctaacgacgaggatcgaggccaaaactgtcaaggtcaaggctctgtcgaccaagcgcgagatgacacgccgactgcagacaatgcctggagtcggtccgctgactgctctggcaattgaagcctttgcccctccgatggagaacttccgttgcggacgtgacttcgccgcttggcttggactggtcccgcgtcagttttcctcgggcggtaaggaacggctcggccgtatgtcgaaggcagggcaagccgatatccgcaggctgctgattataggggcgatgtcgcgcctaaactggcgaggccggaagtcgctccctgaaaagtcatggctggcgcgcatgatagcgcgtaaaccgaggatgcttgtggcaattgctttagccaacaagatggcacggactatctgggccatgctgacgaagaaagaggactaccgggttccggtgcaggcaaaggcggcgtgagtcgtgccgcaaaatctacctgacatcggatgaggggggtgtgagcaggcgacgacccgaatgggcaaaatgatcgaacagatctggattaggaaaaccaggtgaatgacatgagcattaagctcgacggtcagatttggacttgatccgcagatcaccataccggccagcggtctctgaaaatgccgcttttacaggccttacagaagaccgcactcgatcacacgcgcttcggactcgaaacctcttgcatcacgggcggcaaccacaga

SEQ ID NO: 1411 - DNA, 1445 bp, unidentified
  source 1..1445: mol_type = unassigned DNA; note = element_1caaaac
  misc_feature 1..2: note = core
  misc_feature 3..230: note = LE
  misc_feature 231..1430: note = CDS
  misc_feature 1431..1445: note = RE
  misc_feature 16..226: note = bridgeRNA
gctctacctttctgatcatgggttggccccagccattcgtagggttgtggcacccaggggagtggggtgtggctctcagctgcgctgccgtctgtggctccggaggcttggccgccccgctccccacgacgactcggccgccgattgggaagtgcgagatggtcgctgcgtagagcaatgccggcgaggtcgtccgtggtacgcatggcaggaacgacttcgggagcacgatgagccggatatgggcggggatcgactgcggcaagacgcaccatcactgcgtcaccatggacgctgacggcaagacgttgttgtcgcgccgggtggccaacgacgagccggagctcctccagctcctgggcgacgtcctcgacaccgcagacggccgcgaggtgacatgggcgctggacatgacgggcggcgaacccggtctgttgatcgcggtcctgatcaaccacatgcaggagctgctgtacatccccggccgcatggtgaaccgtgcatccgacgcctaccgcggcgaaggcaagaccgacgcccgcgacgcgaaaatcatcgctgaccaggcacgcatgcgccgggacctgcgacccatccgccccggcgacgaggccacgatcgagctggcactgttgaccagccgccgcatcgatctggtcgccgagcgtactcgcgccatcaatcggctccgctcggtgctgaccagcatgttccccgctctggaacgggctgtggaactcaccaacgccggaccgctggtcctcctcaccggctaccaaactccggctgctctgcgccggatcggcatcagtcggctgacgacgtggctgcggaaccgcaaggtccgtggagccgagaacctggccaaggccgccgtggaggccgccgagcgccaacacaccgctgtcgccggcgagaaggtcatcgcgcagatggtccacaccctggcaaaggaggtgatggccctcaacgagaagaccgccgagacagagaagctcatcgaggggcggtttcgcgaacacgaactcgccgagatagttctcagcatgccgggcatgggccccaagctcggcgccgagttcctggttgccgtcggcggcagcctggacgccttctccaccgccgaccggctcgcggcattcggcggtgtcgctcccgccccgcacgactccggcaagaccagcggcaacctgcgccgcccgcagcgttaccacaggcgcctgcaacacgtcttctacacatccgccttggtcagctcctggagcgaccccaactccaagcggttctacgaccgcaagagagccgaggggaagagccacatccaggccgttctggcgctcgcccgccgacgtgtcaacgtcctgtgggccctgatccgcgaccgacggtgctaccaagtcgcaccgccgcccgtcaccgcagcggcttgacaacatcattgggaa

SEQ ID NO: 1412 - DNA, 1361 bp, unidentified
  source 1..1361: mol_type = unassigned DNA; note = element_1cb2511
  misc_feature 1: note = core
  misc_feature 2..222: note = LE
  misc_feature 223..1218: note = CDS
  misc_feature 1219..1361: note = RE
  misc_feature 49..210: note = bridgeRNA
cctttagatttgttgaatgagaaaatgataattttataaaagtataataatacaacctaaccaacaaagtgaaccattgagtgttgcaaagatttggtcttatgagacgtttaggactttgttggttttactaaaaaagcatcagatagtaattaagacgtagtggtctagtataaggtatagatagcattttagtataggttgtaataaaataatcatcttatgaacaaatttaatcattttgttggaattgatatttcaaaggagtatttcgatgtcacattatttaatggcctaactacattagaacacaatcaatttaataactcaaaaaaaggtgttgatgaattgatagactggataaaaggacttaaagcaagtttagaaaacactttaatctgtatggaacatacaggtatttacaaaaactttttagttgatatattatctatcaataagtgcaatttatggattgaaatgccattacgcataactaaaagtagtggtgttcaaaaagggaaaaatgataaaattgactctcaaagaatagctatgtatgctcatagatttcaagataaagctatgttatttagtggttctaaaattgttttagataaactacatgctctttctaaacaacgtggaatgtatcttacttataaaagtgctattcaaaaaagacttaaagaacaaaaagttttcgataaagaaatttacaatgtcttatgtgaaaacgataataagattataaatctctatgaaaagcttattgaagatattgataaacaattagagaatcttattaaagaagatcaagaggttcttgaagtgtatcaatttgcaacatctgttaaaggaattggacctagaacggctatcgctttaatttgttatactaaaaactttacaacatttaatacgcccagagaattagcttcttactgtggagtggtaccttttcaacatacatcaggaaaaagcattagagggaaaaacaaggtgcactttatggccaataaagatttaaaaagactacttcatttatgtgctgtttcttgtattcaatctgacccagagataaaaaccttttatgaaagaaaacaagacgaagggaaacacaaaatgtcaatactaaatagtattagaaataaattagtacatcgtatctgtgcatgtgtaagaaatagaaaaatgtatgttgaaagacaaatagcataaaagactagtttataccactaaattataaaatatagaggatagttttaactatcctccaatattcctatgcgttgttttattgaaatatcattaaaaaaacgtagtaatttttacgaattatcatttgcttatatcatagcaat

SEQ ID NO: 1413 - DNA, 1441 bp, unidentified
  source 1..1441: mol_type = unassigned DNA; note = element_1cb6eff
  misc_feature 1..2: note = core
  misc_feature 3..205: note = LE
  misc_feature 206..1426: note = CDS
  misc_feature 1427..1441: note = RE
  misc_feature 16..206: note = bridgeRNA
gtcctaccttccaagcgtgggtctgagacggtcattcgtaagatcgtcggactcgggggttccgggtatggctgtgagcttgtcgccgcttgatggctcaaagaacttggccacccggagccccgcgacgactcgaccgctaattgggatacgcgactcgatcgctgtgtaggacaacgtcggcgaggtcgtctgctgggcttctgtgtgtgacgacgagctggcggaggtgaccgtgcccgagatctggggcggggtggacatcggcaaggaacatcaccactgcgtggtgatcgacgcgcaaggcgagcgccttctgtcgcggcggatcctgaacgacgagtccgctctgctggagctgatcggcgacgtcctcgcggtctccgaggacgcgttgcgggcagtggacatcaaccacggcggggctgccctgctcatcggcctgctgatcagccacggtcagccgatggtctacctcaccggacttgccgttcaccaggcgtcagccgcctaccgaggccagggcaagacggacgcgaaggacgccttcgtcatcgccgaccaggcccgcatgcgcaaagacctcggcgtgctgcggccctgcgacgaaatagccgtcgacctcaagatcctggtcagacgccgcactgacctggtcaacgaccgcacccggcaggtcaaccggctgcgaggacagcttctggagatcttcccagcgctggagcgttcgttgagcctgacgaacaagggacccctcctcttgctgaccggctaccagacgccggccgcgatccggcgcagcggcgccaggcgcatcgagacctggctgaagaaccgcaaggtcaagggcgctaccgccctggctcaggtggccgtggaggcggctcaggctcagcacaccgcgctgcccggcgagaagctggccgcctcaatggtggcccgtctcgccaagggggtgatggccctcgaagaggagatcgccgagctcgacaccttcatcgaggcccggtttcacgaacacccccatgccgaggtgattcgcagcctgcccggcgtgggtgccctgctcggcgcggagttcgtcgccgccacaggaggcgatctggaagtcttcgggactgccgaccggctggccgcgtttgccggtctctccccggtcccgcgtgactccggccgcgtcagcggcaacatgcgccggccccgccgttaccaccgcggcctcctgcgggccttctacctctcctccatggccagcctgcgctcgtgtccagcgtcacgggcgtactacgaccgcaagcgcgctgagggaaagggacacaagcaggcactgctgtccctggcacggcggggagccaacgttcagtgggccatgatccgcgacggagcgtggtaccaagccgcacccccagtcacccttgccgcttgacatcctcattgggaa

SEQ ID NO: 1414 - DNA, 1757 bp, unidentified
  source 1..1757: mol_type = unassigned DNA; note = element_1cb6f5c
  misc_feature 1..2: note = core
  misc_feature 3..166: note = LE
  misc_feature 167..1393: note = CDS
  misc_feature 1394..1757: note = RE
  misc_feature 1419..1566: note = bridgeRNA
ggagcattcctgtttggttagtggaaccctattgaaatagaaaagtccccttggtatgattcggggtgtcaaggcgtcgacggcttgacccctaattataaccaaggaggactcacatgaattctaaagaaaatactaaaattaatcaagtcacagacaaacattagtgataggtatcgacattgctaaacataatcattacgcaacctttgtcgatgaacgtggacgtgttttgaaaaaagcatttctcgttaaacagacgcgtaaagggtttgaacagttctatcaagaaatactagagggtatgaaagaattcgataaatcgcatgtgatagtgggcgtggagcctacaggacattactggttgaatttagcatatttcctagaggactacggtataccactggtcgttatcaatccgatgcatgtgaagaaagttaaggaattagatgataatctgcaaaccaaaaacgataagaaagacgctctgacgatcgcacggctaatgaaagatggtcgtttctcatatccgaagcttcttcgggatcaagcagcaaatattcgttcctgtttcacgcttgagcaaactttaatagacgaccgcaccattctgaaaaacagaattcatcgatgggtagataaatacttccctgagctattcgaggtattctcagattttggagccatggttctaggtgtgttggagacaaccccgttgcctgcagagctggtcaatatgacaacagctgatttagcggatcaatgcgcgaaagcgagtcagatgaagcaaaggcgacccaaaatagcagctaaagtcattgaggtagctcagacatccattggcatcaccgtggctccttggggagctaaacgagagatacaatgtctcattcgccaataccgtctactcgaggaagaacttgcgatgattgaagaggaaatacaatccttaattgtccaaacggctgattatgaatatctcgcttcatttccgggaatttcccgtagaactatttccggtctcttagcggagattggaagttttactgactttgaaagtccacgccaattaattaaattagcgggacttacgttacatgagaattcctctggtaaacataagggaatgaagaagatatcaaaacgaggacgaagacgattacgggctattttattcagagcaatgcatccaatccttagaaacaaccctgcctttatgaagcttcatcagtattatacgcaacgacctcaaaatccccttcgtaagaaggagtcgatggtcgtgttatgtagcaaattactaaaggttcttcatgccatgtgtacaaaaaagcggaaatttgatggtgagcaaatgcttgcggaccttcactgtttacaattagtagcatgaggttggcattctgaaacttctattcatgacacggagaagctggcaccagcggcgtacattaggcctcgagcctcatcgggagcatctcgccggcctccaacttatgatagaccgaacgaaggaatgtcagcgcatgacgctaagagatgtgggagggttcgtcatcataaggtacttggagatccatagtgcatgccatattaaattaacagtttctgtaactggtagcgcagcgttatcctttacttacagtatctacaaaagtatgtactttcaggtagacgattctctttactagtcatataaattctttttgggtcaatagaataatgcgacaagccttgtcatcatcaccttttcaaga

SEQ ID NO: 1415 - DNA, 1217 bp, unidentified
  source 1..1217: mol_type = unassigned DNA; note = element_1cbf0c4
  misc_feature 1: note = core
  misc_feature 2..214: note = LE
  misc_feature 215..1186: note = CDS
  misc_feature 1187..1217: note = RE
  misc_feature 34..203: note = bridgeRNA
tcttaagtttacaatctattatatttagattataaacagaaaagacaaaagagaggaataaggttattatacacgcagaagctttagacttcgtcaacattgaaaaccccctctcttttctacacagatttcgtacagttctatgaggccattagacctcgcttttaagtcgttgaaactcgcgtagattgtcctttcaaaaaaacatcttcttatgaataaaggtattaaatattttggacttgacattagccatttggtgtttgatgttacagattctgatggtaattattaccagtttaaaaacaatgaatttgactttaagaagtttacaaaactcttaaatactgagagtcattgcgttatggaagctacaggttattaccattatcagttagcctatcatttgctagagtctggtataaaagtgtcagtagagaaccctttagcagtaaagcgttttatccagatgaagttgtctaagattaagaccgataagagcgattcaaagcttatatgtgagtacgccggtcaagttgaattaaagctttggcaaggtaattctaagactgaaatagaatgtcttcaaatcgtcagagcgctttctgtatatacaaaacagagtactatgttgaaaaacaaattgcatggagaagctgttttaggcaatcccagtaaagcggttgtaagttcattaaatcggagtttaaaacaggttaaaaaagagttagaaactctagaagctaaactattaatattagtaaaacaagtacatcaagatgtgttaacacgcctaaaaactataccaggaataggtaacaaaacagctgttatgttagtggttttaacagacggatttgatcgttttacaagcggaagtgaattgtgtaattatgctggtttaacacccatagttagacaaagtgggagcagtgtaagtggacgacctcgaataagtaaaataggcaaccagaagcttcgtaatttattatttatgtgcagttttaatgcctgtaaatataacaaggcttgccgagatctttatgagcgtttagtagccaaaggaaagagtaaaaaattagcattaattgcggtgtgtaataagctattaaaacaggcttttgcaattgctaaatcaggattaatatatgatgatacttatcgaagtgttttagtaaaaaattaagtgatttttacttgctttttaccacagtact

SEQ ID NO: 1416 - DNA, 1390 bp, unidentified
  source 1..1390: mol_type = unassigned DNA; note = element_1cc1400
  misc_feature 1..2: note = core
  misc_feature 3..208: note = LE
  misc_feature 209..1117: note = CDS
  misc_feature 1118..1390: note = RE
  misc_feature 1088..1377: note = bridgeRNA
agatggggtggttgccgtcctcccctaacggcatcggtatgtgccaacgtggtagatgtgaatagccacgagtaagagagaacggcagatgaacgatacgatgattggcattgatctggcaaagaacgttttccagattcacgcagcttccatcacgggggatttactgttccgcaagaagatccgccgtccacaattcctttagtttatggccagccaaccggcggcgcttgttatcatggaagcgtgtggaagtgctcattattgggcacgggaattggtgaatgcgggtcacgaggtaaagctgatcgcaccgcaatatgtgcgcccgttcgtcaaacgccagaagaacgacgcagctgacgctgaagcgattgttattgctgcccggcagccggagatgcgctttgtgacacccaaagcagaagatcagcaggcacggaccgttttatatcgttgccgtgatcgactggttcaccagcgcactgaactggtgaatgctcttcgcagcacgctttatgagtttggtctggtggttccgaaaggaatgacctatctcaagcgccttgaagagatggtcgacgatgaaagcgttcgtcttccaactcttgttcgtcaggaatgtcgggaccttctcgaacagatcgacgcgcagtcaaggaagattgcagaaaagacccgtgcgatggtcaggctttcgcaagagagcggtgtggctcagcgtctggagacaatgcctggggtcgggcctttgacggccctggccgtggaagcttttgcacctgcaatggagacttttcgctgcggacgcgattttgcggcttggcttgggctggttccaaagcagttttcgtctggtggcaaggaaaggctcgggcgggtttcgaaggccggccaggctgacattcggcgattgttgatcataggggcaatgtcgcgtgtaggctgggcggggcgtaaacctcccgttccgggctcctggctggcccggatgatggcctgcaagccgcgtatgctcgtcgcgatcgcgctggccaacaaaatggcccgaacgatttgggccatgctgacaaaacacgaaaattatcgggatccggttctgactgctgcgagatgagttgaactcagtcgtatgtaagcagaaccggtaaaggggtgtgagaaagcgacgacccatatgggcgcatgatcgagccgatccggattaggaaaaccagccaagggctcagtgttctcaaatacggaacagagatttggacccgatccgcagatcaccatatcggccagcggcttttgtaaatgccgcgttcaaaggcctgacagaagaccgcaatcgatcactcgcacatcagggccagaaacttcttgcatttcagacggcaaccacaga

SEQ ID NO: 1417 - DNA, 1386 bp, unidentified
  source 1..1386: mol_type = unassigned DNA; note = element_1cc3c24
  misc_feature 1: note = core
  misc_feature 2..88: note = LE
  misc_feature 89..1120: note = CDS
  misc_feature 1121..1386: note = RE
  misc_feature 1159..1381: note = bridgeRNA
caatgggatggacccctccccactcctacggcatcgagtgccagactggaagtgtgtagctccagtcacggaatgaggaggggtcgtcatgaagcttactcgcgtgggtgtggatttggccaagcaggtgtttcaggtgcacggcgtcgatcgtgcggagcgaccagtgtggtgccagcggctgaagcgcggccgctggatcgccgaacttgagcgcaacgtcgagccaggctgcgagatcggcatggaggcttgcggcggtgcacaccactgggcgcggctgctgcagtcgaagggctacgtggtgaagctgatcgcaccgcagttcgtgaagccgtacgtgaagagcaacaagaacgatgccaacgatgcgcaggcgatctgcgaggcgatgagccgaccgaccatgcgctacgtggcggtgaagaccgtagagcagcaggatatccaggcggtgcaccgcattcgggcgagcctgatcaccgagcggaccgcgaaggcgaaccagctacgcggactggtgtacgaatacggattggtcgcaccccgggagatcgcctcgctgcggcgtgccatccctgcttggctcgaggacgcgaccaacgggttgagtgctcgcttcagaatgctgttagccgcgttgtaccgcgacttgcggtcgctcgacgagcgcgtccgcgaactcgaccgggagatcgcggcgatcgtgcgggaaaacgaggccgtgcaacgcatcgaacagctgcgcggcatcggtccgctgaccgcttcggcactggttgcgatggtcggtgacggacggcagttcaagaatggccggcacttggcggtagcgctcggcctgacgccgcgccaacacagctccggcggcaaagagaagctactcgggatcagcaagcgcggcgacaagtacatccgaacgctgcttatccatggagcgcgctcggcgctgcgtacggcacccggcaagacagaccggctcagttgctgggcattagccctggcggagcgtgcccaccccaacgtcgcagcagtcgcgctcgccaacaagatggcgcgggtcgcctgggcgatgctgcggaacggcacaacttacgaaccggagcgcgtggcggcctgaacgccatccgccccggctgaacagaggagatcatccaccgcggttgcgagcatccgagtgatggcgaacaggtcgaaccggcgtcggaatagcctgggaatgtccacgggcgcgaagcccgacaaagcaatgaggagccgacgcgcgaatagcccatcgtggcccgacctcggttgaccgaggtcaacatgaggccggatatacgtgagcagtcgtacttcgtcgccagaactcggagtgctagcaagtggggaggggtccatata

SEQ ID NO: 1418 - DNA, 1558 bp, unidentified
  source 1..1558: mol_type = unassigned DNA; note = element_1cc65b0
  misc_feature 1..2: note = core
  misc_feature 3..274: note = LE
  misc_feature 275..1438: note = CDS
  misc_feature 1439..1558: note = RE
  misc_feature 3..254: note = bridgeRNA
cttgtatgatgtatttagaagcaaatacatcattttcctttcatttttgattgatatacatttttgtgacataatacattcagatactgtggacttttgatttttccctgtagctcgactacttgttggagtgtattgccacggtgctgtctgaattgtttataagctggatgtgccagagctttttgctcatgagtacttatttcaatcaagtctacataggtagttaccagtggattgtcacagtatcaattcagagaaaggagatgttgttatgatttatgtaggcattgatattgccaaactcaaacatttcgcctcagccatatcttctgaaggtgagatacttatcgagctatttaaattcacaaatgacaatgatggcttccaattgctggattctaagctcaaatctttagagcctaacagcttcatcattggtcttgagtcaacggctcactacagtaataaccttgtagaattccttgttattaataactacattgttcacgttattaaccccattcaaacctctacaatgcgaaagaataacattagaaagaccaaaacggacaaagttgacacatacgttattgctaaaactttaatgatgtatcctggccgaccttttactaagcaagatattgatcttttgcacctgaaaaacttaggacggtttagacaaaagattgtaaagcaaagcacccgcttgaagatacaactaacttcatatcttgatcaagcatttccggaactacaatacttctttaaatcgggagtacatcagaagtccgtttatgctttattaaaagaagcgcctagtgctgatttaattgcatccatgcatttgactcatctttccaaactgcttcagaaggcatcacatggccactttcataaagaaacagcagaagaacttagaattctggcacggaagtctgtcggttgtaacgacagtagtatatctatccaaataactcagtccattgagcagatagagctattggctaggcaaagggatgaggtcgagtcacagattaaagcaatcatgattccgcttgactctatcattatgactatcccagggattggatacgttaacggggccatgatacttggtgaaatcggtgatttcactcgattctctgatgctagtaagattattgctttcgcaggtattgatccttctgtttatcaatctggtaactttgaagctaataatacgagaatgtcaaaacgtggatccaagcctttacgatacgcattaattaatgcggcccacaacgtggtacgtaataataaaacattcaaagaatactatgataagaaactttctgagcataaatcccattataatgcactgggtcattgtgccggaaaacttgttcgtatcatctataaaatgctgactgataatgtcgtttttaacttagattagtattttgatacttaaaaaatttaaacagcttcttttggagctttattaaagtcggtcattttttaaaaataaaatttacgtaatttctttctactttatacttgacttttcatagctggt

SEQ ID NO: 1419 - DNA, 1613 bp, unidentified
  source 1..1613: mol_type = unassigned DNA; note = element_1cc76f2
  misc_feature 1..2: note = core
  misc_feature 3..238: note = LE
  misc_feature 239..1228: note = CDS
  misc_feature 1229..1613: note = RE
  misc_feature 14..309: note = bridgeRNA
ctactacaatatatttataggttataaggtactactaatcccattagtaatcccttttatctatcatgttgcttaagctgttaaaatgagagggcaatggtcgggcatattcctccttggactttgcgtccgtgattaagtctgccaaccagctgctcattcacagcgttcgttttatgcaggttgaactgctgtttaccagtacgttcgtgtcacaccccagtagattgaatcggcaatgtgtttacgctggctttccattgcgacaaaactgaaggagctgattgtcttgaacgcagtaggtattgatgttgctaaaggtaaaagtgttgtttcgattctccgacctttcggtgaagtgatctctagtccctttgaactctgtcatacttctagtgccatcgacgacttcattcattctctttcaaacctagaaggagaagttagaatcgtcttggaatacactggacgctatcacgaacccattgctcgttggctctcggatgcggatttttatgtcagtgtggtcaatccaaaactcattaaagattttggaaacaattctcttcgtaaagtgaaatctgacaaaaaagatgcactcaaaattgctcgttacgctcttgacaactggaatgacctacgacagtattgctttatggacaagacaagagatcaactaaaaaccatgaaccgacagtttgatttttacatgaaacataagaccgctcttaaaaataatctcattgctcttttggatcaaacctttcctggagcgaatacttttttcaccagtcctgttcgaaaagatggcagccagaaatgggttgattttgtcgcctctttttggcacgtcgattgtgttcgcaaggtctctttgagtgtgttcactgaacgttatcggaagttctgtgtgcgtaaaggttacgacttccatccagataaaccagcgcaaattttcgaagcctctaaagagttgattgctcttttacctaaagacaaaatgaccaaaaacttaattatgcaagcaattgaacagttaaacactctttctaggactattgagcagttacgcctacagatggatcaaacagctgcacaattaccagaatatcctgtagttatggctatgaaaggtgtaggtccttctttaggtccacagatcatggcagagattggcgatgttcgccgcttttcacgtcgaggcgccttgactgcttttgcaggttgatccaggtgtcaatcaatccagcacctataatcagaaaagtgtacgaacttctaaacgtggatctgctcaactgcgtaaatcactgtttcaagtaatggacgttttagtgaaaacatcacccgaaaatgatccagtttacgcatttctttctaagaaacgagcagagggaaaaccgtactatgtttacatgactgctggtgcgaataagtttttgcgtatatattacggtcgagtaaaagagtatctggcttcactttcagaagaggaatgatttttgtttttgagagcataagttgaaaccagcgattatcggtggttctatttgtcatgccttcaatccagatagctctctttccaattttttgcttgactttttatttgcagg

SEQ ID NO: 1420 - DNA, 1605 bp, unidentified
  source 1..1605: mol_type = unassigned DNA; note = element_1cc89a3
  misc_feature 1..2: note = core
  misc_feature 3..263: note = LE
  misc_feature 264..1469: note = CDS
  misc_feature 1470..1605: note = RE
  misc_feature 12..283: note = bridgeRNA
ctattacaatataatttggttggaacccctggcaaccagccgggggttttgaccgtctcgtgccaaagctacaataagaggagcaactggctgacctatcgctccttgggctgcgaagcccgtgcaaaagactgtcagccatcctcttgttgcggcgttcggtttaagcgggttgagccttgagttcgcgtcactcaatagattgaatcggcaacgagaaaaagatggattccggttgcagactttgtattggaggaatgagcgtgaactgtgtaggcattgatgtttccaaaggcaagagcatgatcgccgtcatgcggcctttgggagaagtggtgatcccgccctttgaggtcgggcacaccgaaagtgaattgtgtgagttgtcaaagctattggggaacttggatggcgaaacccgggttgtgatggagaccacggggaactaccattttccggtagccagcttcctctatgattccgggttttacgtttccgttgtgaatgccatgctggtacatagttacgggaacaacagcctgcggcgggccaagactgataagaaggacgcaatcaagctggccaactacggtctcgaccactggctgacactgcccagatacatcccagaggatgatgtgcggctgatgctgaaaactacataccggcagtaccagcaatgcgccaaagtacaaaccatgcttaaaaacaatctgatctccttgctcgacaccgcttttccagacgcaaaccgcctgtttgcaagccctgccagggcggacggcagtgagaaatgggtggacttcgtagccgctttcccacactgtgaatgtgtctgcgggctgcctgaaagggtgtttacagccaaatatcagaagtggtgcaggaagcatggctacaactttaaccaagacaaagcgctggacatctacgcctccgcctgtgggcatttcagcgtcatgcctcgaaccgatacggccaagctcctggtggtgcaggcggtgtcccagctccgagctgcttccgcttccctggctgcgctcagaaacgagatgcaatccctggcggcgtccctgccggagtaccccgttgtgatggggatgttcggcgttggacctgccctcggcccccaactcatggcggagattggcgatgtgcgccgcttccactccaaaaaggctctggtggctttcgcgggcattgacgccccgccgtaccagtccggccaattggaagtacgcagtcgtagcatctccaagcggggttcttctgctttgcgcaggacgctgttccttgtgatgagcgtagtcctacagcgttcgcccgctgacgagccggtgtaccagttcatggacaggaagcgtgccgagggtaagccctaccgagtctacatgatggcctccgccaacaagttcctgcgcatttactatgccaccgtaaagcaatacctggacagtctcgaagtctaacaaccaatctcagatccacatatctcaggccagcgtcaaaatttttaatggcggtggcttgagttgttatactcttttttcagccatccaagaatcactccttcttctattttgggcttgacttttattagcgggt

SEQ ID NO: 1421 - DNA, 1354 bp, unidentified
  source 1..1354: mol_type = unassigned DNA; note = element_1cd2841
  misc_feature 1..2: note = core
  misc_feature 3..72: note = LE
  misc_feature 73..963: note = CDS
  misc_feature 964..1354: note = RE
  misc_feature 1119..1352: note = bridgeRNA
ttaataagatggtcacccccaccctgtgagcggtacgctgacagggtgtttttctttctgaaggggatcatcatgcaaaacgttacgctcatcggtattgacctcggcaagcattcgttccatgtccacgctcaggataaaaacggtaatgcattgctacgtaagaagttttcccgcaacccgttaaccgcctttctctctacttgtcccgcttctaccgttgttatggactcctgtgcgggcgcccattttatggcccggcacatcagccagttcgggcatcaggtgaagctcatatctcctcagtttgtccgacccttcgttaaaagcaataagaacgatttcattgatgccggggatatctgcgaagccgcatcacgaccttctatgcgcttcgtgactccgcgaaccgaagaccagcaggctatgtcggcgcttcatcgcgtccgtgacgcaatcgtcagagaccgcgttaaaaccaccaaccagatgcacgctttcctgctggagtttggcattagcatgccgcgcggcatcgcggttatcaggcgtcttgccgcggtgcttgaagagcacgaactgccgccttatttagcgcgattacttatgcgtctccatcagcattacgcctacctcactgaacagattgaagaactcgaacaagagttaaaaacccacatggcggatgacgataccgcgcagcgcttgctgactatccccggcgttggacttatcacggcaagccttttagccacgaagcctggtgatggaaaaagttatgccagcagcagggactttgctgcatcgacggggttagtcccacgtcagtacagcactggcggaaaaagtacgctaatgggcatcagtaagcgcggggataaaaatctgcgacgtcttctggtgcaatgcgctcgcgcttttatgcaacgacctgaacacaatcaggggcggctggctgactaggtgaaggcccagctctcgcggcatcacccgaacgtagtggcctgcgggttagccaacaaactggcccgaatagcctggtcggtgacaacccatcgcacagcttttatccaataaaaagagccaacagggacgaactgttagctcttaggcattacgcagtgactttctggttttgcgacgaccgattattgatgacatgaacggcacagcgacctgcggatgaacctgacataaaaaatggctctttgaagccgtccgctttttaaggttctgcaggcgcggacttcatcgtggcgcgggcaacgtaaggttgcccatcagacgccgtatagatttaagcaagcccatcataaatcaaaatcaacgttgcaaaaacgggggtgaccataga

SEQ ID NO: 1422 - DNA, 1105 bp, unidentified
  source 1..1105: mol_type = unassigned DNA; note = element_1cd3abb
  misc_feature 1..2: note = core
  misc_feature 3..274: note = LE
  misc_feature 275..1084: note = CDS
  misc_feature 1085..1105: note = RE
  misc_feature 34..198: note = bridgeRNA
cttgtatcttgaaatttaattagcatggtgacgaatagatttggcaaggtgtatgtagtctgattcatcccagggtttatagcccgtagagaagctaatgacgcctatactgagccactcatctgaaacccgaacagttgtccgtactccataacgtatttgcaaggatgggtaataatgagtctgccaaatccactttttgtgggaattgatgtttctaaagcgacactggacattgctgccagcagtgatattgctcagtttacggtcagtaatgactctgacggacggttttgatgctattactgatgaactgagaaagtatccggtggtgttggttctgatagaggccactggtggacttgaagctgccgtggcctgctcgtttcagactgaaggctttgacgtcgcggtggtcaatcccagacaggctcgtgactttgcccgcactatgggctatctggcaaaaacggaccatattaatgcacgggtgcttgcacaaatggcggaggtcactaatcgacatccagggcgggaacgctttatccgtgccatgctggatgcggagcgtcaggttcttgctgcgatggtagtgcgccgacgccagctaacagcgatgttgattgctgagcgtaaccgtctttatcccgttcatccacagagcaggaaaagtatcaatatcatcatcaaagagctggctgccagactgagcagtattaaaggggttggtacgatgacggttgcagcgttgctggcggaggtttccgacctgggtagcctctcgagacgagccatcagcgcgcttgtaggcgttgctcccataaaccgggactcgggtaccatgcggggccggcgaaccatctttggcggaaggggcggagtccgaacagcgctttatatcgccgcacttgtcgcaacccgctttaatccggtgataaaagcattttatacgcggctgcttgcagcgggaaaagccaaaaaagtcgctctggttgcctgtatgcataaacttctgactatcctgaacgcgatgctcagaaagaacgaagagtgggatgaatcgtaccatcacgtttctctataattttatcgttcaagacagttg

SEQ ID NO: 1423 - DNA, 1109 bp, unidentified
  source 1..1109: mol_type = unassigned DNA; note = element_1ce4651
  misc_feature 1..2: note = core
  misc_feature 3..170: note = LE
  misc_feature 171..1094: note = CDS
  misc_feature 1095..1109: note = RE
  misc_feature 1..166: note = bridgeRNA
cctgtctgttgttgatgaggtagcatcgcaggtgtggaagggagcccgtccccccccagggccgatgagcccgtgtgggagcaagggtcccttccacgtaacgatcaacctgaacagttgcttgggacggctggccccgatcccgcacgacatggacaggagccttaaccatgccacaaaccgtcatcggctgcgacctcgcacgcggctggatcgatacgcacgtcctgccgtccggcgcgacggcgaggatcgagaatacgcctgaaggcattgcgcgatggatcgcatcctggggggacggcgcacttgtcgtcttcgaggcgacgagcggctgcgacggcaccctgatcgaggcactcgccagccgcggtgttcgcttcgcgcgggtcaatccacggcaagcccgagagttcgccagagctctcggcgtgctggccaagaccgaccgggtcgatgcccgcattctcgctgagatggggcggatgctacccctcgaagccacggcgccacccgatcccgatcgcatgcggctggccgacttcctgcgccgtcgcaagcagttggttgaaatgcgcaaagccgagaaggtccgccgtcacaatgccggccagcctgcgatcttaagtgagatcgaagcgatgatcgcgctcctcgaccaacgcatcgccaacatggaccgcacgatcgccgccctgatcgcggccaatcaagaactctccgaacaggcccggttgctcgccgccgttccgggcatcggcccaacagtgctggcaacgcttctcggcgaactccccgaacttggcaccctctgtcgccgccggatcgcctccttggccggcctcgcaccgcacccgcgggagagcggaacctggcgcggaaccagacgcatctggggcggccgacgcaaggtccgcgaagccctctacatcgcagccctaagcgcctcgcgccggatcccaaccctcatcgcaatgcgagatcgcatgcgggccgctggcaaagcgccaaagaccattctaatcgccatcgcccgacagctcctcgtcatactcaacgccatgatccgacatcgggagcccattcgcctctaaccctgaacacagttg

SEQ ID NO: 1424 - DNA, 1365 bp, unidentified
  source 1..1365: mol_type = unassigned DNA; note = element_1cf52aa
  misc_feature 1: note = core
  misc_feature 2..71: note = LE
  misc_feature 72..1106: note = CDS
  misc_feature 1107..1365: note = RE
  misc_feature 1122..1355: note = bridgeRNA
tatgggatggcccgcccctctcgccgcgatcgattaggatcgtggctagttggagagagaggagcagaccgatggatatcgtggttgtgggaattgatctgggcaagaactcttgcagcctggcgggtttggatgcctcgggccgggttgttttacggcgtcggatgcggcggagttcggtggagagcttcgtcaacggtcttgggcgctgcatcgtggcgatagaagcgtgctgcggggcgcatcatctgggtcgcgtgtttgccgcccaagggcatgaagtgcgcttgatgtcaccggagtatgtgcgcccctacgtgaaggcgcagaagaacgatgagctggacgcggaggcgattgcggaagcggctacccggccgacgatgcggttcgttgtggtaaaaagccaaacccaatcggacatccaggcactgcatcgggcgcgcgaacgcctggtgtcggagcggacggcgctgatcaaccatctgcgggcgctgttgctggagcgtggaatcgtggcgccgcaaggccgccgcaagctggaagaggaactcgcggtctttgcggacgaagatcagatcgaggtgctgagcccccgcatccgcctgctgatcgaagacctgcgggctgagtggcgggcgcttgacgagcgcattacggcctttgacacggagttcgttcggatggcgcgggacgacgaggcggtgcgccgtctgatgacgatcccggggattgggacgatcaacgcaaccgcgctcgcggccgccgtcggcgatgcccgaaccttcgggcgcgggcgggacatggcggcctggctcggactgacaccccgccagatgacgaccggcggcaagccgcgcctgctcgggatcagcaagcgcggcaatcgctatcttcgcaagaacctgatccacggcgctcgagccgtgctgccttacctagtcgaacgcgagacgccgcttggccggtgggcgcgcggactactggcgcgggcgcacaagaacgtcgtcgtcgtggcgctggccaacaagctcgcgcgcatcgcctgggcggtgctggcgcacggccgcgcctatgatgccggatgcgaagcagcggctacatgaggagattgcccgcgcagcgttgatcagcgacgccggcggatcgccgaagtctgtgtgtggtgaaaggaagatggcctgacagtcgaacggcagcttgagaacctgaagcatcgaacggcccctgaggccgctgtgattatgaggattaggctgcgcggatctccatcttggccgggaacacaacccgagaccggatacgttgatgcagactgaccagagccgggcgacaatcacccttgcggacggggcgggccatacg

SEQ ID NO: 1425 - DNA, 1617 bp, unidentified
  source 1..1617: mol_type = unassigned DNA; note = element_1cfdd96
  misc_feature 1..3: note = core
  misc_feature 4..275: note = LE
  misc_feature 276..1451: note = CDS
  misc_feature 1452..1617: note = RE
  misc_feature 29..246: note = bridgeRNA
cttgtatattcatatttgtcagttccgtggtgttctgactacttgttttctgttaatctcccgaaccacgtgggataatagaaaccgtgcagttgggggcatcgtatccctccttgggatttagtctcggcggaaagagtgatgcctcagctttacgggttggattcgtattagctggatgagaagtagtctcgtatctcccacaaggtaggattcccgtgaagaattgtggataacctcatctgcaactttatacgtgaaaggtatgtgcaactatgttttacattggggtggacattgctaagaaagctcatgaagtctgctttatggacgaaaatggtgatgtgcttgacggcaattctttcaagattccgaacactttatccggacttgataaacttcaaaaaatgctggacaaatacaagctatcttctgacaattccattgtcggaatggaagctacaggacactattggttagtgttgtattcttggttcctagataatggttttgaagttaaagttatcaatccaatcgtgacggacggatatcgaaatatgcttatccgcaaggtcaagaacgacagcgtggattctgctattgtggccgatgtcatcagatttggaaagtaccatgaaactcctgttgcatcagaagacgtattgtcattgaagcagctctgtcgatttaggtcctctcagattcaaaccattggagatcttaagagaaaggtaattgctcttgttgaccaagtgttccctgaatacgaaggcctttttactgatatgtttggtaacacatcaattgaagttcttcgagaatatacaacccctgaggaacttgcatcggtatctacaagaaaactgtctaacatgcttgcctcaaactcacatggtcgttttggcaaagaaaaggcgttggaacttaaagctgtcgcttcaaattcaattggaatcaagtttgccaccgatgcattcgcttttcagatccgccaaatacttgaacaaattgatttcgttcaagaacaactgaaggagattgaagaggaaatcaattcttacatggaatcactcggttccccaatcacgaccatacctggtatcggacctgtttatggcgcttccatcttagctgagattggtgatatccatcgcttcccaacagggaaacaattggtatcttatgctggcttagacgcatctgtacacgactcaggagagttaaaaggcacagaaacgcatatttccaaacgcggttctgctttcctcagaagagctatctggggtgctgcatttatcgcatcacattctgatcctgaattagctgcctattaccaaagactcagagcacggggtaaacaccactccgttgccgtagtcgcagttgcacgtaaattatgctacataatcttcgctgttttgagtgaagaccgcccctacgaagtaagataaacaaaactcggcaaaatccttgtatgggcccaccgttgggtgagccattattctattgcacaattcctattcatttttcaaggttcaactgattccaacgtttacgttgcatctttcttgctatttataagaccctgaaaaattagcttgactttttatagctggt

SEQ ID NO: 1426 - DNA, 1398 bp, unidentified
  source 1..1398: mol_type = unassigned DNA; note = element_1d0daa8
  misc_feature 1..2: note = core
  misc_feature 3..80: note = LE
  misc_feature 81..932: note = CDS
  misc_feature 933..1398: note = RE
  misc_feature 1114..1385: note = bridgeRNA
tgttggtatggacggccccccgacggcatcaagcgtgccagaatgaggtcgttgtagatctcagacaaaggagaccgtccgtggaccagattagccgaattggtatggatacgtcgaaacacatttttcagcttcacggagtgaacaccgccgagcagccggttctgcggaagaagctgcgacgcaaggagatgttcgcattcgtcgagacgcttgcgccgacggtgatcgcgatcgaagcctgcggtgcaagccaccattgtgcgcggctgctgcaatcgttcgggcattcggtgaagttgatcgcgccgcagctggtcaagccgtacctgaagcgcggcaagaacgatgcggcggacgccgaagcgctttgcgaggcgatgagccggccgacaatgcgcttcgtgccggtcaagacggctgagcagcaagcagccttgatgctggtcggcgtacgtgaccggctgatccgcaatcgcacgcagttgagcaacgccatccgtggccatgcgggcgagttcggccttacagcggccaaggggaaggctcccctcgcttctctgctcgagcgcatccacgctgatgagagcctgcccgccttggctcgggagctgttcgcggcccaggccgaggaatatgcgcaactacaagcgcaaatcgacaaggtcgatgccaggctcatggcttggcatcgcgccgatgaatgcagccgacggctcaccaagatccccggcgtcggcccgatcggtgcggtgctgctgacaatgaagaccccgcagcctgagctattccgatccggacgccagttcgcggcctggatcggcttgacgccgaaagaccattcgaccgcaggtaaggtcaggctcggcggatcacgcgagccggcgaccaaggattgcgcagcgtgctggtcgtcggggctaccaccgtgatccagcatgctcagcgtagcggaaggccgtcaccctggcttaccgaactcctcaaacgcaagccgccaaagttggccgccgtggcattggccaacaagatggcgcgcatctcctggaaactgatggttacggggaaaactacaccgcaaaggctccgcccgccgcggtggccgacgccgcccagagatcagccagacacggggagcaactcaactgcaaaccgtgctgagctgatgccaccttgcaagataataagcagatggtgtgatcaatcgatccacgacgagagacattccgcattttccagtggccctcgatgaggtcgcccttctgtttggaactcttgtcgcggaaaccatcttggccagcgttcatgtgcgagcgcacaaacaggccggacatatggacgcaagcgatctgattaaaccactgcaaaacaccttgcaaggagggggccgtccacata

SEQ ID NO: 1427 - DNA, 1387 bp, unidentified
  source 1..1387: mol_type = unassigned DNA; note = element_1d11003
  misc_feature 1..2: note = core
  misc_feature 3..131: note = LE
  misc_feature 132..1157: note = CDS
  misc_feature 1158..1387: note = RE
  misc_feature 1171..1352: note = bridgeRNA
acatggggtaatcgcgggaagcgagtcggccctggtcagctagacatggaaaggggtggctgctccccgataagatggaagtacgggctcacgacgcgatgccgggcccaagcatctgatggagaacagccatgggagagtatatcggcctcgacgtatcgatgaaagatactgcgatctcggttcggcgcgacggcaagcgggtttggcgaggcaagtgcgcctcagatccggaggccattgcccgaatggtccgcaagcatgctcaagaaccagagcgagttatcttcgagaccggccctttgtcggtctggttttaccacgctcttcaggctgagggattaccagctatttgcgtcgatgcgcgtcacgccaaggcggcattggacatggccgccaacaaaaccgaggccaacgatgcagacggcttggcgcatctcgccgaagtcggcttctatcgtgaggttcgggtgaagggcttcgacagcatgctgacccgaacgctggtggcagctcgcacgaaactggtcaggatcaagatcgagatttcaaaccaaatccgcggcctgatgaagacgttcggcctcgtcgtacctgcaggcaagggcagtacattcgacgcaaacgtatgcaccaagttgagcgagagttcggacctggcgggcatcatcttaccgctgctcgaagcttggcgcagcgtgcgtatgcgcgccgccgaacttacgcggcgcctgattggcgatgcgcgtcagagtgaggcctgccagttgctgatgtctatcccaggcgttggcgtcgtcaccgcgaccgcctttgcgacggccgtggaagagccagccaacttccgaacgtcgcgatccgtcggcgcctggctcggcctgaccacacgacgataccagtcaggccaggtggactacaatgggcacatctcccggcgcggcgatcaccaggtgcgaaaccttctatacgaagcggcctgcgtcatccttacccgcagctcggctgaaagtaccttacgagaatggggcctcaagctccgagaacgcgtcggcttcaagcgcgccgcagttgcggtggcccggaagctctcggtcgtgatgcatgccatgctcaagtcaggagagctattcgacaagaccgctggcgcgccagcgtagcaacttcgccggcgagcagttggcgagcgaatccgtccctgccgggacgtgggctgaaccatcccgcttgatgggatgcaccggctttgtgccgagtgcgccgtccacataggaaggttccgtccgccgaagacccaccgtgcggcggcccatgccgaccgcgaagacgaccctgaacccggcatatggtcagctcaaaatctgcttgccaaacgagctgcgattagacg

SEQ ID NO: 1428 - DNA, 1372 bp, unidentified
  source 1..1372: mol_type = unassigned DNA; note = element_1d13dd9
  misc_feature 1..4: note = core
  misc_feature 5..80: note = LE
  misc_feature 81..1100: note = CDS
  misc_feature 1101..1372: note = RE
  misc_feature 1137..1361: note = bridgeRNA
atgatggggtggatggcccccttacggcatcgatgtgccaaagttgggttttcgataacgccaacggacgggagccagccatgaaagaggttacaacgatcggtctggatttggccaagaaggtgtttcaggtgcatgcggtcgatcgcgcgggagcggttgtggtgcgtcgcgcgctgcggcgctcgcaggtgctggcgtggtttgccaagctgccaccgtgcctggtgggaatggaggcatgcgccacggcccactattgggggcgcgagctgcgcaagctggggcacgaggtgcggttgatcccaccggcttatgccaaggcgtatgtgcggcggaacaagaacgatgcggcggacgcggcggcgatctgcgaggcggtgggccgtccggcgatgcgctttgtcacgatcaagacggagccgcagcaagctatggccgggatccatcgggtgcgcgatctgctgatcaagcagcgcacgatgctgcgtaaccagctgcgcggcatgatggcggagttcggggtggtggcggcccaaggccggcgcggcctgaatgagttgctggcgatcctgagcgaccccgaagaccggtgcatcccgagcccgttgcacgaggggctgatgatgatcatggagacttggcgcggcatcgagcgcaagctcgaggagatcgaccgacaaatggtggccgccgggcgtgcggatgcgacctgccggcacctcgtcaccgcccccggctatgggccgatcctgtcgagtgcgatggcggcgctggtgatcgatcccggcgccttcaagcgagggtgcgactttgccgcctcgctcggtctggtgccgcgccaggacggcaccggcggcaaggtgcggctcggcccgatcagcaagcgcggcaacggctacctgcgccggttgctggtcaacggcgcgacctcgctgatcaaatgccaacacatcaggcaagatccatgggtagcaaagctgctcgccagcaagccgcgcaaggtggtggcggtcgctctggccaacaagctggcgcgcatcggttgggcgttgatgacgcgccaggaggacttccgctgccggctggcggcggcctaagcggccgcgcgcggcaggtccggaaggcttgcgccggaaggcttgcgagggtgaacacgcgtgatggcaatgtcggtcaatccggcgatcgagggcaaccagccgctgtcatcggggcattgcgaccccgccgcaatgatcgggcctcgatccacggttcccatcagggcccgcggccatgtcgtgccgcagcaacaggccgcacacatgaccgcaactggccgcccttgcacatgcgtgaaaaactcttgcgagccgggggccatccacac

SEQ ID NO: 1429 - DNA, 1398 bp, unidentified
  source 1..1398: mol_type = unassigned DNA; note = element_1d1859f
  misc_feature 1..2: note = core
  misc_feature 3..83: note = LE
  misc_feature 84..1127: note = CDS
  misc_feature 1128..1398: note = RE
  misc_feature 1145..1386: note = bridgeRNA
tgatgaggtggaacggcccgctccgacagcatcaaagtgctaaggtggtcgttgttgcaaacgccacaaggagggaccgttccgtgaaagaagttaccactatcggcctggatttggccaaacaggtttttcaggtccatggctctgacgccgaaggcacaccactattcaatagaaagctgcgacgcggagaggtcgtgcgatttttcgcgaaactgccgccatgtctcgttggaatggaagcgtgcggcagcgcccatcattgggctcgtgaaatatcggcttttggacacgacgtccgccttatacccgcgcagtacgtgaagccattcgtgaagcgtgggaagacagatgccgccgatgctgaggcgatcagtgaagcggtgacgcgcaagacgatgcgcttcgtgcctatcaaatctgctgagcaacaggcgtccgtcatggttttccgcgcgcgtgctctgctcgtgcgccagaggacacaggcgatcaatgccctgcgcgctcacatgggcgagctgggcatcatcgcgacggtcggcatcgcgaatgtgaagccgctggcagcaatcgtccgggatgaaagcgacccacgcttaccacccgccgcgcgtttcgctcttgaagagattgtcgatcaggtcgatcgcttggctgtgcggatagaaaagctggagcgtgaaatgatagccgtcgccaagcaggacgaagatatgcgccggcttgccactattcctggcgtcggcgccatcaccgccatggcaataaaagctttcatcccggatccggctgggttcaagtcggcacgtcattttgcagcttggatagggctgacaccgaaatcgcattcaaccggaggaaagcaacgtctcggccgcatctccaaaatgggcaactcccaattacgatcactcctggtggttggcgctgcttctactctccgccacgttagaagtgatgacaaagcacgaccctggctgcgcgagctgctcgcacgacgaccattcaaggtcgtgtcggtcgctctcgccaacaagacggcccggatgatctgggctcttctgacccgaggagggatatatcgcgggcccacgaggctgcaggcaggaagcattccggcatgacaagcaaatcaataaccgagatctgacggcgaaggccggcaggtagaggtgcaaaagaatcgatgaactgacgggacaacatcccgaagcaggccaggccgaaacccgcgtcgtgcatgacagcacgaacccctgatcaagccatctgcttcgcgaacctcatcgaggccagcggtcatgggccgcacttaaaggccggacatatgaccgcaccgttcccgtatggtgatatcgacgaaattgcgccttgcaccgcgggccgttccacata

SEQ ID NO: 1430 - DNA, 1413 bp, unidentified
  source 1..1413: mol_type = unassigned DNA; note = element_1d223da
  misc_feature 1..3: note = core
  misc_feature 4..86: note = LE
  misc_feature 87..1136: note = CDS
  misc_feature 1137..1413: note = RE
  misc_feature 1155..1400: note = bridgeRNA
tgatgtggtggacggcgcccactctgcggcatcgaagtgccataggatggttgcgtcgaagcaaaccacattgaggggagccgtccatgggcgaggttatcacgatcggtctcgatattgcgaagtcagtatttcaggttcacggcgtcgatgccgatggcaccgtggtgatccgcaagcgtattggtcgggcgaaggttcttgaattctttggcgatttgccgccttgtgtcgtcggcatggaagcgtgcgcaacggcgcaccaatgggcacgcgaactcaagatgctcgggcatgacacgcggctcatgccgccgagctatgtcaaagcctacgtgaagcgtggcaagaacgatgcggccgatgcggcagcgatctgcgaggccgtaacgcggccatcgatgcggtttgtgccgatcaagagcgttgggcagcagagcgcgctgatgctgcatcggacgcgggatcttctgatccgtcagcggactcaactgatcaacgcacttcgtgcccacctggctgagctcgggctagtggcagcgaagggacgtgaagggttgcagcaactgattacaaccgtgacgaagagcagtgatgagcggctgccaactgacgcacgctttgcctgccagaccatcgttgcggaattgcacgcgcttcagatccagatcggcggcctcgacaagcgtatcactcagacccatcgcactaacgcagacagcaaacggctcgatgccattccagggtttggcgtgatcctgtctacagctgtcgtggcgacaatgacggacccgaaggcgtttaagactggccgcgagtttgcagcctggatcggactggtgccgcggcagaactccaccggtggaaaggagcgtctcggctctatttccaagcagggtgatcgctacctgcggcgactattagtcgttggtgcaatctccatcgtgaggaccgctcggatgtggccagacaaatatccctgggtgatcgaactgctggggcgtcgaccagccaaggtggtcgcggtggcgctggccaacaagatggcccggatcgcgtgggcagtgctggccaagggtgagaactatcgagcgccaacccgctcaagcaacacaaccatcgcggtggcggcttgaagggcttggcatcgaagtagtttgggaagctgcgtccaggcgcacaagaaagtcgagggtgataatggtttgatgcgaaccggttggaccggggattgggagaacccgctactgggtcaagcgctcttgagcgcgggcgaatgatagggactcgatctgcggattacatcagggccagcggtcatgagcgccgcaccaacaggccggacacatgacttgcacccgaccgcaagctgagaaccaaaaaatcccttgacccgtgggcgtcgtccacaca

SEQ ID NO: 1431 - DNA, 1412 bp, unidentified
  source 1..1412: mol_type = unassigned DNA; note = element_1d28783
  misc_feature 1..2: note = core
  misc_feature 3..84: note = LE
  misc_feature 85..1113: note = CDS
  misc_feature 1114..1412: note = RE
  misc_feature 1156..1399: note = bridgeRNA
tgatgtggtggacggcgcccgctcccggcaacgaggtgccattagggtgatcgttgtcagcgaatcacatcagggagcgaccccatgcaagtgacaacgatcggtttggatatcgccaagaacgtgttccaggttcacgggatcgacgtggccgagaaggtcgtcgttcgcaagcaactgcggcgcagccaggtgctggagttcttcaaggcgctgccgccttgcctggtcggcatggaggcctgcgcgacggcccattattgggcgcgggagctgacgaagcttggccaccgggtgcggctgatgccggcgaaggacgtgaaggcttacgtcaagcgcaacaagaacgacgccgctgacgccgaggcgatctgtgaggcggtgcgtcggccgaccatgcgcttcgtgcaggtcaaatcggcagagcagcagggcggtttgatgctgcatcgaacgcgcgatcttttgatgcggcagcggacccaactgatcaatgccctgcgggcgcatatggccgagctcggcattgtggctgcccagggggatgccgggctcaaggagctgctgaagatcattgcggtcgaacgggatgcgcgcttgccggtcgatgctcacgccagccttgtggtattggcggcggggcttcaggcggtgcagacgatgatcagatcgatcgagaggcggatcattattcagcatcgctcgaacgaggcgagcaagcggctcaagaccatccctgggattggcattgtgggcgcgaccgccattgccgccactgtcccggacccgaaggtttttcgatcaggtcgtgactttgcggcctggattgggctcgtaccgcgtcaagattcgaccggcggcaaacagaagcttgggccgatctcgaaacagggcgaccaatatctgagacgcatcctggtggttggagcccatgcggtattgaaacgggcccggcagcagccggagaagtatccctgggtgacacagcttctcgctcgcaaaccgttcagggtcgtggcggtggcagttgccaacaagatggcgcgcatcgcctgggcattattggccaagggcggcacctatcgcgcgcccgcgcttccggtagcggcgtaaggagtctgccgatgggagaatgaggttgcgtctgtgcgttcacgaactgcaggggtgatgacgacgttgatgcgaaacggtcgagaccgtcgatcgggaaaacccgttaagggccacgcgatacttgagcgcgtgcttttggttgggacccgatcagcggatcacatcagggccagcggccatagcggctgcatcgcaatggggcaagcctccaggcgaaaacaggccggatacatggctgcacccgaacgcttcgcaaaacgtcagattcatcttgcaccgcgggcgccgtccataca

SEQ ID NO: 1432 - DNA, 1511 bp, unidentified
  source 1..1511: mol_type = unassigned DNA; note = element_1d2c8ff
  misc_feature 1..2: note = core
  misc_feature 3..225: note = LE
  misc_feature 226..1491: note = CDS
  misc_feature 1492..1511: note = RE
  misc_feature 7..243: note = bridgeRNA
ctaataagagataccggatcggttctggtgcagactcggtgccggtagccgccggtgagtgagcactcctgcaaccaggacagttggggagtcctacacgtagatcgtgccctcgccggtggtcgggggagtcgaccgctgatgggatgtcgtgcccgccgtgttggcgtgagcactcgtttattaggtcgccgggattctcctgctggctactgcaggtagcacatggacagaaagggggaagcctgggtgctgtttgttggtgatgattggtcggaggagcaccacgacatcgaggtgcaggatgaggctggtcgggtgctggtgaagacgcgactgccagagggtgtggctggcatcgaccggctgcataccttgatcgctacccacgccaccgacgatgttgatcttgacgatgttgatcttgaggtggcggtggggatcgagaccgagcgggggccgtgggtgcaggctttggtggcatcggggtatcgggtgcaggccatgaatccgttgcaggtggcccggtaccgggagacccaccacatctccggcgctaaaagcgacaagaccgatgctcacattctggcccagatggtgcgcaccgaggggcaccggctgcctaccgttgccggggacagcgagcaggccgccgcgatcaaggtggtggcgcgcggccacaagagggtgatctgggaacagactcggcacatgctgcggctgcggaacatgttgcgggagtactatccggccgcgctggccgcgtttggcgacctgaccgccccggaggccttggagttattggccaaggcagccgatccggcggcgggggcccggttgaccatcacccagattactgccgcgctgcagcatgcccgccgccgccaggtagcagcgaaggcgcaggcgatccagtacgcactgcgcagtccgcagttgcgcttgcctgagctggtcactgccgcctatgcggcgaccgtaggttcccaggtagcgatcctggtcaccctgaacgcgcaaatccaggccctggaggagcaggtcgaggcccattttggtcagcacccggacgctgagatctacctcagccagcccggcttggcatccattcttggtgcccgggtgcttgccgagttcggagacgacccgcaccgctaccccgacgcgcggagtcgcaaaaactatgccggcaccagcccaatcacccgccaatcggggaaaacgaagctggtggccgctcgtcatgtccacaacgaccggctcgtggacgcgctaggccagcaggccttctcctcgctcagctgctcacccggtgcccgcgcctactaccggcagctccgcgaccgcgacgtcggccaccacgccgcactccgccagctcggaaaccggctcgtcggcatcctccacggctgcctcaaaacacacacccgctacgacgaagcaaccgcttggtctcaccacggccaacacgaattgaccaacgcggcttgacatcaaacggcatgggatgt

SEQ ID NO: 1433 - DNA, 1205 bp, unidentified
  source 1..1205: mol_type = unassigned DNA; note = element_1d2d873
  misc_feature 1..3: note = core
  misc_feature 4..212: note = LE
  misc_feature 213..1190: note = CDS
  misc_feature 1191..1205: note = RE
  misc_feature 11..207: note = bridgeRNA
cttgtatcttgtcagcggtcgtaaaatcgaccgggcgggcgcgacagaccgactccggccctggtccaagtagagaccgcaagaagcggtagggtcgtcgcgcccctttttcggccaacagagcccgaacagttgccagggcctctccgagacaaacacggggagagcccgtatccgcaaggacgggccacgagaccaaggaggtgccgcaaatggtccacgagcgtgcggaggcttacgcgggggtggacgtctccaaggagcgcctggaggtctgcgtgcggcgcgaccgggaggcgagggtaggtgaggacaccttcggcatctccaacgaccccgctggcacgcaaacgctcctggcccgcctcctgcaggagcgtcccgccctagtgatcctggaggccaccgggggcttcgaacggcccgtggcagcggctttggccgccgcggggctgccggttgcggtggtaaaccccaggcaggcgcgcgacttcgcccgggccacgggtcggctagccaagaccgatcgcatagacgcccagatcctcgcgcgcttcgcccaagccgtccgcccggccccgaggcccgtccctgaggaggaagcccaagcgttggcagagatcacggcccgccgtcggcaggtagtggggatgctaaccgccgaaaagaaccgcctcggcgcagccaccaccaagcccgtgcgtaagcgactagaggcgcacgtcaggtggctggagaaggagctctctcgcaccgaccgggatctggaggaggcgatcgccaagagcccaacctggcgcgagaacgaaaagcttttgcgcagcgtaccgggggtggggcccgtagtggcaagaacgctcttggccgagctgccggagctcggtagcctccggcccaagcagctagccgccttggtaggagtggccccgctcaacagggactccggcgccttccggggtaggcgcgcggtgtggggcggcagggccacggtgagggcggcgttgtacatgggtgcactggtagccacgcgccacaacccgcagatcaaggagttctacgagaggctcctcggcgccggcaagcccaggaaggtggccttggtggcctgtatgcgcaagctgctgaccatcctcaacgcgatgctaaagaaccgtaccccctggaggacgcctcaaacccgagccccttgactttaaagacagttg

SEQ ID NO: 1434 - DNA, 1363 bp, unidentified
  source 1..1363: mol_type = unassigned DNA; note = element_1d34506
  misc_feature 1..2: note = core
  misc_feature 3..71: note = LE
  misc_feature 72..1097: note = CDS
  misc_feature 1098..1363: note = RE
  misc_feature 1133..1360: note = bridgeRNA
ttaatgagatggtcccctccaccctacgagcgggttacgctgtagggtgtttttctttctggagaccatcaatggatagcgtgacgctggttggaatcgatctgggcaaacattcgtttcatcttcacggccagaacaagcaaggtaaagctgtgtttcgcaagaaggtgagccgcaagcaactggttgagttctttgccacgtttcacgcctgtacggtggtcatggaagcctgtgctggagcccattacatggcacgcaggctggctggattcggacatgaggtcaagctcatttcgccgcagttcgtgcgccccttcgtcaagagcaacaagaacgacttcgtggacgcggaggcgatctgcgaagcggcatcccgcccgtccatgcgatttgtgacgccaaagacggagctgcagcaaacgctgtccgccctgcaccgggtccgcgagtcgctggtgcgcgatcgcacgaagactaccaatcagatccacggcttcctgcttgaatttggcatcagcctgcccaagggcaaggcggttatcacgcgtctgcccgccgtgctagaagagcattcattgccgccgcacctggtcacgacgcttgaacgcctgcacaaacactacaagtatctcggcgaacaaattacggccatcgagaaggaaatcacccagcaactcgccgccgacgatctcggtcagcgtctgctgagcatccccggcgttggccccattacggccagtgtattggcggcggagatgggggatggcaaacagttcggctgcagtcgggattttgctgcgtccatcggcctggtgccccgccagtacagtacgggaggcaaatcaaatttgctgggcatcagcaaacggggtgacaagaatctccggcgcctgctggtgcagtgcgcccgttcctatatgcagcggctggagcggcaaacgggccggcttgccgattgggtccggggcatgctcaccagacggcactcgaacgtcgtggcttgcgcgctggcaaacaagctcgctcgaacggcatgggcgctggcaacccactatgcaacctttaacccggagccgaccggcggacctgcctgatccgccgacgccctatcttgctgaaacgaagtgacgaatcaccaactggttttgcgaccgctgaaatttgatgacgtaaacggcacaacggcctgacggacaacctgccacaaaaatcggccttcgaggccgcggtctttttaaggactgtcaggcgcgactctcatcgtggcgcggggagtaatccccacaacgacgccggatagatttaggcaagccaatcacacatcgaaagtcagtgttgcaaaaacggaggggaccataga

SEQ ID NO: 1435 - DNA, 1305 bp, unidentified
  source 1..1305: mol_type = unassigned DNA; note = element_1d662b6
  misc_feature 1: note = core
  misc_feature 2..276: note = LE
  misc_feature 277..1257: note = CDS
  misc_feature 1258..1305: note = RE
  misc_feature 54..252: note = bridgeRNA
cctttggtctaacaaaggacgtttttattaaatattgctattgttggaacggggggtccggggggtgttaaaaaccaaaaactttgtggataagttactataaaaggcagggtgaacttttttcgttgcttagtctggtggacttcgacttgtattagtccctgccttttatgattgcccaaggcccagctagaatactttctttgctataacaaaggtaattggcaaaaggcaatttattaaattacttaacccataaacgtatgagaagctggaatgttatttttaggtgtcgatgtatccaaactgacgctcgacatctgctgcgctgatcagaatttgcacatcaaaattgacaattgtccaaagggattttgtgtattgaaaaaatggtgcaaaaccaatgaaatcgatttaaagggaactttaatggtgatggaatataccggtggatatgaataccgtttcctccagttctgcgaatcatcattcatctcctattgccggataccggggttggaaattaaacagtcgatgggcatgaccaggagtaaaagtgacagggctgatgccttccgcatcggggagtacggtgaagaaaaaatcaaaaaattaaccccatcaaagccattggataagaacattttagaacttaaacagttgctttcgttccgtaaaagaatagttcgcgaaaaggcaggactggaaagcacggtaaaagaacggaaacacatgtatgggtcaaagaaaaaagatatggttgcccacattgcccgggcgaagataaaggcgaacggggaatacatcctgcgggtagaacaggaaataatgcaggtcattagaggcaatgaagctatgtggctaaactaccgcataataaccagcattaagggcataggaccggttaatggatggatgacaatcgcttacactgaaaacttcacaagctttacagacacgcggaaatatgcggtatacgttggcgtgatccccttcagtcacacttcaggaaccagcataaaaaagcgaacgaaagtaagccacctggcacacaaagagctgaagcaggaattgaaccaagcagctaaaactgcaatccagcatgacccggaactcagagcatatgcggaacgaaagctaaaaaacaaatgctatccactggtattgaacaatgtgaaattcaaactcatattgagaatgttctcactggtaaaaaggggtgaaaaatatgtggagagttaccgaagagcagcttaaagacggctttttttaaattaaatttggaaatatcatgaacctagaata

SEQ ID NO: 1436 - DNA, 1398 bp, unidentified
  source 1..1398: mol_type = unassigned DNA; note = element_1d67d37
  misc_feature 1: note = core
  misc_feature 2..308: note = LE
  misc_feature 309..1352: note = CDS
  misc_feature 1353..1398: note = RE
  misc_feature 118..275: note = bridgeRNA
ctttaattttgcagagtgaatgaaggagtacccgcaactcttaaaatatttaacgttcactaaacaaaaaaaagatgcttagatatacagtttattcttacctttgttgtagaaaggaaggattaaccaccagaggtcaacctttaagtttcgccagacgcaaagtctaacacttgctgcaggccctctggattcaagctgcaaatgccatataggaaggtaggctcgaagcctaattaaagtgatagtcacatacagctttcctttttcagttaatcgcttcctgataattaaatcagtacaaatgtatgaaaaaaatctttatcggcgtcgatgtatctaaagaaaaatgcgatgcaacagcgatttatgcagaaaaaggtctcacagaggtcaagaatttggactattttgtctttgaaaatcgtcctaaaggctttagttctctgttgtcatgggcaaagaagttaaaggctgatgtctccctagagagtatccttttcgtctgcgaaacgacaggagcctacgatcgtgccttatgcgattatatatactccaaaggattggatatctggcgtgagagcgctcttcaaatactctggagcagtggtgtgcgtagaggcaaagatgacaaggcagactcgctaatgattgcagagtatgcattgcatcacatggacaaaatacacctgtacgaatctccagacagtaggattctggagattagagccttatttctttatcgacgcaagttggagcaggaaaaaacatctaaacttgtcagaatcaaggaacttgaagccacagcaggcaagagcaagacaatatcattcattctccgtgacgccaagaaaagtgttcgtcaacttgaaaagagcatcaaggagagtgaagaaaagatccttgaactcgttgacgaagacgaaatgttgagaaaaagctaccagcatttggattcggttaaaggactcggaattgtcaacattacagcattaattgtctatacaaacaatttcagagcttttaaaacatccagaaagatggctagctattggggagtagctgcatttagatcaaaatcaggatcttctgttgataaaagagcggatgttcgtaacctctccagttccatgctcaagtcatatctaacgcaggcagccatgcatacaattgccagaggtggtatctatcatgattactatcaacgtaaaatatcagaaggcaaaactcactcaatcgcactcaacaatgccaagaacaaacttcttcatctagccatgtcgttggttatccatgacatggactatgagatgaaccacgaacttttgaaagttcagagagcgacaaattaaatttatgtttcattaacttaatatattttgaaatttctataggaag

SEQ ID NO: 1437 - DNA, 1358 bp, unidentified
  source 1..1358: mol_type = unassigned DNA; note = element_1d6eac4
  misc_feature 1..2: note = core
  misc_feature 3..224: note = LE
  misc_feature 225..1220: note = CDS
  misc_feature 1221..1358: note = RE
  misc_feature 48..212: note = bridgeRNA
tcctttagatttgtaaagagagaatatgataattttgtagagaataaataaaacaacctaatcagcaagatgtaccaatttaatcacaaagcataatggcttataattagaaaaggatcttgttgattttactaaaaagtatcagactagtaattaagacgtcgaggtctagtatcaaggtttagataatcctttagtaataggttgctttaaataattatcatatggacaaatttacacaatttattgggatagacatttccaaagagtattttgatgcagctatttatatagatgctaattcttataaacacaatcagtttgacaacactaagaagggagttaatcaatttattaagtggatgaaaaacgaaggatgttgtgtagaggaaacattgatatgtatggaacatacaggtatttataaaaatattttagtagatgttttactttcaaaaaattgcaatctatgggtggaaatggcttatagaataataaaaagtagtggaatacaaaggggaaagaatgacaaagtagattctacaagaatagcattgtatgctaaaaaaaatcaagaagaagcaaaattatttaaggcttcaaaggatgtattggataagattcaagttctattgggacaacgagatatgaatatagctcataagacagctatggaagtaagaaccaaagaactcaagggatttaatgatgaactgtataaggtattatctaaaaatgataaggctattctcaaggcattagagaacgctataaaggcgattgagaaacagttaaatactcttattagagagaatcaagaggtatctgagatattcgattgtgtgacttctgtaagaggtgttggagatgttacagcaatgtttctaatatgctataccaatgcgtttacatcatttgaaacatcaagacaactggcatcttattgtggcgtcgtaccttttgaatacacttctggtaaaagtataagaggaaaaccaagagttcattttatggccaataaaaagcttaaaaaacttttacatatgtgcgcattatcaagtgttaaacatgatcctgagatgaaagcctattatgagagaaaagttgcagaaggaaagcacaaaatgcttgtattaaacaatgttagaaataagcttgtagaacgtatatgcgcttgtgttagggataaaaaagcttatgaagtacgtcaagtagcataagtcttatactgtaaattataaacaaaatagaggataatattgatattaccctcaggttaaacatgccttattttattgaattattctcaaaaataaggaatgaaatatattaataatcatttgcttttatcatagtaa

SEQ ID NO: 1438 - DNA, 1512 bp, unidentified
  source 1..1512: mol_type = unassigned DNA; note = element_1d70a0f
  misc_feature 1..2: note = core
  misc_feature 3..79: note = LE
  misc_feature 80..1249: note = CDS
  misc_feature 1250..1512: note = RE
  misc_feature 1248..1499: note = bridgeRNA
tgatggggtggatggccccctcacggcatcgattgtgccaaagttgggtgtcaggaacaccaacggacgggagccatccatgacagaggttacaacgatcgggctggatttggccaagacggtattccaggtgcacggggttgatgcatcgggggtggtgagggtgcgtcgcgcgctgcgccgttcgcgggttttggcgtttttcgccaagctgccgccttgcctggtcgggatggaggcatgtgcgacggggcactattgggcacgcgagatcgccaagctgggtcatgaggtgcggctgatcgcgccggcctacgccaaggcctatgtccggcggaacaagaacgacgcagccgatgccgaggcgatctgcgaggcggtgagccggccatcgatgcgctttgtcgcgatcaaaagcgagacgcagcaagcggcggccggcattcaccgggtgcgcgagatgctggtgaaacagcgcacgatgctgatcaacaccttgcgcgggctgatggccgaatatggcatcgtcgtcgccgagcgtcctcgactcgtcggcgaactggtcgccatcctggccgatccggcggacgagcgcatcccagcgccgctgcatgacggcctgatggcgctggtggaaacgctgcgcggtctcgagcaacgcatcgagcggatcgagcagcagatcgtcggctggggccgcgacaatgcgacctgtcgtcacctgatcaccatcccgggctacggaccgatcctgtccacggcgatggcggcaatggtgatcgaccccgcggctttcaccagcgcgcgacacttcgcggcatcgctcggcctcgtgccgcggcaggagggcactggcggcaaggtcaagctcggtccgatcagcaagcgcggcaatggctatctgcgccggctgttggtcaatggcgcaatgtcggtgttgtgcagcaggcgcgccaaagaggatccctggctggccaaattgctcgaaaccaaggagcgcaagctcgtcgcctgtgcgctcgccaacaagatggcacgcatcgcctgggcggtgatgatgcgccaggaggactaccgcaaccggcggcacgatcagtcgtgcccccgacctgaacgagcctggcgccgtgctcaccgccgtcaagaccgctgcgcgcacgcctgcggcggtggccttcggcctgtcttgactgcggctgcgcgcagcgccactgcggaaccaggtcgggacggagaaacggctcgctgatcgaacagagaaacaggacttgagcacacaggacttgcgagggtgaagacgcgtgatggcatcgtcggtcgaccgacggatcgagggagacctatccgaggacatggggcaacgcgaccccgcgagcctgatcaggcctcgatccacggaacccatcagggcctggggcctaccgccgcgccaacaggccggacacatgaccgcaagcgaccttcggttccagtacgcgaaattctccttgcgagccgggggccatccacaca

SEQ ID NO: 1439 - DNA, 1431 bp, unidentified
  source 1..1431: mol_type = unassigned DNA; note = element_1d75879
  misc_feature 1..3: note = core
  misc_feature 4..120: note = LE
  misc_feature 121..1161: note = CDS
  misc_feature 1162..1431: note = RE
  misc_feature 1185..1383: note = bridgeRNA
agatggggtaatcggcttagagcccattttccccggaatggaggaaggtgttgcgcttccagtcgatggtagacgtggtctgtattgcccagccacaagcatcaggaaaggaagcgcaacatgaagcattatgccggtctggacgtatccgtgaaagagacctcggtgtgtattgtcgacgagacgggtgagatttgccgggagcgaaaggtcgtcagtcatcccgatgacctcatcgaactgctgtgtgaccctcgatggaatctggagcggatcggccttgaagcggggccgctgtcgcaatggctctacgagggcctggcgcgcgccggcctgccggtgatctgcatcgagacccgccacaccaaggcgtttctcaaggccattccgaacaaaaccgaccgcaacgatgcgcgtgggattgcccagatgatgcgtgtccatctgttcaggccggtgcatgtgaagacgctgacgagccagaagcgccgcgccctgctgacggcccgcacgctgctgcaaggaaaggcgatcgccatcgagaacgaccttcgcggactgctgcggaacttcgggctgaaggtcggcatggtcggaaaggtcaaatacgaggatcgtatccgcgaactgaccgagggtatgccggagctggccgagatcgtggagccgcttctcgccgcgcgccaaaagctgcgggaagaatttgcaaagctggatcgtaaagtgcgggaggaagtcagaaccgatccggtttgccggcggctgatgacggtgcccggcgttggtgcgatcgtggcgctggcctatgcggcgaccatcgatattccggcccgcttccgcagctcccggtcggtaggagccgtgctcggattgaccccggtcctcaaccagtcgggcgaaagcaaccgcaggggccgcgtctcgcgatgtggcgacgggatgctgcgcagcctgctctacgaagccgcgcaggtcttgctgatccgtgtccggaaatggtcctggctgaaagcctgggcgatgaacgtcgcaaagcgacgtgggctgcaaaaggccatcgtggcgttggcccgccggcttgccgtgatcctgcaccggatctggagtgacggaaccgagttccactggacacgggaggatgcgatagcaattgcagcataagcatcgctcttcgaagagcatgtaaagttccgcctcgcggcggaagacgtccttcgcggacggtgggtgatgtgagttcgggaaagccgttattcgatagcgccatgcgctgtcaggatgcggatgagattgggccatgtcactcttctgaccccatggagggagggctatacgccgatcccggagagaagcgcgggccgcgaaaagacgttgaacgccgcgccggttgaacagatcgattgtggttgaccccaccacgccgattagaga

SEQ ID NO: 1440 - DNA, 1365 bp, unidentified
  source 1..1365: mol_type = unassigned DNA; note = element_1d78830
  misc_feature 1..2: note = core
  misc_feature 3..76: note = LE
  misc_feature 77..1102: note = CDS
  misc_feature 1103..1365: note = RE
  misc_feature 1117..1350: note = bridgeRNA
agataattggactcccccacattgagcctgtggagtaatattcaagtaaccacacaaaaatattgggggcccaaaaatgcataatactagagttggcgttgatttagcaaaagatgtaatccaagtttgcatcttcaaaaacaataaagtgcaatcaaatacagaaatgacgacagcagagtttgcaatttggctagcatgctttaaacccgcctttattatatttgaagcctgcggcacatcaaattattggttaagaattgctagagaagctgggcatgatgcacgccttgttagcgctaaacttgtatctcttgtcaggcagaatcaaaaaacagatgcaaatgatgctttagccattgtccagacaacctttttacctgatgttaaatacatctctggtaaatcaatggaacagcagcaattacagtctctcaatcgtttgaagcatcttgcagagaaacacgagacagcttccttgaatcaaattacggcattgttggcagaattcaacattaaaacgtctagcagaactggcggtctaggagcggtaataaagaggacattagaggatgcagagaacggtttgactttcgaattcagagaagctctgaatgctgcttggcaacaatgtttggcgctcaagcaatcgattgatgcctattctcgttgtttactcaaaacggttaatccgcatactgaatgtaaaaaacgactcaagcttgaaggtgtaggcgctatcaatgctattaacctgtatgttgccttagggtgttgtgaattgggagttttcaagaaaggtaaggaggcttcagcatgccttggcgttactccaattcagcgctcttcaggtggaaaagtaaaactaggcacaataggaaagaaatgtaaaaacagtaagttacgaagtcagttgattttaggggcgatgtcggccgtacggcaaatgggtaaaaggccagctgtaacaaaaaaagaggcttgggtgcaagaactcgttaatcgaagaggtcaacgttgtgcagctgtcgctctggccaataaaacttttgcaatgctgactaaaggtacgcagtacaaagcagaactattaacagcttaataaggttaaggaatataaaagttcaagaagagaagagttaagcaataaaaatgcaaaatcgaagataaaaatcagcggataaaatcaggaaacaactaagagtctaatcaaatgcaaatttagaactcgctatttagaattgattatccgcccgcgaaaatatcaaagagcctgggttcgctattcaattagagctcgtacataagtgagcatttatttcttcgaaataacatttttactgttgacaagggagagtccacata

SEQ ID NO: 1441 - DNA, 1463 bp, unidentified
  source 1..1463: mol_type = unassigned DNA; note = element_1d7ea49
  misc_feature 1: note = core
  misc_feature 2..225: note = LE
  misc_feature 226..1449: note = CDS
  misc_feature 1450..1463: note = RE
  misc_feature 12..240: note = bridgeRNA
ctactagagacttctcgcagggccggtgtctggccagactcggtccaggtgtccggcggagggctctccacgcggctgcccaccaagtgtcggtgtggctctcttccggtctgcagtccgtcgggcaccgttgacgaggcgtggctcgaaaggggactgcccagctcgtagtagcactgcccacctcgccgtccctatcggcaccaggagaagcaggagaacgctatggcgaaggtgatcatcggggtcgatccccacaagctctcggccaccatcgaggtcgtcgacagtcacgagaagctgctcggctctggccggttcagcaccgaccagcccggctacaccgcgatgcgggcctacgcgaagacctggcccgagcggatctgggcgatcgagggaagcaacggcgccggccgaccactggcccagcgtctgctcgaggccggcgagcacgtggtggacgtcccggccaagctcgccgcccgggtccggctcttcgacaccggccacaaccgcaagaccgacgcgctcgacgcccactccatcgcgatcgtcgcggtccgcaccaagaccctgcgcgtcctgcgccccgacggtgagctcgaagcgctgcggatgctgtgcgaccgccgcgaggagctcacccgactcagggtccagaccgtgaacaggctccaccggctgctggccgaactggtccccggcaaggccaagaaggacctcaccgccctgcaggccaaggcaatcctcgccaccgtgcgcccccgcgacatcgccggcaagacccggcgcaagatcgctgcagaggagctcgccgacctgctcacggtcgaggcaaagatgaagaaggccaccgccgagctcaaggtcctggtcaaggcccgcgactcacggctgatggacctgcacggtgtcggacccgtggtcgccgcccggaccctggccgacgtcggcgacatcgccaggttcgccgaccgcaaccggttcgcatcctggaccggcaccgcacccctcgatgcctcatcgggcgagcagaaccgccaccgcctctcccgagccgggaaccgcaggatgaaccacatgatccacatcgccgcagtcagccagatccgcctcgacaccgagggccgggcctactacaggcgcaagcaagcggccggcaagaccaagctcgaagcgctgcgctgcctcaagcgcaggatctccgacgccctctaccgccaactcctcgccgacgccgaacaagcgcaactcctctgcgcggctgagccagttgacacgggcccgggagggcactgcggggcgtctcaagaatccagcgcggtcgacctacccccgcacatcgacacttcggatcagccacttcccggacccgcaactcagacgctacaaccggccgggcccaccgggaagacctcccagccaaggacgccccaaaccaccggttgacaacaaaggggagc

SEQ ID NO: 1442 - DNA, 1418 bp, unidentified
  source 1..1418: mol_type = unassigned DNA; note = element_1d88daa
  misc_feature 1..2: note = core
  misc_feature 3..230: note = LE
  misc_feature 231..1403: note = CDS
  misc_feature 1404..1418: note = RE
  misc_feature 10..224: note = bridgeRNA
tccctaccttgttgatcgggaggagcgagccattcgtagggttggctcccccaggggcgctgggtgtggctttcagtcgtctgccgtgtctgtggcttccgtggattggccgcccggcgccccacgacgactcggctgctcattaggaattgcggcactgatcgctcagtagggactcgacagcgaggtcgtccgtggtgcctgtacgaacacgacctgcggagaagtacgtgacagcgatctgggccggtatcgacgctgggaagacccatcaccactgcgtggtgatcgacgacaccggcaaacgactgctgtcccgacgcgtcgccaatgacgaggccgaactgctcaagctcctgggcgacgacgccatgtggggcattgacctggcggacggcggggccgccctggtcattgcgatcctgctcaaccacggccggcaactcctctacatccccgggcggacggtcaacagggcctccgagggctatcggggcgatggcaagaccgacgccaaagacgcggcggtcatcgccgaccaggcgcgtatccgacgggatctcaccccgttgcggcccggcgacgagctggtgtccgagctgaaggtcctcacccgccaccgccgtgacctcagcgacgaccgcacccggaccatcaaccggctccgcggccacctcaccgagatctttcccggcctggaacgcgaactcgacctgggcaacgtcggccctctggtactgcttaccggctaccagaccccggccgtcatccgccgggccggccggcggcgtctggtcacctggctgcgcaaccggaaggtccgcagcgccgatgaactggccgccagggccgtccaagccgccgaagcccagcacacatccgtccccggcgaggacatgaccgcccacgtggtgcactccctggccagggaggtgatggccctcaacgagaagctcgcagagaccgacaagctcatcgagggccggtttcgccggcaccgcaacgccgaggtgatcgcgagtatgcccggcatcggctccctgctgggcgccgagctcctggccgccaccggcggcgacatggacgccttcgccagcgcggaccggctggccgccttcgctggcgtctccccgacgccgcgtgactccggaaagatcagcggcaacctgcaccgccccacgcgctacagccgacgcctccaacgcgtcttctacacctccgcgctgatcagcatccgctcctgcgacgaatcccgccgcttctacgaccgcaagcgcgccgaaggcaaacgacacagccaggccgtcacggcgctcgcccgacgccgagtcaacgtcctgtgggcccttcttcgtgacggacggtgctacaaccccataccgcccgtcactccggccacttgacaactccattaggaa

SEQ ID NO: 1443 - DNA, 1195 bp, unidentified
  source 1..1195: mol_type = unassigned DNA; note = element_1d8df51
  misc_feature 1..2: note = core
  misc_feature 3..205: note = LE
  misc_feature 206..1183: note = CDS
  misc_feature 1184..1195: note = RE
  misc_feature 12..211: note = bridgeRNA
cttgtcttatgacttttttgtcgcggtgagcgataaagggccgttcagccggggtggccaccccggctgaacgggaaggggacgggtcgcctgggctggaccatagcgggtcgtggcggagtatgaccgccccttcttttccttgtgccctgaacggataccggggggcttgagccccggatgacaagcataggacatggaaaagatgatcgcgatcgcctcccgtgccaagcctgaaatgcgcgataccccgatcacgatcgggatcgacgtctcgaaagatcaccttgatgccgcgcttcatccgggctccgcgacgcggcggttcgataatgacgccgccggtcatacggccctgcgccgctggatcggcaaacgggcggtggcccgtatcgtgttcgaagcaacggggatctatcaccgtgcccttgagcgccgcctgacccaggcgggcctgcccgtctgcaaggtcaacccgcgccaggcccggcgctttgccgaggcgactggcacgctggccaagaccgatcgtgtggatgcgctcatgctggcccgtttcggcgtggcgctggagcccgcgatacgccaggcccccagtgaaaagcaggcggaactggccgaactcgtcgccgcccgcgaggggctttcgcgtgaccggacgagaaccctgaaccgcaaggccgccacggagaacggcctgctcctgcgtcagacccgccatcgcctgcgtcagatcgaagcgcagatcgcggccatcgacaaggcggtcgcggccctgatcgacgccgaacccgtaatggcgcaccggcgcgatatcctgctcagcattcccggcgtgggcgccaccacagcccatgccctgctggccaacatgcccgaactcggcagcatggaggaggggcaggccggcgcgctggccggcctcgcgcccattacgcgccagtcgggaacctggcagggaaagagcgtcatccggggcggccgcgctcagctgcgccgggccctctacatgccggcactggtcgccatccggcataatcccgatctcaagcgccaatatgacgctctcgtcgcacgcggaaaaccggccatgctcgccatcaccgccgtcatgaggaagctcatcgtcctcgcaaacgcactcctgcgacaggatcgctcatgggcaccaaaaatagcttgatcaagacggata

SEQ ID NO: 1444 - DNA, 1575 bp, unidentified
  source 1..1575: mol_type = unassigned DNA; note = element_1d8f3cd
  misc_feature 1..4: note = core
  misc_feature 5..292: note = LE
  misc_feature 293..1468: note = CDS
  misc_feature 1469..1575: note = RE
tttcgtatcattaatttaagtcagaattaatgatttatcctttctggccgaaatatagtttataggcatacagtcggccaactgatatgcttatagtgtgctgtggatttgtatctatttcgttacagcttattctttttgaatatgactgtttggaggaaattcctaccacagccttttttatttcacggctaataggttaattagctttagaagcttcatcacccgcgaaaatgcttaaaaaggtaagtggacattcaagcagcacacatttatgaaaggaggtgtcgtaatgacccgttttattggccttgatattgccaagtataagcacgactgcttcatcatggatgaaaacggtaatgtcatcacagactcgttttcgttttccaatgatgcagaaggcttcaacacgctccttaatgaactgcagaaactggatccgatccaagagaaaaggatcggacttgaatctacaggacattacggtagtaatctcaagatcttcctagaaactaacggctatagtttcatggagttcaacccgcttctggttcatcgcttcttcaatggtcagacattgagaagaaccaagacagataaggtggacgcccgtaaaatcgccatctatctgcagtctaaggaatacaagcccaatcccaattcatcataccatctggagtgtctcaagtctttatgcagactcagatggtctttggtcgatgaaagaagcctgcagcttgtcagaatgaccaatgtcttagacaagaccttccctgaatacaaggctttctttgaagacagtcttgattcagctacttctttatatctgctggagaactatcccggcgcgtcaaagatggccaggatgtcacagaagtcatataagaagatggcttccgaattaagacatgcgatttcctatgccagattctgtaaacttaaggatctggccaaaaacaccataggtaatgaagacgagatccttatgtttgaactcagtgtatatcttgagcttttcaaagaacttgataagagaataaacgaagtggaatctaagatccagaaggaattctctctgatgaaatgccacatccagacgatcagaggcatttcggatattaccgctgcttccatactttcggagattggagacatcaatcgttttgattcacccaatcagctccaggcctatgccgggatggaaccgtctaagaatcagtccggaacccatgatagcggcggacatatggtcaagcacggatcatcacatcttagaagatacctgatgatggcagccggcaatatgcttaagttcaatccggtgctttatgactattacataaagaagcgggatgaaggcaaaacacataatgtcgcagtatcgcatgtagccagacgtcttatcagaatcatctactatctggaaaagaatgattccgattttgatattgagaaaatgagatagccgctcattaaatcaatcaatactttttcaaagaatcatgaaacacagattcttttggtcgtggttttgtttattaatagaaattaagcttgactattgatagttaa

SEQ ID NO: 1445 - DNA, 1756 bp, unidentified
  source 1..1756: mol_type = unassigned DNA; note = element_1d90911
  misc_feature 1..3: note = core
  misc_feature 4..71: note = LE
  misc_feature 72..1247: note = CDS
  misc_feature 1248..1756: note = RE
  misc_feature 1297..1514: note = bridgeRNA
aagatgctatggggcggcagcggggagacgtatccatcgctgcactgaccacaagccgatggagccccaccatgacgaaacgcaaaatcgagactgtgaacgatctcagccggtgtctcgacccgctggatatggacgcgacgttgattgcggtgatcgagatgagccaatcgagctggctcgttgctggcattgttccgggtgttgagcgccagccgttgaagaaactcgcgatcgacgagcacacattgctgaaactaatgagccgctggtgtgcggaggccgaaaagaaaggctacaggatcacgcgcatcgccgtcgcgttcgaggccggacacgatggcttctggctggcgcgctggctcgccgcgctgggcgtcgaggctcacgtcattcatgcgtcgagcgtcgcggtgacgcgcgaacaccgccgggcgaagaccgatcggctcgacacggagcttctgaagcgtggctttctcggctggctgcgcggcgagcgcgggcattgcaagatggttgcggtgccaacgcttgccgaggaggacgccaagcggccgagccgggagcgcgaggcactcgttggcgaggcgagccggattatcactcggctcaaggcggcgttcgtccggcttggcattcgcagcttcaacccgaagctcaaggcggccgccgagcgcctcgggagcttacgcacgcccgaaggtgagccgatcccgccgaatacgttggccgcgctcaagcgcgatctggagcgccaccagatcataaagagacaaatccgcgagatcgagcagacgcggctcgatggcctggcgcaagcgccggcgaatggaccgcatgccatggtgcgtctgctggcccgcgtggtcggcatcggtgttgaaacggccgacatgctggtgcaggaggtgctgtcgcggaagatgcgggatcggcgcgccgtcgcgcgttatgcaggtctcaccggctcgcctgacgaaagcggggcgaaacgccgggagaagggattggcccgctcgggcaacgcgcgtgtccggcgcggcatgatccagctggcatggcggttcctcatgttccagaaggacagtgcactcgccgaatggtatcggcagcgaacgcaggccgcgccagcaacacgcaagacgcttattgtggcattggcgcgcaagctgctgatcgcgctctggcacctcgcgcacgatggggtcgtaccccaaggtgtgcggctgcgccccgctgcatgatcgaggaaacccgctgatgttgtcgtcacaagttatggcttcgctcccgtccgttcgttcgtgacgggctcgcgatgacggttcgaggtggtggggtcccgcgcttggccatggttcaatgccgccgttaagaatgggtccaccgcctcggagcttcgccgccgatgcgcatgcgtgcatcatggttcgggtcaatgcgacccaccggatacaaggttgcggcgcgaatccctcgtgccccgacagcgagctcccctcggatgcgtcatcccgaccccaatcagcgtgccgccgtgctcggggctgtcaaggcgcggcctggaaacgacggagcgtgcggccagggcagagcgacggccgaccttgacagcccctgtgcgcgacggcctccaacatctgtgggtcggggcgaagaaacgggattccaagtcgaacaaagaaactggaatgaaggaagggagaaagtggagagtgccgtgaattagtgcttgacttcgaagtccccatac

SEQ ID NO: 1446 - DNA, 1329 bp, unidentified
  source 1..1329: mol_type = unassigned DNA; note = element_1d937c2
  misc_feature 1..2: note = core
  misc_feature 3..253: note = LE
  misc_feature 254..1315: note = CDS
  misc_feature 1316..1329: note = RE
  misc_feature 37..256: note = bridgeRNA
ccgacttatatgagtgtcagcggcgtgacggggttcggctacccgttatgttccgtagcagaccggagggctgactcgcgtaattcctgtcacccgctcgtcgggttgaccctcatggggtgtgtcgaccctccggtctgcgttcgcggagtgactggagagaggcgtgaccccaagctgctgtgagaggtgcttgaagtcggattgtcctccgcggattccccaatccgagcagagaagggaaccgtcttccatgatcgtcatcggcatcgatccccacaagtccacccacaccgcaaccgcggtcgacccggccaccaacaccgacctcggctcgatccgcatcgacgccaccctcaccggctacaagacgctgatcgcctgggccaagtcctggccgcaccgccagtgggcggtcgagaacgcctacggcctcggacatcacctcgcgcagtggctgctggttctcggggaagtcgtcctcgatatcccgacgacctccaccgcccgggtccgggaactctcccgcggcggccgccgcaagaacgaccgcatcgacgcagccgcagcggcctgtgttgccgcgttacagggcgatgcccgaccggtggacccggagggtccgaccgatgtcctggccttgctcgacgagcgtcgaacgaacttgtctaacagtcgcactcgcatcgtcaatcagctgcacgcgttgctgcggcagttgttcgcgggcggtgcgccgacctcgctgaccgcggctgcggccaccgccttgttgcggggcttccgcgcccgcagcgaagtggaccgggcccgcgtcggcctgtgccgagacttgatcgccgacatccggcgcctcgacagtcagctcgcggcgaacgagaagcagatggccaaaacgctcgacgagcacggcacccgtctgcgggaggtagacgggatcggtgcggtgaccgccgcccggctgatcggtcgcacgggacgggccagccggttcccgaccaccgcggcctacgcgaattacaacggttccgcgccggtacagatagccagcgcggacaccaatcgccaccgtctctcccgctacggcgaccgacaactcaacagcgcgctctacaccatcgcggtggtccagatccggatgcccgccagcgccggccgcggctactacgacaagaaaatcgccgagggcaaaacgcccgcagcggcgaggcgcaccctcaaacggcacctatccgatcacgtctggcgcatcatgctcgccgacgagaaacgccgataccgactatacgaagcggactccgcaagcgcggcttgacaaatagagaggca

SEQ ID NO: 1447 - DNA, 1321 bp, unidentified
  source 1..1321: mol_type = unassigned DNA; note = element_1d9adb1
  misc_feature 1: note = core
  misc_feature 2..251: note = LE
  misc_feature 252..1310: note = CDS
  misc_feature 1311..1321: note = RE
  misc_feature 42..245: note = bridgeRNA
ctattggtgcagggtgatcaaggccgggcttcttcgacgggagacgctccggtcgggccgctgggtgactcggagaacacgtgccgcaaggctttccgttgatgtgtccacggtggtccacagggcgagagccctgaccggggtgacttgatagaagcctgctgagccgtcaactcgcaataggtctgtcccctggccagggctcttgcctctgccccgtcatccacggcagcggaggagaggacatttcgatggtgacagtagggatcgacccgcacaagcacgtccacgtcgcggtggccgtcaacgctcagggcaggcggctcggcaagccgctgaccgtgaagaacgacgcgttcatgatcactgtgctgctcacctgggttcggtcgatcgcgggtgacatgcccgtaacctgggcgatcgaggacggccgtgggttcgcccgccgcctggctgacggtctgttgctcgccagccaggaggtggtctgggttccggcccggttgaccgcggcccaccgcaagctgcacgccgccaccggcaccaagtctgacccggtcgacgccgccgcagccgctcacgccgccctcgctactcccggccttgaccggcaccgcatcgacgagcgagtgcgtgagctgcgtgtcctggtcgactatcgcgcggatctcatcaagcggcgcaccatgatgatcaatcagctcaaggcgcaactgcatgtctggctcgaccacactccgggcgatctcgcccgtcccaagggcatggacgcggtgaccgcattgctggacgcggcctcgctgggcgcgcacgtccgccaggcgctcaccgagatgagcatggagattgctgagctcaaccgacgtgtccgccagctcgacgacgccatcagggagctcgtgaccccgctggcccccacactgctggaaatcaccgggatcagccacatctccgcagcgattttgatcgctgaaatcggtgacatcacccgcttttccagctctgccaaacttgcccgctacaccggctgcgcaccgatccctgtctactccgccgacaaagaacgccaccgcctgcatcggggcggcaaccgccgcctgaacagcgtcctctacaccgcagccatcgtgcagaaacggcgctatcccgccgcgcaggcgttactggcccgccacgaacccaccaagggcagccgcggcgcccgacgcatcctccaacgtcacctcatcgacgtcatccaccgggccatgaccaccgatcaagcctcctggcaacaccacatcacccgccacgaccacgccgcttgacatagaagcat

SEQ ID NO: 1448 - DNA, 1488 bp, unidentified
  source 1..1488: mol_type = unassigned DNA; note = element_1d9c6f0
  misc_feature 1: note = core
  misc_feature 2..225: note = LE
  misc_feature 226..1218: note = CDS
  misc_feature 1219..1488: note = RE
  misc_feature 14..240: note = bridgeRNA
ctactagttccattggcggtaggaccggtgcccggccaggctcggtctaggtggtcggggtggacgctctctttgcggctgtccactcgcgtggtgtgactctcatctggcgtgcgctgcctcgaccaccgcagggccggggaggctgaagaagggaatgctctgccggtagtagcggtgccccctgacccgacacaactcgtcgtcgatggtcaggaggacagcgtgaggaacagcgacaaccagacaccaccgcgggtggtgatcgggatggatccgcacaagcggtcggtgacgatcgaggtcatgaccccggacgaggggatcgtggggcacggccgattcggcacggacgaggccggcttcgccgcgatgctcgactacgcccgccggtggcctgatcgggtgtgggcgatcgagggctgcgagggcatcggccgtcatgtcgcccaccggctcctgccactgggcgaggaggtcgtggacgtgccggcgaagctgtccgcccggatgcgcgtcttcgcgaccggacagggcaggaagaccgacgacaccgatggccactcgatcgccttggtcggggtgcgcatgcagggcctgcagtcggtcgtgcacgacgagcagctcaagctgttgcggctgctcgtggaccggcgccggcgcatcggtgaggaccactcccgcatgatctgtcagttgcacgcactgatcctcgagctcgtcccgggcggcgcgaagagggatctttccgctgcccaggcccgcgccatcctcgccaaggtccggccgcgggatgcggtcggcaaggcccgtaagcgggtcgcgatggagctcgtcgtcgacctcgaacgcctctaccagcgcaagaaggccgcgaacaaagagctcaccgatctcgtcaaggcgaccgggaccgggttgctcgatctgcgagggatcggcccgtcgggcgctgcccggttgctggtcgaggtcggcgacatcacccgcttccccagcaaggcccacttcgcgtcctggaccggcaccgctccgatcgacgtgtcctcggcgagcacacccaccaccggctgtcccgcggtgggaaccgtcagatcaaccgggtcctgcacatcatggccatcgtccagctgcgcaaccgcgccagcgcaggccgtgcctactacgaccggaagatcgccgcggggaaggccccgaactcagcgatgcggtgcctgaaacggcgtctgtccgacatcgtgtaccggaccctgctcaacgacctcatcgtcgccgggcagccggcgccgctgatacccgacggctcgccagccgccgccgctgtcgacgacgaaggagcgggcccgggaggacaccggggcgcgtcactgacatccagcgcgaccggctcacagccccacaccggcacttcggatcaatcacttcccggacccgccgacacccaccctaagacccctcgcgagaccgccgcttgacacagaagggagc

SEQ ID NO: 1449 - DNA, 1183 bp, unidentified
  source 1..1183: mol_type = unassigned DNA; note = element_1dab636
  misc_feature 1..2: note = core
  misc_feature 3..205: note = LE
  misc_feature 206..1168: note = CDS
  misc_feature 1169..1183: note = RE
  misc_feature 6..210: note = bridgeRNA
cttgtatgttcagccatgatcagcgcggtaaagtttgggcgcggaagaggcggccagaccggcccgtgcagcttgcccatcgcttgggcgttcgagcccgtgagtgagtagaaagcgcacggatgccgcgctggtcttcatcaagcccgatcggttgcaggcgccgaacacgagcgcgcatgcacaagcaggggacgcgaagaccatgtctgaatcgcaagtggtggtgggcatcgacgtggctaaggcgcacgtcgattgtgcggtgctgggcgccgactttggggctcggcaatttgccaatgacatcgatggccattcggccctggccgcggccctgcagccactttcggtcgccttggtggtgatggaggccaccggcggctacgaaagtgcgctggcctgcgcgctgcaggcggcgggcttggcggtggcggtggtcaaccccaagcgggcgcgcgacttcgccaaaggcatcggccgcttggccaagaccgatcgtatcgacgccgaagcgttggccgaattggcggcgaccctcgcccgccggcgcgacctggcgcggttcatccgcccgctgcccgatgcccagcaacaggagctcgccgccttggtcactcgccgtcggcaactgctcaccatgctcggcgcagaacggttgcgcctgcagttggctaccgtcaaggtccgtccgagcatcgacgcgttgatcgaggccatccgcgcccaactcgaggatatcgacgcccagatgcaggcccatctgcaggagcatttcgctgcactcgatgatctcctgcgctctgcccgtggcattggacccatcgccagcgcaacgctcatcgcgacgttgccggaactgggtcggctcagccgccgtgagatcagtgctctcgtgggagtggcacccatggccaacgattcgggtacttcccatggtcgccgacgcataaccggcggtcgctttcaggtgcgccgcgtgctctacatggccacgctgaccgcgaccatccacaacccaaccatcaaggcacattaccaacgcctgctcgccgccggcaagctgcccaaagtggccttggtcgcgtgtatgcgcaagctgctgaccatgctcaatgcaatggtgcgcacccaacgccgatggtccgatgaatttcaccgcgcttgactccaaacacggtta

SEQ ID NO: 1450 - DNA, 1620 bp, unidentified
  source 1..1620: mol_type = unassigned DNA; note = element_1daf255
  misc_feature 1..3: note = core
  misc_feature 4..370: note = LE
  misc_feature 371..1489: note = CDS
  misc_feature 1490..1620: note = RE
  misc_feature 8..227: note = bridgeRNA
gttcgtattataaggtcatccagtttaatttactggttgaccaatttttttatggtcttatgattaaagtagtcggggcagaacgaagcatcagtggggcttagatcccgtcaactaaacagttcaccccctacttatagaaacatgatttgggctggttgggacaaatatcccgcataacaagcgaacctatgacactatgagggagtattaggggaaccgataaatttaatagctttaggaggagatagattatgaatccagtagttggtctggatgtcgcaaaaggagaaagtcaagttcaagcttttttagataaaaagactcctataaaaaaagttttaagatttcgcatacagttgagggatttgtgcagcttcttcaattctttcagaatatcgaagaaataacgaatacaaaaccagtaatcatattggaatcgacaggacattaccattcaccagttatccagttcttagataactcaaattatatttacatcgtacttaatccattaatctcttatcgagctaaaagcacgagtttaagaaaggtaaaaactgatgccatcgatgcgttccacctctgcgagctgtattacaaagaagagttagagccatataaaaagcgtggtgtacaattactaaaccttcgaaatttaacaagacagcacgatcaattaacaggcattagtactcagtcaaaactacatttccaagcgattctagatcaagtatttcctgaatatcggggtgtgtttggcgacttgtactctaatgtttcactcttaactttactagagtttccttcatctgaagctgtgttacgagcaggtgaagatcaactagctaaacgtattgcatcattatgtactagtcgctctaagcaatgggcaagcgaaagggcaaaacttttaattaccgcggctgaaaaaaatccgtttcaagtcaatctttatagaagccttattatttcgcttgagatgcatatcaaaatggttcttcaatacaaagaacatctatccaatttgaaagcagagatagatgttctcgtaaaagaagttgaagaatatactatcatccaatcaattccaggtatcggagaaaaaatcgcggcaacgattatctctgaaataggtgaaatcaatcggtttgataatcctaaaaagcttgtggctttcactggagtagatccaagtgtctttgaatctggcaaattcacagccactagaaaccgtattacaaaacgtggttctagtcgattgaggcatgcgctattcatggctgttcggtgtgcaattcgtgatactcgtaagagtaagacaactgacgaaatcatcccaagaaataaacgaatgcgacaatattatgataaaaagcgtgaagaaggaaaaccttttagagtaacagtaatagcttgtgtaaataaactattacattggatttatgccctgttaaaaagcaagtctactttccaggatctagcttaaaatctaactcagccaccattaccataatattccaattcctatatgagtggaagattatttggcatgtcaaaaatagtataacatgagttacatattttttttattgaaaattattgacaaactattagctg

SEQ ID NO: 1451 - DNA, 1354 bp, unidentified
  source 1..1354: mol_type = unassigned DNA; note = element_1db0ac8
  misc_feature 1: note = core
  misc_feature 2..70: note = LE
  misc_feature 71..1096: note = CDS
  misc_feature 1097..1354: note = RE
  misc_feature 1123..1351: note = bridgeRNA
taatgagatggtcacccccaccctgtaagcggactacgctgtagggtgtttcctttctggagaggccatcatgcaagacgtgacattggtaggaattgatctgggcaaacattcgtttcatcttcacggtcaggatcgtcacggcaaagccgtgtttcgcaagaaggtgggacggaagcagctccaggagtttttcgccaagttccacgcctgcatagtagtcatggaggcgtgcgccggtgcgcatcacatggctcgcaagctggtcagcttcgggcaccgggtcaagctgatctcaccgcagttcgtgcggcctttcgtcaagagcaacaaaaacgacttcgtggacgccgaggcgatctgcgaggcggcctcgcgccctgccatgcgatttgtgacaccaaagacggaatcacagcagacgctatcagccctgcatcgggtccgcgattcgttggtgcacgatcgggttaaagccgtcaatcagatgcacggctttctgcttgagttcggcatcagcatgccgatcggcaatgccgttatcaaacgcttgccggctgtgctcgccgagcattcactgccaccgcgcatcgtcgccatcctcgaacgcctgcatgtgcacttcaagtatctgagcgagcagatcggcgagatcgacaaggagatggcccgccaacttgccgacgatgaattcggtcagcgtctgctgacgattcccggggtcggcccgataacggcgaacgtattgagcgccgagatgggcgacggcaagcagtacggatgcagccgggactttgcggcatcgattggtctagtgccacgccaatacagcacgggcggcagagccaacctgctggggatcagcaagcggggagataaaaacatccggcgcttgctggttcagtgcgctagagcttacatgcagcgactcgagctccagcgcggcccacttgccgattgggttcgcgccttgctggcgcgacgacactccaatgtcgtggcctgtgctctcgcgaacaagctggcgcgcaccgcctgggcgctggtcactcgaaatactgtattcgatgcgaaggcggctgtcatacctgcctgatcagccgagcccgcttattttttaccgaagtacctatctggctttgcgaccgctgaaatttgatgacgtgaacggcacaccggcctgacggaaaacccgaaaacggaaatggctcttgaagccgatggagttttaggaccgtcaggcgcgattctcatcgtggcgcggggagctatccccacaacgacgccggatagatttaggcaagccaaccacactgtcaaaaatcaaggttgcaaaaacgggggttaccataga

SEQ ID NO: 1452 - DNA, 1452 bp, unidentified
  source 1..1452: mol_type = unassigned DNA; note = element_1db31d1
  misc_feature 1: note = core
  misc_feature 2..134: note = LE
  misc_feature 135..1175: note = CDS
  misc_feature 1176..1452: note = RE
  misc_feature 1202..1450: note = bridgeRNA
atggtatggacgcctcccaccctcgctgaccaccactgagccgtgccgccaaaagggttgggacctcgcgtcaaacggcatcgagtgccaaagtggaagttcgtgttcaaccactggtagacggaggtcccaccatgaatgctacgacttatgccgccgacattgccaagaatgtccttcaggttcattgggtcgatccgctgactggggagatcgggcgcaagaagttgacgagggccaagttcactgagttctttgcttcgcgccaacctgctcgcatcgtcatggaagcgtgtggcagcgcccaccactggggtcgcaccttcgaagccatggggcatagcgtagagctgctgccagccaggcaggtgcgcgccttcgtgtgggggaacaaggacgatgccgccgacgctcgcgccatctggatggcggcccagcaaggtgacatcaggcgtgtgcccgtcaagaccaccgaccaacaggcggtgcagttcctgcatcgcacacgcgctcattgggtcagcttgcgcacagccacggtcaatctgttgcgatcaatgctctacgaatttggtgtgctgctgcctcaaggcaggaactgtgggctccatgccctggcagagcggcgcgcggctcttgatgagagcctacctgcacccgtgctgcgcttgatcgatgcacaaatacaggtcttgagggagatggatcgccaggttgtggcggtggaggccgaactgacgttggtgcaaaagcagtcgcagaccgccaagcggcttcgagctgttcctgggttgggcctgctcggagcaaccgcgctggcaagcctgcttggcaaggatggccaggcctggcgcaatgcccgtgagttcgcgtgttgcctgggcctcgtgcccaaacacactggcacagggggcaaggtgcaaatgggtggcatcagcaagcgtggcgatccatacatccgcaccatcttgatcagcggagcgcgatgcgtgatggcgcacctcaagaacccacccgactggatcgtcaagctgcaggcgcgacgacctgccaatgtcgtggccgtggccattgccaacaagctagcgcgaatggcgtgggccatcgtggcgcatggtcgtgactatgaccaacgctggtcggtcagccccgccataccaagcttggcgggctgaatcgttcaatgcgcggcaatgccttcaagagtgcgtcaatgagtcgatgaggtgatggtgaaacggtgagaccgtgggtcgggaaagccgatgcggtgctggggccaggtgactgcgccaagcccatccgcgagatgagccccgacttcgcgaatgaccatcaaggccagcggcggactctgtccgttctgcaaacacaggccggatataagaccgcagttgatgccgtccagccaaaacctcaaaaactccttgccacacgggaggcgtccatata

SEQ ID NO: 1453 - DNA, 1407 bp, unidentified
  source 1..1407: mol_type = unassigned DNA; note = element_1db59ea
  misc_feature 1..2: note = core
  misc_feature 3..95: note = LE
  misc_feature 96..1124: note = CDS
  misc_feature 1125..1407: note = RE
  misc_feature 1170..1393: note = bridgeRNA
gatggggtggatggctcccgctcccgttgacggcattctgccgcctggaaaagtggcgctgtcgcagcgaccacacgttacaggagccatccgtcatgcaagtcaccaccgtgggcctcgatctggccaagagcgtcttccaggtccatgccgtcgacgcggaagggcgcgttgtcttccgcaaggcgttgcggcgggcgcaggttctgccgttctttgccaagcttcccgcctgcctcgtcggcatggaagcttgcggcaccgcgcatcattgggcacgcgaactgacaaagcttggccatgcggtgcggctgatgccgccagcttacgtgaagccctatgtgaagcgaggcaaaaccgatgcggcggatgctgaggcgatctgtgaggcggtgacgcggccgaccatgcgcttcgtgccggtcaagtcggccgagcagcaggcggcgttggcgttgcaccggacccgcgaactgctggtgaggcagcgtacgcagcttgtgaacatgctgcgtggtctgctggctgagttcggcatcgagatggcgcgtggcctccaccatgccttgcgcctggcgaggcggctttccgctggcgaggcacccgaggtgccgccgtcggctcggctggtggggcagggattggcggatcagatcggcaccgttcagctccaacttgcccgtctggagaaggagcttctggcctggcaccactccaacgaactgtcgcagcgcttggctacaatcccgggcatcggtgtgatctcggcaacggccctggcggcttctgctattgagcctgagcgcttccgctccggccgccagttcgccgcctcgctgggtctgacgccactccagaactgctcgggaggccgggagcggatgggccggatctcacgcatgggtgaccgctacctgcgtcggctgttggtggtcggcatgacctcgctcgtccgacgggcgcggatacagccagcatcggttgatccgcgcctgcctgccatgctggcgcgcaaaccggcacgtctcgtcacggtggccgccgccaaccggacggcacgcgtggcctgggcgatcatgacgcgcgggggaacctaccgggcgccgatcagcgccgcagcctgatctggttcagtgccgatgaagcgagacgcgaaggagcaggacattcaccagttgcaagggcgatgagatgtgatggcgaaccggtcagaccgggagttgggataacccgtgcgatgtcgtgggcgtcattgcccgcaaagcagagtgggacccgactcgcggataccatcagggccagcggtcaacatgaacgactgcatcaacaggccggacagaagactgcaccagaccaaccgccagaaacgtcaaattacctcttccaccgcgggagccatccacagaa

SEQ ID NO: 1454 - DNA, 1637 bp, unidentified
  source 1..1637: mol_type = unassigned DNA; note = element_1db6bc1
  misc_feature 1: note = core
  misc_feature 2..291: note = LE
  misc_feature 292..1530: note = CDS
  misc_feature 1531..1637: note = RE
  misc_feature 12..311: note = bridgeRNA
cctgttacaatatatttggtggaagacatggcaaccagccatgtcttttaccatcttgttgcctaagctgttagaataagaggacaataggtctgacggatgcctccaaggacttcgcgtccgttcgaaagtcagtcagccatcctcttgttcgcagcgttcgatttgtgcaggtagagccgccgtacggtgcgttcgtgtcatcaaacagatagaatcggcaataagaaaagggtggaaccctcgcaagtgaggggagccaattgtaaatctgtgatgggagcgtaggttatgaacgcagtcggaattgatgtttccaagggcaaaagcatggttgccgttgtccgtccatttggtgaattggtggtaaagccctatgaggtacgccacacctccagcgaactcagcgagttggcaagcacgctgaaaagtctgaaaggcgaaacgagagtggtgctggagcacactgggcggtactatgagcctgtcgcccaaatgcttcacgatgccggaatttttgtcagcgcagtgaatccgctgctcattaaggaatatgggaacaactctctgcgcaaggtcaagaccgataaagcggattccatgaaaattgcccggtacggtcttgacaattggtgtgatttgcgtcaacatacttctatggatacaattcgttatcaactgaaaaccgcaaatcggcaatacggtctgtataccaagaacaaaaccgctttcaagaacaacctcattgccttgctcgaccagatctatcccggtgtaaacgccctctttgacagccccgtccgtgcggatggaagccagaagtgggtggattttgctgcgtccttttggcatgtggactgtgtgcggagcatgagccatagcggctttgccgagcgttaccgcaaatggtgcaagcggcatgggtataacttcagcgccgccaaagcctttgaaattcacagggaggcgaaagaactgatcactatgctgccgaagaatgcgctctcaaaggtgatggtgcaggaggcaatcacgcagctcaacacggtctctaaaacagtcgaggtgcttcgcgcagaaatgaatcaccttgctgcgcagctgccggaatatcccgtggtgatggctctgtacggcgttggcaattcccttggtccacagctcatggcggagatcggcgatgtgcggcgtttcgctcacaaaggttctttgacggcctttgcgggagttgaccccggtgccaaccagtctggaacctatgaagccaaaagcacacgttcttccaagcgcggttccccagagctgcggaaagcactctttattctcatgacggtgttgcttcaaaaagcgccgccggacgatcctgtttttcaatttctgaacaaaaagcgctccgaaggaaaaccctaccacgtttacatgactgccggctgcaacaagttcctgcgtatttattacggcaaggtgaaagaattcatgaatacgttggacataccggtcgatatggattcaaccggcctttcccaataacattctgcccgtttacttttggctggcgcttcggcggcggcctttttctgctactcattttctgtcgcacctttttctgaatttgctattgactttttatttgcagg

SEQ ID NO: 1455 - DNA, 1666 bp, unidentified
  source 1..1666: mol_type = unassigned DNA; note = element_1dbcebd
  misc_feature 1: note = core
  misc_feature 2..272: note = LE
  misc_feature 273..1520: note = CDS
  misc_feature 1521..1666: note = RE
  misc_feature 13..298: note = bridgeRNA
cctgttacaataaatttgccccttgattcgtggcatccagccacgggcatgggacatctcgttgcccaagctgatagaataggagggcaatggtctgaccggagtctccaagggctataacgtccgtaagaaagtcagtcagccatcctcctgttcgcagcgtccgatttgtgcaggtagagcctaagcgttcgcgtcagcaaacagataggatagcagcgggaaaagatggtattcaccattgcagatctgtttgacaaggagagaaaagcatgacagcaaacgcggtaggaattgatgtttccaatggacacagcacagtcgcagtgtttcgtccgtttggcgaagtggtagaacttccctttgaagtgcggcacacgcccaaagcactcaacgctttggcagagcggctgaaaagctacgaaggcgagaccaggatcatcatggagcacacagggcggtattatgagtccatcgcaaacgtgctgtatgaaaacgggttgtatgtcagtgcggtaaaccccctgctggtgaaggagtacggcaacaactcactgcgccgggtcaaaaccgacaaggccgacgcgaaaaagttggcgcgctacggtcttgacaactgggcagaattgcgggaatatactcccatggatgaaatacgctacaacttgaaaacgctgaaccgtcaatttcagcaggcatccggtcagcgtaccgcctcggtcaacaacctgatcgcgctgttggaacagtccttccccggcattcgcaaactctttgacagcccgccacgagcagatggacaccagaagtgggtcgatttcgtgaacgcatatccccacgccgactgcgtgtgcagcgtgagcttgaagaagttcacgaagagctaccagaagtggtgcaaaagcgagaaatacaacttcagcgaagagaaagctgctgaaatctacgctgccgcccgggagatggttgttttgacgccgaggacagaactccatgaactaatgatacggcaggctgcggagcaggtgacagccatctcaaaatcggtggaaatttaccgtgccgagatggacaagctcgcctcgcagcttccggagtatcctgttgtcatggagatgtacgccgtaggcaagtccctgggaccgcagctcatggccgagattggcgatgttatgcgcttcgctgggaagcagtcccttgtggcttttgcaggcgttgacccgatgccaagccagtctggggataaaagcgcccgcagcaataaaacctccaagcgcggctctccttatctccgtaagacattgttcaatgtcatggacatctatcttcgactgtcccctcaagaggaacccatctaccaattcctggacagaaaacgcgccgaaggtaagccctattacgtctacatgaccgctggcaccaacaaatttttgcgacgttactacgccaaggttcgggattatctcgccactttggatataccgaaaacacccagcgctgccaacgttccagacgcctgattcccagattacatagcttcttaatacctgcacggccagtgaatttttgaaaatcctttttcgctggtcttatttgttatacactttcccgtcctctcacttctttcttgtcaagctcttttggggcttgactttttatttgcagg

SEQ ID NO: 1456 - DNA, 1329 bp, unidentified
  source 1..1329: mol_type = unassigned DNA; note = element_1dc07da
  misc_feature 1: note = core
  misc_feature 2..66: note = LE
  misc_feature 67..1071: note = CDS
  misc_feature 1072..1329: note = RE
  misc_feature 1096..1328: note = bridgeRNA
aatgagatggtcactccctcctttcaagcactatgctgagaacaggtattcatccggagaaccgtcatggaaaatattacgctcattggtatcgacctgggtaaaaactctttccacatccactgtcaggatcgccacggaaaagctgttttccgtaaaaagtttaccagacaaaaaatgtttgaatttctggcaacatgccctgcaacgaccatcgtgatggaagcctgtggtggtgcccatttcatggtccgcaaactatctgaactggggcatacaccaaagctcatatcaccccaatttgttcgtccgttcgtcaaaacgaataaaaatgacttcgttgatgcggaggctatctgtgaagcagcatcccggccatcaatgcggtttgttcaacccagaacggagtctcagcaggcaatgcacgccttgcatcgggtaagagaatcgcttgttagggataaggtgaaaacctccaatcagatgcatgcttttttacgggagtttggtgtcagcgccccaaaaggccctgcgttgataacaaattttgcagaaattctggagacaaacaaatttccgccctaccttgcaagattactgcagaagctgcgtgagcattatggttatctccttgaacaaattaaagatctggaaactcaactgaaggtatctcttgacgcagatagtacaggccagcgcttactgaccattccctgtgtcggccctctgaccgcaagtctactttccactcaactgggcgacggaaaacaatacggtagcagccgggattttgcagcttcaacgggtctggtgccacgtcagtacagtaccgggggacgaaccaccctgctgggtatcagcaaacggggtaataaaaagctacgggcattgctggtacagtgcgccagagtattcctgcgaacactggaacatcggtcgggcaagcttgccgactgggtcagagaattattgctacggaaaaataatttcattgtgacctgcgctctggcaaataaactggccagaatttcatgggcgctgacggcccgacagcagtcttttgaagcgtaattatcagctgtatttacatgtttgaacagtgacttatctggttttgcgaatattgaccattgatgatatgaacggtctatcggcctgatgaaaaacctgtggttaggaatgacagctagcatgtcgctcaatttataaggttcatcaggcgcgtaactcatcagggcgcgggcataaaacccattcagacgccggatagattcaggcaagccaacaatatcttcaggatcggtattgcaaaaacgggagtgaccatag

SEQ ID NO: 1457 - DNA, 1416 bp, unidentified
  source 1..1416: mol_type = unassigned DNA; note = element_1dc183d
  misc_feature 1: note = core
  misc_feature 2..224: note = LE
  misc_feature 225..1403: note = CDS
  misc_feature 1404..1416: note = RE
  misc_feature 16..239: note = bridgeRNA
ctactaagagacttccggtcaggaccggtgtctggccagactcggtctaggtgcccggcgggacgctctcttcgcggctgcccaccggttggtgtggctctcatttggtctgctgcccgccgggccccgttgacgaggcgtggctcaagaagggactgcccagctcgtagtagcaatgcccacctcgccgtttcatcccatccggaatcgaagcgaggaagcagatgtcatcagtgatcatcggggttgatccccacaagctctcggccacgatcgaggtcgtcgaccaccacggtcgccgtctcggcggtggccggtatccgaccgacaacgacggctacaagcgggtgcggaaatacgtcgcgcagtggccggaccgggtctgggcggtcgaaggcgcgaacggtgccggccgaccgttggcgcaacgtctgctggctgatggtgagtcggtggtggatgtgccggccaagctcgccgcccgggtccggttgttcgacaccggccacaaccgcaagaccgacgccaccgatgctcactcaatcgctgcggtcgcggtccacaccaagaacctgcgagtcctgtcggctgatggggcactcgaggcgatccggatgctgtgcgatcggcgtgatgagttgtcccatcagcgggtgcagaccgtgaaccggatccaacgcctgctgagtgaactgctgcctggccagcgcaaacgtgacctctcagccgatcaggccaaggcgttgttggcgacggtgaagccgcgggatctggcagggaaaacccgccgacggatcacagctgaggagatcgccgacctggtcgcgatcgaccggaagctgaagaagatcaacaccgagttgaagacctcagttctggagcgtggatcagggctgatggacatccacggcatcggcccagccgtggcttcccggatcttggccgatgtgggtgacgttgcacggttcgctgaccggaataggttcgcctcctggaccggcaccgcacccttggatgcctcctctggtgagcagatccgacaccggctatcccgggcagggaaccgtcggatgaaccacgtcatccacatcgccgcgatcgtgcagatccgcaacgacaccgaaggccgggcctactaccggcgcaagctcgcggccgggaagaccccgatggaagccctgaggtgtttgaagcgacggatctcagacgtcatctaccgccaactcgtcgccgacgcggatgaggcgggcccgggagggcactgcggggcgactctcatatccagcgcggtcgacctgcccccgcacatcgacacttcggatcagccacttcccggacccgtaccagtcacgctacgcccggacgcgtccgccgaccagaggcatcatccagccgcctcttgacacagaagggagc

SEQ ID NO: 1458 - DNA, 1461 bp, unidentified
  source 1..1461: mol_type = unassigned DNA; note = element_1dc83ab
  misc_feature 1..2: note = core
  misc_feature 3..207: note = LE
  misc_feature 208..1425: note = CDS
  misc_feature 1426..1461: note = RE
  misc_feature 18..180: note = bridgeRNA
ctgatggctctaccctcagtccttggggtctttctcggggaacgcttcaaactcttgtcccacgaggactgaaatgagacggcgtccctgggaaacggccttgaaggcccgacgtccacaagggtgtcgtcccatgaggactggtccatcagagcgacgccgcgccttcgaccaaccggttgctcccccacgttgaaaggaggcaatgtgctcggagttggcattgactgggccgaggacttccacctggtcgcactgggacggcccggtgacggcgtcattgacatcgctcgggtcgagcaccgccccaaggcgatcgatgtcctcatcgcgaagatcgccgagctcgagcccgatccggccgaagtccgcgtcgtgatcgagtcccgccatggtctgctcgtcgagcggctggtcgacgctggctacgtcgtcgtccccgtcaacccggacctcgtcgctcgccgccgcggtcccgccaagaagaaagacgacaccgaggacgcccggatcgcgtgcctgctggcactcgatcgtttcgagcggctgcgtccgctggtcccccacggcgagatcgccggtgaactgcgcgctattgcccgggacgacgagcgcgccgcacgcgacgagcgtcgcctcctcaaccgcctgcgccaggacctcatcacgacattcccagcggcgctcgacatcggtggcagcgacctcggggggccgacgtttctgcgcatgctggagcggtggccgaccacggatgccctggcctcggcgtcgcgcgacgacctcgaggggttcgcccgctcctgccggcacagccggccgaccagtttcgccgacaaggttcagagcgccctcggcggcgaccacttcgtgccgcgcgactacctcgtgcgggccaaggcggacaccattcgcctcgccgcgacccagctgctggcgatcgaggcgcagcgtcgtgcgtgggaacggcgcatgggcgagctcctgcttggcgcccccagacggggacgggataagcaaccccgagaggacgagcgggggcagtgcttccctggcggcgagatctacctgagctttccgggtctcggtgatcgtctcgccgccagggtcgcagcagagatcggcgaccatcccgaacagttctgctcgccgaacgcactgcaatgctatgcgggcaaggcgccggtgacgcgccgctcgggcaagagcgagctcgtcgtcgcctgccgcctcgcccacaacggcttcctcggcaacgccgtgcagatgtgggctttctgcagcctcagaggctcgggctgggcgcgtgagttctacgacgggcagcgggctcggggcaagggacatcacgcggccttgcgggcacttggcaaccgctggctcgaagtgccgttaaccgaagccgcgccctgggtcgagccgtgaaggcggcgtgacgcgaaggtggttgacaaagggtgt

SEQ ID NO: 1459 - DNA, 1408 bp, unidentified
  source 1..1408: mol_type = unassigned DNA; note = element_1dca04e
  misc_feature 1: note = core
  misc_feature 2..88: note = LE
  misc_feature 89..1126: note = CDS
  misc_feature 1127..1408: note = RE
  misc_feature 1178..1400: note = bridgeRNA
caatgggatggacgcccccacccgaaacggcatcaatgtgccaaagtggaagtgtcaaacaaccacgtaacccgagggaggcgtcatcatgaagattacgacaatcggtatcgatttggcaaaaaatgtcctgcaagtgcatggggtgaacgagcatggcaaggttgttctgaagaagcaactcaagcgcgaccaagtggccgcgttcttcgccaagctgccgccttgtctgattggcatggaagcatgcggtagcgcgcactattgggcccgcaagctacaaacatttggacatacggtgcgactgatggcgccgcaattcgtcaagccctacgtgaagaccaacaagaacgacgcggccgatgccgaggcgatctgcgaggccgtagcgcgccccaacatgcgcttcgttccgatcaagaacgttgagcagcaggcggtattagcgctgcatcgtgtgcggcagggtttcgtcaaggcacgcactgcgcaagccaaccagattcgcggcttgcttgccgagttcgggctcgtcatcccgcaaggcattgggcacatcgccaagcgcgtgccggagttgattgaggatgccagcaacgaactgcctggctcattccgactacttgtgcagcgactgctggagcatctcaaggaacttgaccgcgaggtcggcgagatggaagcccagatcgtggcttggcatcgcagcaacgaagacagccgcaagctggagagggtgccgggcattggcccgatcacagccagtgcgatagtcgccagcattggcgatgcgaagaatttcgacaacgctcggcagatggcggcatggctaggcctcgtgccccggcagcactccagcggcggcaagaacgtgctgttgggcattagcaaaaggggcgacgtttatctgcgcacgctgctggtccacggcgctcgctcggtcatctccgccgcccagcgcaagaaggactcgatggacggttggctgggcgggttgctcaaacggcgaaacgtcaacgtgaccgcggttgcactcgccaataagaatgctcgcattgtctgggcactcctcaggcacgggtgcgagttccgagccgactacgttgccagcatcacgcgcgtatagcgaccgataccaacataacagcacaacgattccgaaaggagtttccacaccaccgattgctcaggcgatcaagcagcgatggcgagacaggtcagaccgtggttggtaaagcccgctttgttcggggcaccaagagtgcgtccttccgattgaggcaccaaccagcacattccatcagggaccgtggcaaagtgccaccaataaagtccgaatgtacgggtgcaatctttaccttcagtccatcgtgaaatgaaagcttggcaaacagggggcgtccatgta

SEQ ID NO: 1460 - DNA, 1151 bp, unidentified
  source 1..1151: mol_type = unassigned DNA; note = element_1dcbeb0
  misc_feature 1..2: note = core
  misc_feature 3..206: note = LE
  misc_feature 207..1139: note = CDS
  misc_feature 1140..1151: note = RE
  misc_feature 12..209: note = bridgeRNA
cttgtcttatgatttccgagcttcatcggcgaagataaagccctggcacaccaagcttggtgtgccagggcagcggctggatcttcaagggctgggtcgtaagggaccgttctaaagtgtgatcagccactgtcttcgcatgaggcctgaacggatacagagcggcacgaagccctctacgacaagcataggacatcgcgaagatcatgaacgatagcatcggaatagatatctcgaaagccttccttgacgtacatcgtctgacaagcggtgagacggtacaatttgccaattctccggctggtctgcgcgccttgcatcactggatcgggtcgcagatgcctgatattgttgtctatgaggcaactggcgtcttccatcgtgcccttgaaggcagcctgtcggggaaactgcctctggtaaaggtcaacccgctacaggcgcgccatttcgcaaaagcccgcggaacgcgggccaagaccgacgctctcgatgcgcagatgctggcaacgatgggggcggcgctcaacctctccccggatgaacccgtcgacaggaaccagcatgttctcaaagagttgcaggtcgcccgcacggcgctgatcaaggagcgtactcggcttaagaaccgtgagaaaacacaaaccctgccgcttctcaagcgccagtccaaagtccgccttgaccaaattgcacgccagcttacccaacttgaagaagccttgctggacgtgctcaaacaatccccaaagaaggcgcgggcatttgatattctttgttcgatccccggtcttggtgccatcaccgctatgaccattctcgtcgagtgcccggaaatcggcaccatgaccggaaaacagatcgcatcccttgcgggcctagcccccatgacccgacaatcgggtcaatggcgcggcaaggcattcattcagggcggacggaaattcctgcgcgatgctctttacatgccagcactcgtctgtgctcgctacaatcctgatttacgacagaaatatcaggacatgaaagaagcgcagaaacccgcaaaagttgctttaacctgcctgatgagaaagctcatcatattggcaaacgccctgatcaaacaggacagaaaatgggaaccaatatctgcttgatcaagacggata

SEQ ID NO: 1461 - DNA, 1566 bp, unidentified
  source 1..1566: mol_type = unassigned DNA; note = element_1dcc5ad
  misc_feature 1..2: note = core
  misc_feature 3..259: note = LE
  misc_feature 260..1456: note = CDS
  misc_feature 1457..1566: note = RE
  misc_feature 26..279: note = bridgeRNA
ttggtactgtataagtgtaagtattaactaagaaaaatggttagcacttgcacttattttatttataattaagggagtaattggtctggcgatgcgatttttgggttgataacatccgtcagtaaaactgccaaccatcccttattataaatattcgattaagcaggttgaaaccatagaggctttcgtgtaactaaccaaaatgaattgtaataagtgcaggtggaaacaattactaaaataaagttggaggttactcatgataagtgtaggaattgatgtatcaaaggaaaaaagtacagtatgtattttaaaaccatacggcgagatcgttagatctccatatgaaatcactcatacagaaagtcagatggcggaattagcatcgatgataaatagttttaatgatgaagtgagagtcgtaatggaggcaacaggaaattatcacttacctgtgcttagttttcttaaagagcgtgaaatttttgtagctgttattaatccattagtgatgaaaaaatatgcgagtgtaattcttagaaaaggaaaaacagataagctagatgctgtcaggattgctaattatggattagataactggttacatttaattaattatgaatctagtgaagatatttatgtacagctacgtcttcttggaagacagtacggtcattacataaagcttagaatagagagtaagctatctttaactacaatgcttgattatacaatgccaggaattaaagcaatgcttaagagtcggtcaagtaaaccagaaaaagataagttaaatgattttgttgaggaatactggcattatgataatattacagaaaaaagtaaaaaacaatttattaatagttatagaaattgggcaaaaaagaagggatatcaacaaagcgaagctaaagctataaagatatatgacttagcccagcaaggaatccctactttatcttccaatgctccatctaccaaaatgttagtattggaagcagttagagttcttcgcgaaatagataaaactcttgcattgattttatcacaaatgcaggaattagcaaagtctttaaaggagtacagagttgtacgtgagatgggcggagttggcgatattattgcaccaagacttatagcagagataggtgatattaggagatttcatagaggaaaagctttgatagcatatgcaggtattgatgcccctccgtatcaatcaggacaatttaccggaacgcgaaggcggatatcaaaacgaggttctgcgatattaagaaaaactgggtttgagataatgaaatgtttaaaaagtaataaacctcagaacaatgaagtgtatttatttatgttaaaaaaagaagatgaaggaaaagcttcgaaagtagctaaaattgctgggttaaataagtttttgagaatatattatgcaagagtaaaagaagtatataaataatatagtaaatagggcttggaccagaaagcatctggtctaattagcatgcaataaaatagaaaaaataactgaaaaagctgcgataaaaagtattgacttttattagcagg

SEQ ID NO: 1462 - DNA, 1359 bp, unidentified
  source 1..1359: mol_type = unassigned DNA; note = element_1de6fc3
  misc_feature 1: note = core
  misc_feature 2..73: note = LE
  misc_feature 74..1102: note = CDS
  misc_feature 1103..1359: note = RE
  misc_feature 1099..1349: note = bridgeRNA
tatggaatggcccgcccctcttctcctgctggtgtagactggcgggggctaccggagggaaggaggactggctatgtccatcgctgttctcggcattgacctgggtaagaacagctgcagcctcgctgggctggacgagcgcggggcggtggtcaagcggcgtcggatgcggcgcgagaacattgcaaagtttacctctgctctgactccctgtgttattgcaatggaagcctgctgtggtgcccatcacgttggccggctgctcatggcccagggccacacggtgcggctgatgtcgccggagtacgtccggccctatgtcaaggcgcagaagaacgacgatcgcgatgcggaagcgattgccgaagccgcgacacggccgaccatgcgcttcgtcgaactgaagagtgaagagcaactcgacatgcagacgctgcatcgtgcgcgtgagcgtcttgtcggggagcggacggctctgatcaatcagctacgtgccattctgctcgagcgcggtattaccgttccacaaggtcgttacaagctcgcgaagtatctcgacgcggctgaggagcagacgaaatcaacgctgagctcccggatactgaccttgatcgacgacatgcgcgagcaatggcacgagttggaccgccgcattgatgctctggacgacgaatttgctgatcatgctcgccaggacgaagccgcacggcggctggcgaccattccgggcatcggtgtactgaacgcgacagcgctggtggccgccatcggtgatggccgcacattcgagcgcggccgtgatctcgctgcctggctggggctggtgccccggcaagtgacgacgggtggcaaaccgcgtctggtaggtattaccaagcgtggcaataagtacctgcgcaagctgctgatccacggcgcccggtccgccatgaccccgctggccaagagtgccacgccgctcggccagtggttgcgtgctttgatggagcgcgtgcaccacaatgccgcggttgttgccctggccaacaagcttgcacggatcgcctgggcggtcctgcggcatggaaaggagttcaaggcggcggcaatagccgcggcgtaatcgaaccggctggcagcgtgccatgaggcgctgactggtcgccgatgtctgcgggtggtggaagcgagatggcctgacagtcgaccggcgttccggaaacctgagcacacgaatggcgctcgacgccgcgaaatttatgaggaccgggacgcgcggatctccatcttggccagggccatgcccataggccggatacgttgacgcagactggtcggttcatcgcgaagaaactgcttgccgacggggcgggccatacg

SEQ ID NO: 1463 - DNA, 1312 bp, unidentified
  source 1..1312: mol_type = unassigned DNA; note = element_1de70c2
  misc_feature 1..2: note = core
  misc_feature 3..499: note = LE
  misc_feature 500..1276: note = CDS
  misc_feature 1277..1312: note = RE
  misc_feature 46..213: note = bridgeRNA
cttgtatattaaacccatctcttaaacacaagattatttaacccgaaaagttttatagtgatactgattttctggggaagtcggtccggccttaagccttgagcttgctcgtagataggctccccaccctcgtcatccatgccgcggagtatctgagacctgtaagcataagcttctgagtctgcattcacaaggacggtagatgaagtgtcagggttgggaaaccagtgatcatcataacaaaatcataacagagagatgaaacgatgaattatgcaggcattgatgttagctacaaacacgctgttatcgtggtcagtgtcaaaggtaaagcccgccaagccaaaacttttgacaatacgccagccggtcataaggcgattatccagttattatcaaaattaaaaggggaatcaagagtttgtcttgaagccaccggcatttatcattttgatttggccgttgcgttgcgttgagccgcgctgagggtgttgaagtcatggtgatcaatcccaaagcctcgcatcattttgccaaggtgttaatgaaacggagtaaaacggatgcggttgatgctgaactattggcgatttacagcgaaaggatgccttttgaagcgtggcaacgccccgcggatgaacagattgcgttaagagcaatttcccgcagaattgccgctttaagcaaacaaaagacccaaaccaaaaaccagcttcatgccttaaccgcgacagaggaaacccctgccttagtgatcgagcatattaaggccttgatagcactgctggaaaaacagatcgccgcgcaccgaagcagtgcgctcgaattaatccggcaacaccaaccgctggccgaagcccttacctgggtcaccagcattaaaggcattgctcaagccagtggcattcaactactggccgagttaatgatattgccgcaggacatgacggcaaggcaatgggtggcttacgcaggcttagacccacgcgtctttgaatcgggcagcagcgtctcaaaaaaaccgcgcatcagtaaggccggcaataaattcatccgtcaggcgctgtatatgcccgctttagtcgcaacgcgctttgagccgaatatcaaaggctattatgtccacttgattcaggataatggtttgaagaaagtgcaagcgatctgcgcggttatgcgtaagctgttacacgccatccatggcatgttgaacgctaaacaggcatttgacgggacttgtttttacaagttgcccgccgaagcaaattcacaatgatttttttcattgcggacttgtgctttaagagagtat

SEQ ID NO: 1464 - DNA, 1659 bp, unidentified
  source 1..1659: mol_type = unassigned DNA; note = element_1df236d
  misc_feature 1: note = core
  misc_feature 2..287: note = LE
  misc_feature 288..1562: note = CDS
  misc_feature 1563..1659: note = RE
atctccattccgcgggcaagccgcggcacaaatagtaatgaaagtgttttacatctcaactctgtgatttaaaatatataacaagaagctatactacaaagcacgggaggtaaagttgtaaaaactttctctgttttagacagcataaaaatcagtgtaagttctgtcttttcaagcacaaataagtggtatcatgaatccgtacactaagaattgttaaagctctttgttttattgtgtggcagttcagtcaatggcttcttatcttttgcgaaaggagttacactatgaaagttacttatcaaacctgttgtggtgtcgatgttcacaaatcttttcttgttgccacaatcatcaaaactaccgccggtattgaaccttcttatcaaaagaagcgattctctaccttcaacaattctattttagactttaaatcgtggcttcttgaaaatgaatgccatgatgtctgtatggaatccacaggtaaatactgggttcctgtctttaatcttctcgaagatcaaatcaacgttaccattgctaatcccaaatgggttaaagctgttaagggtaacaaggacgatacaaaagattctaaatggattggagacttattccgactgggacttgtgaaaagcagctacattccttgtaggttgatccgtattcttagagaatacacaagatatcgttacaagcttgtttcttgccgttcaagtgaaaagaatagatatcagaatgctcttactgtttgtaatatcgcattagattctgttgtatccgatatctttgggaagtcatcctcatccattatcgattatctgcttgaacaatcaggtactacgattaaccatgaagaaatcgcttcaaaacttcttaagagcctcaaatccaaagaagacgctgtgattgaatctatcgaaggatatcagatgactgatgcccagaaatatcgtatgcgcctaattcgcgcacatatggattatatcacagctgaaatcaatgatatagataaacagattgaatctttgatttcttccgatcctgattatgataaagctatccggttactaactaccattccgggtgtcaaacgtgatagtgcaattactatcatctccgaaattggtattgatatgtctcagttttgtaattctaaacgcttatgttgttgggcaggtcttacccccagcaacaatgaatctgccggtaagaagaaatctgtccgtattacacgtgccggtgtctacctcaaacctgcattagtacagtgtgctcatgcagccgtgaaatctgacaagtctccttactacaaaacgaaatatgaatcccttgttaaacgccgtggcaagaaaagagctgttattgccattgcccgtatgattcttacagccatctaccggatgctgtctaccggagaggtatggaatccaagcgatctttacaaaatcgatatgcctgcacctttagctgaaaaacagaaggctaaggctatcaagcaagccaaaaaacttttacaaaaggaaggactgcttcctcctgatgaacctttagcttcttgatcaatctactaaatctatatcctcaaataagttgcctacttaagacagcttatttaaggacgccggtttatgacttacctctactttctttcacact

SEQ ID NO: 1465 - DNA, 1430 bp, unidentified
  source 1..1430: mol_type = unassigned DNA; note = element_1dfefc1
  misc_feature 1: note = core
  misc_feature 2..125: note = LE
  misc_feature 126..1154: note = CDS
  misc_feature 1155..1430: note = RE
  misc_feature 1193..1427: note = bridgeRNA
atggaatggacgcctcccgctcactggtgttgtcgttcgggaggatcggagtggaccctccagtccgacggcatcaaagtgcccattggggaagcatccgcttcccaaggaaaacggagggtccaatggtagacattagcagaatgatcgtgggtgtagacatcgccaagcgcgtatttcaactgtactgggtcgagatggacacgggcgaggagatgaacgtgcgcctcagtcgggcgaagttcctgaaccacttcgccaatcgcgccccgtgtctggtcgcgatggaagcgtgcggcggctcgcagcactgggcgcgtcggttgctgtcctatggtcacgaggttcaaatcctgccggcgaagttggttcgagggttcgtgcgcggtaacaagaacgatgcgcacgacgcgcgggcgatctggaccgccgtgcagcagcccggcgtacgcacggtcgcagtgaagaccgaggagcaacaggccgtgctggctttgcatcgcatgcgtcaacaattggtgaagttccgtaccgcgcagatcaacggactgcgcggtcttttggccgagtatggcgaagtgatgccgaagggccgagcgggtctgaagcgcgatctccccggcgccttggggcgtgtctcggaacggttgccgggcatggccacggaaacgttgcgcgagcagtgggcgcgagtgctgcagctcgatgaggagatcgcgcggatcgagcgccggctcgggttctggcacagaagcaacgatgcgagtcgccggatcgcggaaattcccggtgtgggcgtattgagcgcgacggccgcggtggctgcgatgggcgacccgaaggcgtttaagtctggacgtgagtttgccgcctggcttggtctcgtgccccgtcacgtcggcaccggcgggcgggtaaagatgctcggaatctccaaacgaggcgatacctaccttcgcaccttgctgatccacggtgcccgctcggtattcaccaacagcaaagcgccaccggcatgggcccggcgcgtcgcggagcggcggccggccaacgttgcaaccgtggccctggccaacaagacagcgcgcatcatctgggccttgctggcccatgatcgaacgtatcaacgggacttggtcaaccagccgggatagattcggttggcgacaagaggcacgacaacgaacaggaggtgattgctgaaaggttgcgcaaggcgcgacacggtgtgatggcgaacaggtaagaccgcggttcgcgaaatctggatgttgattcgagcgtggagctcaagcgacaaatgaggtgcggatcggcggattccatcagggccagcaggagagagatcctgcacgaacaggccggatataaaactgcaacctgcacgtcagagcactacatctgccttgccatcgggaggcgtccatata

SEQ ID NO: 1466 - DNA, 1335 bp, unidentified
  source 1..1335: mol_type = unassigned DNA; note = element_1e0d369
  misc_feature 1..2: note = core
  misc_feature 3..80: note = LE
  misc_feature 81..1118: note = CDS
  misc_feature 1119..1335: note = RE
  misc_feature 1093..1320: note = bridgeRNA
agataattggactcccctcgcccctgaacaggaaccgaggtacgctgacagttctcacacaaccagctggagtccgtgatatgaacattagcattgctggcgttgatttggcaaaaaaggtcattcaagtttgcgttgtaaaacgcaatactgtgctctcaaataaagagatgacacccgatcagtttaaagaatggttagccaagtctaaacccatgaccgttgtctttgaggcatgttcaacctctaattattggaaacagactgctcaacagtatgggcatgatgctaagctcatttctgcaaaattagtctcggccatacgtcaaaaacagaagactgacgccaacgatgctttggctatcgttcaagcaagtcagctagccgatattcaatttatcaacggtaagtccgtggctcaacaagagcttcaatccctgttaagaatgcgagaattagccgttaaacaaaaaattgccttactaaatcaggttcgagcactactcgcagaatttaatatcaacggatcgcctgctaagggcggcttgaacggcgttgttcaacgtacattagaagatgctgaaaatggctttagtatgccctttagagatgcgttgcatgccacctggcaagcctgccttctaacgatcaatcgtattaaggcctacgacgagtgtttagctcaagcggtaaaacaacatcctgactgtcagcgattgatggcattagagggcgtctctgttatcaatgccatcaacttatacatcctgctgggttgtagtgatgatctccatttcaagaatggacgagaggcctctgcctgtgtcggagtgacccctatacagcactcgacaggcggaaacgcgaagctcggttcaattgggcattatgtaaaacagggtattttacgcagtcagttgatcagtggtgctatggccgtcgttggggcactcagtaaacggctgccaaaaacaactaaagagatctggctgaaacaattaattgaacggcgtggaaaacgttgcgcagcagtagcgctcgccaacaaaaccattagaactgcctttgcgatgctgagtaaaggaacagaatatcaggcccaggcaataactgcctgagccttatatgtcccgatgaaatgcttaacttagataaaaatcagctaccgtaatcagttcgttgctaagagcgttgaagctcgttttcgagatgtgatccggtagttcgcgcaaatatcagtgagccagagttagctactcaactagagctcgaacataagcgtgcatttattctaagtcaaaatcatttcattgttgacagaggggagtccacata

SEQ ID NO: 1467 - DNA, 1319 bp, unidentified
  source 1..1319: mol_type = unassigned DNA; note = element_1e1c2bd
  misc_feature 1..2: note = core
  misc_feature 3..70: note = LE
  misc_feature 71..1084: note = CDS
  misc_feature 1085..1319: note = RE
  misc_feature 1091..1313: note = bridgeRNA
ttaattatatggtccgcctcactctcaagaccctaagcttagagtaggctctcagaatgaggtgaaccatatgtcttctatccatattgtaggtatcgacctaggtaaacattgctttcacgctgtcgctcataactcttcaggagcggaagtcttacatcgtaagtttaaccgaaaccaactcctaatctttcttagcaaaatagaacccaccatcattgcttttgaagcctgtggcggtgcacattggcttgcacgcaagtgtggtgaattcggccatcaagctcgactcattcctcctcagtacgtaaagccttatgtcaaaggcaacaaaaatgatttcatcgatgcttcagcaatagcagaagctgcggggcgtccaacaatgagatttgtcgcagtaaaaagtgaggaagctcaagtcatcgcagcgattcatagaatcagagatggttatatcaaagaaagaacagcaacaatgtctcgagttggggctatcttgcttgagttcggtctgagtttccccaaaggacatgcaaagatgaaagcaatgtttcaatggctggcagagcaaaatgtatcattaccccaacgcttgctctgtgaattgagttcaatccatgaacactacaaataccttaacgaacagatcaaggctcaggataacaagcttcaaatggttgttaatagtaatgaaagtgctcagttactgaaaacaatcccaggagtgggcgatctgacgtccacgttgtgtgttgccgatgtcagttcaccaaataatttcactaatgggcgagaaatggcggcttggttagggcttgtccctaggcaattttcaacaggaggaaaaaccaagctacttggcataagtaaacggggtaataaacatctgagaaccttgtttatccatggagctagagccgtgctctcgaggccagaaacggtagggaaagtgtttggggaatggcttgtcaatcttcgagcaagcaagccctttaatgttgtagtggtagcacttgctaacaagctagtaagaatagcttgggcggtgttgtaccaccgccaagcttttaaggctgtatagccataaccaagtttgcaacgccaatgaacgtgatgacaataacggtcaatcggccagattaagaacctgtaataaaaaatagcagtcaatgctttcggctttttaaggataatctggcgcggatatcatcgtggagctgggaagcgagtgctcccatcaaggactccgaatacattagcgcaaaccaactccgttattacttaattgtagttgcaataacggggcggaccataca

SEQ ID NO: 1468 - DNA, 1585 bp, unidentified
  source 1..1585: mol_type = unassigned DNA; note = element_1e23987
  misc_feature 1: note = core
  misc_feature 2..249: note = LE
  misc_feature 250..1287: note = CDS
  misc_feature 1288..1585: note = RE
  misc_feature 6..228: note = bridgeRNA
tcgtattatgagataaaccagttcttgctggttgatcctttttcattttgggtcgacgattgtaggtagccgggtcgaacgttcgtgcccgtgggacttgatcccgagcgctataatgttcacccctacttgtcatgaccatgtttgaggctggttgggacgcgagatcccgtataacaagcgatgctgtggaacgacaagaagacccatataggggctgccggtaaatttacatcatggaggagtttgatgaatcccgttatcggactagatatttctaaagaagaaagccatggacaagcctttttagatcgtggaaaaccgtacagagggacgtttcaattcgagcatactcgggaaggtctggcaaaactgcttcaaactgttcaggatgtcgagcatgcgtccaaacaacgccctttgcttattctagaagcaactgggcattaccaaagccctgttgttcagttccttgaggagcatcactatctatacattgtcattaatccgctcatctcaaatcggcttcgaaagtccaatcttcgtaaagtgaagacggatgctgctgatgcttatcttttgggagagttgtactacaaagaagagtttgaaccttttaagaaaagaggtgtacaactgcttaatctgcgctatctaacaagacaatatgagtctctttcgaagatgtgtgtccagactaaactgcagttccaagctgttttggatcaggtcttccctgcgtacaaaggtgtcttcggggctatgtattcaggcgtttcattacggtttttaaagtcgtttccaacctcatattcaatcttgcgaacggacgaagaaacgcttcatgccaaaatcaaagagctgctttcctcaagacgaggacgttcagatgagtggattaacgaacgagtaaagcggctgttagaggcggcaaaacaaaaccccttcgagcagacgatgtatgctagccacttgatcaatttaaatattctcatcaccctcattcttcagtaccaggagcatcttgctgagttggaacagaacatagatgctctggctgaagaaatcgaagaatatgatttaatccagtcgattcccggcattggccataaaattgcggcaacaattttatcagaaattggagaaatcgaccgatttgatcatcctaaaaaactggtcgcctttgcaggcattgatccgagtgtcttcacttctggtaagtttacggcaacccgaaatcgaatcaccaaacgtggttctcggcagcttcgttacgccctggtttgactgtccagtgcggacttatccgctcccgcaatatgagactcaaggagttttacgatcgtaagagagccgaaggtaagccgcataaagtggctttggtcgcatgcgcaaataagctggttaattggctacactcaatcttgaaaagtaaaaaggcattccgtccagtttaacaaaaacattattggtataaccttccaaaatgaatgggattggagggttatttggtgtgcccttatttaactataccacatgattcatttttattttgatgggaatcttgacaagctattagctggta

SEQ ID NO: 1469 - DNA, 1357 bp, unidentified
  source 1..1357: mol_type = unassigned DNA; note = element_1e26b49
  misc_feature 1: note = core
  misc_feature 2..71: note = LE
  misc_feature 72..1106: note = CDS
  misc_feature 1107..1357: note = RE
  misc_feature 1108..1347: note = bridgeRNA
tatgggatggcccgccccttttccctgacatcggatatgatgtcggtgctgaagaggaaaggaacggaccgatgtctgtacatattctaggcgtagatctgggcaagaatttttgcagcgttgttggcgtggacatggcgggtgaggtcattttgcggcgctcgatgcggcgtcccaagctgattgatttcatagctcagtttccgtcatgcatcgttgcgatggaggcatgctgtggcgcccatcatattggacgtctgctggttggtcaggggcatgaggtgcgtctgatgtctccggaatatgttcggccctatatcaaggcgcagaaaaacgatgatcgggatgcagagggcatcgcggaagcagcgtcacggccaacgatgcgtttcgtcgatctgaagacgcaggagcaacttgatattcaaaccctgcatcgagttcgctcgcggctggttgcggaacgcacgacgttgatcaaccaattgcgggcgatattgctggagcggggactcatattcgcccaaggccggtggcgactggaacgggccgtggcggcgctgctggcagaatcggatggcagcatgtccgaccgcattttccaactgatccatgatttgcatgctgagtggaaggttctcgacggaaagatcgaggcgctgaacggcgaatttgtcaggctagcgcgcgatgacgatgccatgcgccgtcttactggcatccctggcatcggtgtgctgaacgcaacagcgctggtcgcagcggtcggtgacgccagtagcttccgccgaggtcgcgatttgagtgcatggctgggccttgtaccgcgacagcatacgaccggcggacaagcgaggctgctgggtataacaaagcgcggcaatgtgtatctgcgcacgttgcttatccatggtgcccgagctgccctgccttcgctctcccgcagcgatacggccgtgggacgatggctccagggcatgctcgcaaaaggcgtgcaccgcaatgtggctgtggtggcgctggccaacaaaatggcccgcgtcgcttgggctctcctgagtaaaggcaggcggtttgatgccgcctatcttgcaacggctttataaggggatcggctatgcgtcattgatacgtagcctctgatgtttgcgagaaggaaggaaagatggcctgacagtcgatcggcattgagaaagccctgcagtggcaatggttcacgaaaccgtgttgattattgtggctctcggtgcgcggatatccatcttggccatgggcctacccatgagaccggatacgttagagcagactgatcggttgccacctcaatttcctgcttgcagacggggcgggccatacg

SEQ ID NO: 1470 - DNA, 1505 bp, unidentified
  source 1..1505: mol_type = unassigned DNA; note = element_1e2e5d6
  misc_feature 1..2: note = core
  misc_feature 3..258: note = LE
  misc_feature 259..1485: note = CDS
  misc_feature 1486..1505: note = RE
  misc_feature 7..248: note = bridgeRNA
ctaatgggaagtaccaagtccaccggattggatccggcagagttggtactggtagccgctactgggtgaacactctcctcgactgggctcgcgagccctagggtcagatcgtgtccctggtagtcggccaggaggttgatcgctgatgggatgtcgtgcccggcctgagttcggggtgtgagcactggtccattagttcgcggctcgccttctcggcgtggctgccatcggtagcgatcgggaagggagtcggtgacgatgctgttgttcgtcggtgacgattgggcagaagaccaccacgacgtggaggttcagaacgagcagggccgcatcctgcggcgggcgcgattgccggaaggtatcgctgggatcgccgggttcggcgaactcgtcggccagttcctgccagaagacggtcaggcctgcgatgtgctggtgtgcatcgaggtcgatcgcggcacgtgggtcaacgcgctgctggcagccgggtatcgggtgttcggcgtcgatccgcggcaggcgcatcgccaccgcgagatcctttccagttccggggcgaaaagcgataagggtgatgcgcacgcactggcggacatgatccgcacccgccgccatcagctccgcgaagccggcggtgactccgagatcgccgcagcgatcaaggtggtcagccgagctcatcaaagcatgatctgggaccgcacccggcacatgctgaggctgcgagcggctctgcgcgagtacttcccggcgatcctgctggtctgcgccgagctcgacctcgcattgaccagccgcccgatcctggcccttctggccaaggcggcaacaccgcagaaggccgcgaaactcactgcccggcagatcctcccaatgctcaagggataccaccgcaaggaagacaaagccgcccggatccagcagatcctccacggcgagcacctcgggcaaccggagatcctcaccagcgcgtacgcggcatcggttcgctcgaccgtggccgtgatcagcgtgatcaacgaggagatctccgccctggaacaggaggtgaaggcacattttggccagcacccggacgctgagatcatcgccagccaacccggcctcggcgtgatcaccggcgcacgggtgctcgccgaattcggggacgcccccggacgctaccgcagctccaaagcccgcaagaactacgccgggaccagtcccatcacccgccagtcaggcaaaacacgggtggtcgccgcacgcttcgtgcacaacgaccggctcgtcgacgctcttcactcacaggcctcctgtgccctactccacgacgaatacgcccgcgcatactacgaccagcaacgcgcccgcggcgtcaaacacaacgccgccctccgccaactcgccaaccgcctggtcggcatcctccacggctgcctaacccaccagagcacctaccaccaagacacagcctgggcacaccacaccacggccgcggcttgacatcaaacgtccagggatgt

SEQ ID NO: 1471 - DNA, 1209 bp, unidentified
  source 1..1209: mol_type = unassigned DNA; note = element_1e49d52
  misc_feature 1..2: note = core
  misc_feature 3..212: note = LE
  misc_feature 213..1202: note = CDS
  misc_feature 1203..1209: note = RE
  misc_feature 12..190: note = bridgeRNA
cttgtatctttaggtttgtcgtggttagctgccacggcttgggaggaaagaagcttctagggtgcctgaaggcatagaccttgtaacagagatcaagcctttcctcccccttcttggccagacgagacactgaacggtagccaagggttagaccctgtatgcacaaggaaagtgggcaaagtcggccatctatttgaacttgggagacaaaaatgaactatctggggattgatgtagccaaagccaagcttgattgctgtcttttgatggaaaacaaccgcaaaaagtccaaagtcgtaaccaactccgaggaaggcttccagcaactgattgcatggtgtaaaaaacaaggtttcttgcccgccgatcttcatgctgtcatggagagtactggctgctaccacgaacctgttgctcatgccctttttgaggtagggatgcaggtttcgttacttaacccggcgcgtgtgcgagagttcgccaaaagccagggtatcttatccaaaaacgatgggcttgatgcttttgccattgcccgcttcggagcttcttcagagcttgagctttggcaaccaccccctgcggaagtgacctatctgaaagtcctgatggcgcgcatggaaacgattgaccaagatttgcagcgcgagcgcaaccggcgtgaaaagacagactttatcaatgcccctgatgcggtgctggattcgttcatggaacacattgctcacctggaactggcgcacgaaaaactctctaaagagatcgagcgccatattgaccaacaccctgatctgaagaaggatcgtgctctgttgcaaagcatccctggcgtaggccccaaagtcagcacggtgatgatggtctgcttacgtcaagggcagtttagctgtgccgaacaatcagccgcctacctgggtttgacgccgatagagcgacaatcaggttcttcggtgagaggccgctcgcgcctgtccaagaacggtccggccaaagtacgcgcaaagctctacatggcggctgtttctgccaaaacgcacaatccacatatacgggagttggcgcaacgcatggctctacgcggcaagtgcaacatgtctattattggcgctgccatgcgaaaactcgttcatctttgcttcggcgtgctcaaaaatcagcttccttatcaacccaattacgctccaaaggggttgacagggtagacggtat

SEQ ID NO: 1472 - DNA, 1810 bp, unidentified
  source 1..1810: mol_type = unassigned DNA; note = element_1e536da
  misc_feature 1..3: note = core
  misc_feature 4..241: note = LE
  misc_feature 242..1456: note = CDS
  misc_feature 1457..1810: note = RE
tcttatacggtaacatgttcccaaccctcagtgtgagggccgcagcaggagcgctcctcgctgctttctaaccacccggagaagccttacaacttctctcggctcgaccgaccacgacagatcgtgctctccggatggttgtcctgggcaaaccgacgattagagggttgtttcgcttcgagcgccagtgtataagaactcgctgtccccaggacgttataccgaagggagggctctcgcaatgtggtatgctggtattgattgggccgatgaccatcatgatctcgtcgtcctggatgagccaggacggcaagtgcgcaccctgcgcgttgcccatacacccgctggcttggcccacctgaccgctgccttggaacagatctgtggatctgacgccaaactccagctggcctgctttgtggaaaccaatcgtggattgctgattgccgccttgttggaggccggcttccccgtctatccggtcaatcccaagaccgtggaccggcgccgcaatgccgccggcgtcaagaccgatcaggtcgacgcctatttgctggccaagaccgggcggagtgacctggccgatttgcggcctctgaccccggatagtccgctgattgcggaactcaaagtgctgagtcgcgaccaagacagcctgattgtgagccagacccgcatccttaatcaactgacggcgtgcctgaaggcctactatccggtcgccctgacgctgttcgccaagctgcatcagcaatcgaccatcgcctttttgcgtgcctatcccacgccacaggatgccatggccagctcggaagcggcgattgcggcgatccttaaacaggctggacatacccgcgcggcacaggctgccgcgaccatcgctcagacgctgcaccagccgcacttgctggcagatgcggtgaccacgcgcaccaaggcgcgcttgatgctggcgctgctggcccaactggggccactgatgcagcagattgccgcctacgatacggagatcgaacgcctttttttgatgagtgccgacagcggcttgtttgcgagcctgccgcgggcgggcaagcggctcgccccgcggctgttggcggaaattggcgatgatcggagtcgctacacagatgcggctgctctgcaagcgctctccggcacggcgccagtctgctttgaaagtggcaagtatgcccgtgcgcatcgacggtatgcctgcctcaaacccttgcgcaatgccatgcagcacttcgcctggcaatcgaccttgcaagagccatgggcactggcctattatcagcggaagcgggcggaaggcaaaagccacagtgtcgcacttcggagcttggcgaacgtctggctgcggatcatctatgcgatgtggcgtgaccatacgccctacgtgcggccaacgtttcaggccgcgcaagagcagcacatgcgcaaggcggcgtgagcgagcaggcaggtgtctgacggggccgccaaatcggtccccatccagaacagcgccgaccaggggtcgcttgctgctgtgtggtgctgcctgacgttcgccgcgtcccgcgaccgcgtccctcccggtgcgggatggcagctagccccacggcgagtcaaggccgcgcgggggccagcctgaattcggtgcgcgtagcgcctccatcacgaaggcccatcgcgcgcttgcggtggccttgaccggcgtgggagaatgggcaagcccgcacgggaggcgcgctagcataccctgggagaggtaggggcgatcaccggttacgatttgtacgatttgccctattgacatagaggg

SEQ ID NO: 1473 - DNA, 1167 bp, unidentified
  source 1..1167: mol_type = unassigned DNA; note = element_1e5807d
  misc_feature 1..2: note = core
  misc_feature 3..177: note = LE
  misc_feature 178..1146: note = CDS
  misc_feature 1147..1167: note = RE
  misc_feature 34..198: note = bridgeRNA
cttgtatcttaaaaaatggttaaaataactaagattggatttggcacagcgtatgcagcccgactacacctagggttaaaagcccgttagagagctactggcgcatatgctgagccactcatctgaaacccgaacagttgtccgtattccataacgcatttgcaaggatgggtaataatgagtctgccgaagccactctgtgttggtatcgatgtttcaaaagcaaccctggatattgccgccagcagcgtcattgagcaattttctgttggcaacgacgctgacggctttgattccatcattgctgagctgaggacgcgcgaagttgcgcttgtgctgatggaagcaactggaggacttgaagctgctgtagccagtacgcttcaggtcgaaggctttgagatcgcagtggtcaatccccggcaggccagagactttgcccgtgccatggggtacctggcgaagactgaccgtattgatgcgagagcacttgcgcagatggccgaggttattaatcgccatccggaacggaaccgctttatccgggcactgccggatgcagaacgtcaggttctcaatgcaatggtcgttcgcagacggcagttgattgcgatgctggtcgctgagcgaaataggttgtacccagctcatcctcaaagcagaaaaagtattaatatcatcatgaaaacgctggacgatgagcttgcgcggatcgatgaaggtatgaataaccatatccgaaaccacttcaaagagctctctgagcgattgagtagcatcaagggcgtcggcactatgaccgtggccgcactgttggcagaggctcctgaattgggtcggctctcgagacgaggaattagcgctctcgtgggagttgccccggtaaaccgggattctggcacgatgagaggccgacgaaccatcttcggtggtcgggcgggagtgcgaaccgcgctgtacatggctgcactcgtagcaacccgcttcaatccagtgataaaagcgttttatatgcggctggtttcagtgggaaaaccaaaaaaagtagcgctggttgcctgtatgcgcaaactgctgaccatcctgaatgcgatgctcaggaagaacgaagaatggaatgaatcgtatcatcacgtagctccatgattttcacgttcaagacagttg

SEQ ID NO: 1474 - DNA, 1582 bp, unidentified
  source 1..1582: mol_type = unassigned DNA; note = element_1e5ba06
  misc_feature 1: note = core
  misc_feature 2..79: note = LE
  misc_feature 80..1141: note = CDS
  misc_feature 1142..1582: note = RE
  misc_feature 1346..1573: note = bridgeRNA
taatgggatgatccggccgtgatcctgccccgccagtaaacgaagctgggcaggggcgccaaagacaaggagccacaccatgtctacaccgaatactgcgatagccgtgattggcatcgatatcggcaagaactcgttccacgtcgtgggccacgatacgcgcggcgccatcgtgctgcggcaaaagtggtcgcgtggccaagtggaagcgcggctcgccaatatgtcgcgttgcctcatcggcatggaagcctgcgtcggcgcacatcacctgagccgcaaactcgcatcgcttggtcacgatgccaggttgatgccggccaaatacgtccgcccctatagcaagggacagaagaacgacttcaatgatgccgaagcgattgccgaagccgtgcagcgcccgacgatgaagttcgtcgcgaccaagaccgccgagcagctggatctgcaggcgttgcatcgggtgcgcgagcgactggtgtcgcaacgcaccggcattatcaaccagattcgcgccttcatgctggagcgcgggatcgccatgcgacagggcatcggcttcctacgcacggaactgcccaccattcttgcgacgcgcaccgatgccctgtcgccacgcatgttgcgcgtcatcgaggagttggcagtcgactggcgccgcctggatcagcgcatcgatggtctatccggcgagatcgaagcaattgcccgtcaagatcaggcatgttcgcgcctgatgacggtgcctggcatcgggccaattatttcgagcgccatgggggccgcgatcggcactgaagacgtattctccaaaggccgcgacttcggcgcctggcttggactggtgcccaaacagatctcgacgggagaccgcacgatcctcggcaaagtctcgaggcgtggcaatcgctacctgcgcggtttattcgtgcaagcggcatgggtcgtgctggtcaggataaagaattgggaacgttacgggtttacgtcctggatcgaagtcgccaagaagcggctacaccacaatgtgctcgcaatcgcgctcgctaacaaacttgcccgcatcgcctgggcggtgttggccaaaggacgcgccttcgagatgacgagaatcggcgatgcagacgcccgatctgcctgatcctcgcgccgtgctcggcgctgtcaaggcgcggcctggcgacgtccagtcagccgtaagccaagagcaacggccggccttgaccgcccctgtgcgcgacgcgatcgacgttctgcgggccgggacgaaggaacggccctttagtccgaacaaaggaactacgcaatatcgggagcaggcgatgacatagccgcatccacggtctccagccgaggtctgcgagaagacaaggcaaaatggaggatcggtcttccgagcgtgtgcgaacactggtgaccttaatggtcccgttcgagacctgtagactaatcagaacgcacgcgcgctgatatccatgatggcccggagcaaaaacgctccaatcagaggccggatacattgatgcaagaccgccgccgccaattcgacgaatcttctcgcaacgcgcggcctgaccataca

SEQ ID NO: 1475 - DNA, 1398 bp, unidentified
  source 1..1398: mol_type = unassigned DNA; note = element_1e64e5c
  misc_feature 1..2: note = core
  misc_feature 3..97: note = LE
  misc_feature 98..1120: note = CDS
  misc_feature 1121..1398: note = RE
  misc_feature 1149..1396: note = bridgeRNA
cgatgaaatggtctccccccgcttcacaaaacggcgtctatgcgccagaatggtgagtgagctcttaccattaaccggaagcgaaaaggagaccgagatgaacaatagcattgcaggcctggatctggcaaagaatgttttccacgtagttttttttgatcgtcattttaaagaggtgcgcaaacgcatgttgcgacgtaaccaggttttagcctttttcgccaatacgcctccggttctcattggaatggaggcttgctccggctccagctactggggtcgggaattgatcaagctggggcacgaggttaagattattgcgccccagcatgtaaaaccatacgtgcggggcaacaaaaatgactacaacgacgcccggggcattgccgctgccgcaaaaatccccgggatgcccaccgtccctgtcaaaaccatcgaggatcaggacatacaggccgcgcatcgcatgcggacgcagtgcatccgggatcgcaccgccttgtgcaattccatgcggggcctcctggccgagtacggcattgtcctggcaaggggagtgtccaaggttcgcaagggaattcccgaacttctggaagatccggacaatgcgttgacgccctttttcaaggagatgctggccaggcgctacgagcaactggtggagattgacggacacatcgacttttacacccaaaaaatcaagcaacgcgccaaggaggatgatgcgtgtaagcggctgcaaaccataccgggattcggccccatcaatgcaagcgcttttaaaagcgccgtcggagatggaagcgcgttttccaaaggccgggatgtatccgcctctttgggtgtggttccccgccaacacagcagcggagggaaagacaaccttttggggatcagtaaacggggggacagatacttgcgaagcctattggtgcatggcgcaagatccacggtgcgcgccgccgcaaacaaggatgaccagctaagccagtggatcaaccggctgcgggaaaggcggggcatccacaaggcctcggtggccctggcgaacaaaatggcccggatcggctgggcggggatgcctccggcgggggctctgaacaaggattatagtttttaggcatgcgggacggcgtgaaaagggtgtacctgcctgggattgcgaaggctaataaggagtgatgacataacaggtcaaaccggcgcatcgagaacctgatgggcgcgaaggttttgaaaaccggcgctgcgataaggacgatgcgcgcagatttcatcgaggccctggagaacaaggcgtaagccaaaaactcctgaaaagaggccggatatacggaagcaatcctgtccctgtcacacactgaaaaaagcccttgcaatcaggggggagaccatata

SEQ ID NO: 1476 - DNA, 1547 bp, unidentified
  source 1..1547: mol_type = unassigned DNA; note = element_1e66b8d
  misc_feature 1..2: note = core
  misc_feature 3..259: note = LE
  misc_feature 260..1423: note = CDS
  misc_feature 1424..1547: note = RE
  misc_feature 3..239: note = bridgeRNA
cttgtatgatgtttacgaagcagtaaatcatacgttcctttcatttttatatactgtgccataatacattcagatgctgtggacttttaattgatcttttgtagctttgactactctacaggagtgtattgccgctacattatctgaattgtttatagctggatgtgccggatagtttagagcacttatttcaatcaaggatacgaggataatcgctggtggatatcacagtatcaatcttaatgaaaggagaacgtttatgatctacgttggcattgacatcgccaaactcaatcactacgcctctgccatctcttcagacggcgaagtgctactcgagccatttaaattttcgaatgacaatgatggcttctataccttgatctctaagctcgatcaattcgagaaagacaaggtcatcattggtcttgaatcaacggctcactatggcaacaacctgttggcctttctggttccaaaaggctatcatgtttgcctcatcaacccaatcgagacttctactatgcgtaagaacaacatacgcaaaacaaagactgataaggttgatacctacattatttgtaaagttctaaatatgcagccccaccgattcgttactctgtatgacattggtctcatgcagcttaagaacctgggaagattcaggcagaagactgtgaagcagcgatcacgcttaaagatccagctgacttcttacgttgatcaggttttccctgagcttcagtatttcttcaaatccggaatacatcaaaagggctgctatgcgcttcttaaggaagcaccgtcgcctgaagctattgcttctatgcacttgactcatctcacaaacgtcttgaaatcgtcctcgcacggccatttcaagaaagaaaccgctgtagaattaagagttctggcacagaagtctgtcggcacaagcgacaactctctatctatccaaataacccagtctatcgaacagattgagttattagacaggcaattggaactgattgaatccgagatgaaggatatcgtcacttctctggattctgtgataatgaccattcccgggattgggtataccaatggtggaatgatcctcggtgagatcggtgatgtcaccagattctctaatccgagtaaactgcttgctttcgctggtctggatccgtctgtatatcagtccggaaactttgaagccaagcggacgcgtatgtctaaacgtggctcaagagccttacgttttgctcttataaatgccgcacataatgtagtgaaaaacaattcaacctttgcttcctactataaccagaagcgctctgaaggtcgtactcactacagtgctctgggccattgtgccggtaagcttgttaggatcatctataagatgcttaccgataacgttgcctttaacctagactgagcagagatgtctttcatacttttttgaaggcctctgccggaggtcttgttagagttaggcatttttagggatcagctacaaaacaaatatcttagaaatttattcttgacttttcatagctggt

SEQ ID NO: 1477 - DNA, 1473 bp, unidentified
  source 1..1473: mol_type = unassigned DNA; note = element_1e67120
  misc_feature 1..4: note = core
  misc_feature 5..221: note = LE
  misc_feature 222..1457: note = CDS
  misc_feature 1458..1473: note = RE
  misc_feature 1..225: note = bridgeRNA
ccccgttaccttcttgatcaagcccgatgagggcttgcaggccaccggtcacggcatgacttgtcgcccctgtcgtcgatgatctggggggtgttgtcaccgtggtcggagggcgccaacgaccgctgatagagacctgacccgctcgcgtggtctgctcgtaacgtggctgccggcgcgggtgcccgggtcggcctgccccagcggctaaggaggcgtcgttgtcgaagtccgacaagatccccgagcacgacttcaccgtgttctgcgggctcgacgtaggcaaatcggtgcaccacgcctgcgcgctggacccgaccgggcagcggctgcacgacaagccgctgcccaacgacgagaccgcgctggccgaaatcttccagcagctgtccgtgcacggacgggtgctggtggtcgtcgatcagcccgcctcgatcggtgccctggccgtcgcggtcgcccggtcactggggatcgaggtcgcctacctgcccgggttggcgatgcgccgcatcgccgacctgcaccccggacagggcaagaccgacgcccgtgacgcctacgtcatcgccgacgcagcccgcaccatgccccacaccctgcgccgggtcggcaccgacgacgagatcctcgccgaactcaccgtgctcgccggctacgacgacgacctcgccgctcagtccacccggctcatcaaccgcctgcgcgacgccctgctgcacgtccatcccgcgctggaacgcctgctcggaccccgtatggaccgcggcggggtactcgacctgctcgccgccgcccccacacccgacgcgctgcgccagctcggcgaggacggcatcaccgccgcgatgcgccctcgctcgccgcggctggccaagaccctgcccgcgcagatcctcgccgcgctcgacgcccagaccgtcgtcgtccccggcaccaccgcgttcggccgcgtcatcgtcggcgtcgccacccaactgcgggaggtccgcgccgagcgcgacacattggccgccgagctcgagtcccgcctggaggcccaccctcttgccgaggtcctgatctcgatgcccggcctcgggttcaggaccgccctcaagatcctcaccatcgtcggggacggcgccgcgttccccaccgccgggcacctcgccgcctacgccggcctcgctcccgtcacccgcagatccgggacctcgatcaagggcgagacccgctcccagcgcgggaaccacgccctgaagtccgcgctgttcttgtcggcgttcgccagcctcgccgacccgacaagccgcgcctactacgaccgcaaacgagcccaaggcaagcggcacaacgccgcattgatctgcctcgcccgccgccgcaccgacgtcatctacgccatgctccgcgaccgcacgccctacgcaccgccaacgtcctcggagcctcgcccggcgcccgccgccgcttgacaaccccatagagaca

SEQ ID NO: 1478 - DNA, 1111 bp, unidentified
  source 1..1111: mol_type = unassigned DNA; note = element_1e67259
  misc_feature 1..2: note = core
  misc_feature 3..165: note = LE
  misc_feature 166..1098: note = CDS
  misc_feature 1099..1111: note = RE
  misc_feature 1..167: note = bridgeRNA
cctgtgtgtctgagacgtgtcaggatggctgcgggcgggagatcgttgggtccctggtctttgcagaccgtgacccggtttgatccccgcccgcgttcgaccacccaaacctgaacagttgatcgaggccgcagcaacggacctcgcagcacagggataggccccatgatcatagcccctggctttgttggaatcgatgtgtccaagcaccatctcgatatctttgacgcggcggtcggcatagtggcgcgtctgacaaataccgccgctgcggtggctgaactggcgcatgactgggcgcgacgcgacgccttcgtgctgttcgaggcgaccgggcgctacgatctcgatctgcggcatgcattgacggcggagggggtgcgctttgcccgtgtgaacccggctcgcgcacgcgactttgcccgtgcggccggcttccttgccaagaccgacgccgtcgacgccgagatgctcgccacaatggcgcaatgtctgcagctgcctcccgcaaaagccggcctcgcggcacgcgagcagctcgccgcgctcaacaagcgccgcgaccaactcgtcgccaaccgccagcaggagcgtacgcgccagcgcgaatgccctgatcccttctcgcgtcagagcattgcagcgcacctcgcctggctcgacgcggcgatcaaagccattcaagcgcagatcgccgcggcgatcgctgtcgagcccgaactcgagcatgaccgccgcctgctgtcctccgcgccgggcgttggccccgtcactgctgcgaccttgctcgccctcatgcccgagctcggacggcgctcgcccaagcaactcgccgccctggccggccttgcccccttcaacaacgacagcggaacaaggcgcggccaacgctcgatccgcggcggccgcaagcgcgtgcgtgatgccctctatgtcgctgccttcatcgccgcccgccacgcgccccgcttcaaggctttcttcaaaaccctcatcgacgccggaaagccccgaaagctcgccctcatcgccgtcgcccgtaagcttctcaccgttctcaatgctattctcagagaccgccaacccttccatgcctgacacaacacagttg

SEQ ID NO: 1479 - DNA, 1365 bp, unidentified
  source 1..1365: mol_type = unassigned DNA; note = element_1e6a87c
  misc_feature 1..2: note = core
  misc_feature 3..70: note = LE
  misc_feature 71..1099: note = CDS
  misc_feature 1100..1365: note = RE
  misc_feature 1131..1353: note = bridgeRNA
tgatgctgtggacggcatccgcctagcctgagacctttaaggtttcggataagtggtggaggagcaaccaatgatgcaagcagtcgcagtaggtctcgatatcgcgaagaatgtctttcatgcctatggcgtgggcgctgaaggccagagggttttcagccgcaagcttcgccgagctcaggtcgaggtgttcttctccaagctggagccttgcctgatcggcatcgaagcgtgtgcaacggctcatcattgggcccgcacattcggggcgatggggcacgaggttcggctcatgccgcccgcatacgtcaagccgtacgtgaagacacagaagaacgacgaggccgatgcagaggcgatctgcgaggcagtcacaaggccgaacatgcggttcgcggatatcaagaccgtcgaccagcagagcgtccttgtcctgcatcgaaccagaacgatgttgatcaagcatcgtacgagaatgggcaatacgatccgagcccacctcgcagagttcggcatcgcggaagccattggcagggagggtctggctcgattgatcgatctgattgtcactggcgaagatacccgggtcacagggatcacccgtcgcgcgatgatgtgcctggtcgaacagtatcggctgctgcaggatcagatcctcgatctggatcgccaagtgatggcttgccaccggtcgagcgaagcgagcaagcgtctggccacgatccccggcgtagggccgctcgcagcgagcgcgctcgttgcatcaatcggcgatgcgtcaagcttcaagaacgggcgaagcttcgccgcgttcatcggcttggttccaaggcagtcatccagcggcgggaaagaacgtctcggtaagatatcgaagcggggcgaccactacttgagatggcttcttgtcgtcgggagcttggcagtcatccgatacgctcagcgtcacggtaccaagcgcccttggctgatcaagctcctgcagcggcgtacgaccaagattgcggctgtcgcgatggcaaacaagattgcgcgcattgcctgggtactgatgacgcgaggcgatgtgtatcgcgaaccagcggcacaagcggcatagaaatcggcacacccatacggggcgtgctgcacgaggttggaaggggctaaagacaagtcatgcagtaacggtcgatcaccgtagatcagcaaaacccaataatcccagggcgcctcgagcgcgcgctaatgatcgggagctgatctcgcagatagcatgaaggccatcggtgttcgcgccgagcaaacaggccggacacatgggcgctaccgaccagctcttcatgacgatggaaaagtccttgccaacagggtgccgtccacaca

SEQ ID NO: 1480 - DNA, 1753 bp, unidentified
  source 1..1753: mol_type = unassigned DNA; note = element_1e6bdf8
  misc_feature 1..2: note = core
  misc_feature 3..284: note = LE
  misc_feature 285..1553: note = CDS
  misc_feature 1554..1753: note = RE
ccggtacaatgtcatcgatgaaacaaaaatagtttcatcaaagacggttatatggttgtgccgatttccaaaacatagtaatattgaagtatgaactggggctgaaagtggcaaaactgcttgcttggtttccattcaggaattactaacagcgtagaccgtccgttcgcttcgtaaaagattcaatgttttgattggttgggtcggcacaaccgttacccgtgtcaacaacgcgcctgttacttttgcgaagaagcgaaactgccctgaaaggagaggtgtatatgagttattgtccggtagctggaattgatgtcagcaaaaaattcagtgatatgtgcattttgtcgccagacaacaaaatctttgcgcaagaaaagatttatcacgacgaaacatcgataaatcgagcgaacgccctactccaaaaggctgagcggctttttttcagtaagcctgttattgtgatggagtccacttcacactaccatttgatcctctttcaatttttctcagagcatggatatgacgtgatcgtggtgaatccacttcaaagcaattcgatgaaggacttctctatcagaaagaggaaaaccgatcgtgtggatgccttcaaactggcaatgatgtatcgaacaaagacattgcgtccttcccaaattcctcaaacggcaacgcgtgcgctacgccagctctgcagacatcgtgcggaattgttgaacgacgtttcgagttataaaaaccgattaacagcccttttggatcagacctttccaggctatgataaggtcttttccgatgtgggaggcgtcacttcctgcgctgtgcttgtacgttttccaacgccgaccattttgcttgtagaggaagaatcagaactggttgaagtgattgctgctgcaagcaagtctggttatagttttgctaaaaagaaagccagattgctaatctccgcagcacaaaaagcgcagacattggggattcattcatgtgccgatgaaacactcattgtgtgtaccattcaaatgcttcgtacattgtccgaaagtgtgcttcaaatagaaaccgcaatagataatttgctggctcagataaaaggaatgcgaaacaacgtttctttactgcaaagcatccctggtattggtagtcattcggcagcccttttactaggagaaatcggagatatctcgttgttcaagaagccgaaacagcttgcagcatattttggtttagacccaacagagcggcaatccggatcattcagaggaacaaagaacaagctctcaaaacgtggctcttcctatgcaagagctgcacttcacatgggaatagttaattcgatttgtaagcgcggaaaggactctgcagcgaaccccgtactgctcagttattatgaaaagaaatgtaaaaacaaaccggcaaaggttgctcaagcagcgtcaatgcacaaactggtctttataatctttgcagtcttgcgtgaccagaagcccttcgaactgaaaacgccagagcagcatgctgttgaacagggatttgtaaaagcagcctgaagtttttgagggattcaagccctgaaacaaacacagggccttattgggtatgcgaaaaatttgaatttggcatctttcactgcccttgttctttacttggtgtaagcgatggcaaggctataagcgatgaatactgaactcaaaccgttcgatttcgttcttattggctacctgtgctattgactttgcttaattggtct

SEQ ID NO: 1481 - DNA, 1377 bp, unidentified
  source 1..1377: mol_type = unassigned DNA; note = element_1e7257c
  misc_feature 1: note = core
  misc_feature 2..92: note = LE
  misc_feature 93..1118: note = CDS
  misc_feature 1119..1377: note = RE
  misc_feature 1143..1375: note = bridgeRNA
taatggtatggaccctctccactccacttacggcttcaaatgagccaatatagggttgattaaaacgtctatagataaagagagaggatcacatgagtactataacaatcggattagatatagccaaatcagtttttcatttagtttggatgaacgcaacaggtaaagtattaaaaagaaaacagctttcacgaaaaaaagtagcggagtattttgctaacctagaaggatgtactgtcgtcatggaagcttgtggcagtacacattattggtcacgggtaattactcgctgtggacatgaggtaaaagcaattgcaccacagtttgttacgccttaccgcaaaggtaataaaaatgattacaatgatgcggaagcgatagcagaagcagcacaacgtgaaaatatgcgttttgtgccgttaaaatcattagaacaacaagacattcaaatgttgcatagaattcgggaaaggttaattaaaaatagaacggcattgagtaatcaaattagaggtttattggcagagtatggtttagtgatacctaaaggtattcaccacctaaaagcacagttacctggatttttagaagatgccacgaatgaattaagcacttcagctcgtcgttattttcaaggactgtatgaagagttggatgagttatcaattcaaataaagtcagttgatagcgaagtgttgggcataagtaaacaaaatgaagtttgccagcgattaagtacaatgacaggcattgggccaattattgcaaccgctttatatgcgggtattggaaatggaaaagcgtttactagtggtcgacatgtttccgcttggttaggcttagtgccaaaacaacattcgacgggaggaaaaccgaccttgttaggaatttctaagcgtggtaatacctatttaagaacacagttgattaatggggcaagagccgcattgaggcattgcgaaaataaaaatgaccaagttagtctttgggcaaaaaaattaaaagaacgaagtaattacaataatgccacagtcgctttagcgaacaaaatggctcgaatggcgtgggcgatgttacatcaccaagaagattatcgattaaaagttgcgagcaagtagagcgtaaagaacaccgtataacaaccttgtaacattgctagataatagagattgatgggatacagttcagcactgccctataggaaaccttataataccaagggctatcataagccgttcaattgatgaggtgataggggcggaaatccatcagggctagaggcatcaaatgatacctcagtcaaaagccgaatatatggctgcaatgcactctataacaaagatctaaattgtcttgcaataggagagggtccatata

SEQ ID NO: 1482 - DNA, 1484 bp, unidentified
  source 1..1484: mol_type = unassigned DNA; note = element_1e7695a
  misc_feature 1..2: note = core
  misc_feature 3..226: note = LE
  misc_feature 227..1471: note = CDS
  misc_feature 1472..1484: note = RE
  misc_feature 15..234: note = bridgeRNA
ctaaccactcttaacgagtctgtcgctgaggcagactcaggtctgacagccgccggcgggtgagcactcacagctactggaccttgagtcctaggcaaagatcgtgcccccgctggtcggccgggagagttgatcaccgctgggatgtcgtgcccatccgtaggggtgtgagcactgcttgattagttcgctgacggttctcccgcgggctgttgagtatcgatcggtgtcgagaaccgggggggaagcgttgcgcctgttcgtgggagatgactgggccgagcagcatcacgacgtcgagctgatgaacgcctcggggcgcaggctggccaaggcccgcctgcccgaagggatggcggggatgaccaagctgcacgcgatgatcgccgagcagctcggtgaagcggccggagaggcggaggtggtgatcgggatcgagaccgaccgcggcccgtgggtgcaggcgctggtcgccgtcggatacacggtgctggcggtcaatccgctgcaggcggcacggtaccgggaacggctgagcgtctctggcgccaagagcgacgcggccgatgcgcacatgctggccgacatggtccgcaccgactcccaccagctgcgcaccgtcgccggcgacagcgccgaagccgaggcgatcaagggggtgacccgggcccataaaacattgatctgggaacggacccgccatgctcagcggttgcggcacgcgctgcgcgactacttccccgccgccctgcaggcgttcgaggacctggccgcggccgacacgttggagttgctggccaaggcccctgaccccgcgtccgcggccaaaccgaccatcggccagatcaccgccgcgctcaaacgagctcgccgccggggcgtcgccgacaaggccgccgcgatccaggccgcgctgcgcaccgagcacctgggccagagcgcggctgtgaccgctgcctacgccgccaccgcaggttcggcggttgcggtcctggccgtgctgggcgagcagatcaaggccctgcacgggcaggtggaggaccacttcagccaccattcggccgcgaagatcgtcctatcgcagccagggctgggaccggtccttggcgcccgggtgctcgcagagttcggcgacgccgaaggccgctacgtcagcgccaaagcacgcaagaactacgccggcaccagcccgatcacccggacttcgggcaagaagaaggtcgtgctcgcccgctacgtgcacaacgaccggctcaccgacgccctcgactctcaagccttcaccgccctgcaggcctcaccgggcgcccgcgcctactacgaccggctccgcgcccgagaggtctgccatcacgccgccctgcgccaggtggccaaccgcctcgtcggcatcccgcacggatgcctgaagaccgacacgctctacgacggagcaaccgcctggccacaccccttgctgcttgacacctaagctcctgggacgt

SEQ ID NO: 1483 - DNA, 1404 bp, unidentified
  source 1..1404: mol_type = unassigned DNA; note = element_1e769b6
  misc_feature 1..2: note = core
  misc_feature 3..79: note = LE
  misc_feature 80..1123: note = CDS
  misc_feature 1124..1404: note = RE
  misc_feature 1121..1392: note = bridgeRNA
tgttggggtggacgactcccaacggcatcgaagtgtgccagattgagcttgtcaaaggactcaacgagggagaccgtccgtggagcagattacccgcattggcgtcgacacgtcaaagaatgtctttcagttgcatggcgtgagcgcggaggaaaagccaattgtccggatgaagttaagccggacgaagatgattgctttcttcaaggaccttccgccaaccgtcatcgcgatcgaggcatgcggtagtgcccatcactgggccagatatctgggctcactcggacatgaggtcaaactgatcgccccgcaattagccaaaccgtacgtaaagcgtggaaagaatgatgcggccgatgccgaggcgctttgtgaggcaatgagccgcccgacgatgcgcttcgtaccggtcaagaccggggaccagcaggcggcgttgatgctggtgggtatgcgcgaccggctagtccggaacagaacccagctcgccaatgcgatccgcggctacgccgccgagttcgggctcacggcagcgaaaggcatatgcaggattgagttgctcctcaaggatattgcctgcgatgacaaggtgcctgagcttgcgcgcgatctgttcgcgattcatcggcgcgaatatgaactgctacaggcacaaatcgagagagtagaagcaaagctcatggagtggcatcgcaatgacgaatgtagccagcgtctttcccagatcccaggtgtaggccctattggcgcatcactgttgatgatgaaaacgcccgaccccaaactattcaaatcagggcgtgactttgccgcctggatgggcctcacgcccaaagatcattcaacggctggcaaagctcgtcccgggggaataacccgcgccggggacgaactcctgcgaagcgtgctggtcaatggcgctaccgccgttctcaagcaggtccgggtggggcgaggcaggcccgcatcgccatggcttcacaagcttctggaacacaagaaaccaaaacccgtagcagtcgcgttggcgaaccgaaccgcccgcatcgcatggaagatgatggtgaccggcgaaagctatcggataacaactgccgaaccagttttggcaaaagcggcttgagagttggcctgtcatggtgagcaatgatccaatgctaccgtgctgagctgatgcaagatcttgcaggaaacgagtagatggtctgatcgatcgatccgagacgcgagacactccgagttttccactggccttttgaggtcgccttggtgtttggaactcgcatcgcggaaaccatcttggccagcggccatacgcgccgcatcaacaggtcggacatatggtggcaagcgatctgatcaaaatatccactctgcctcttgcaagagggggccgtccacata

SEQ ID NO: 1484 - DNA, 1523 bp, unidentified
  source 1..1523: mol_type = unassigned DNA; note = element_1e7f5ee
  misc_feature 1..2: note = core
  misc_feature 3..238: note = LE
  misc_feature 239..1405: note = CDS
  misc_feature 1406..1523: note = RE
  misc_feature 3..217: note = bridgeRNA
cttgtataatgaacatgtagtcaagctactgttcaagttatttttgttttataatgaacatagtgttgtggattggttttttctcctacggcttgactgtttttgaaaggctccaaccacatatctatgtttatttgtttattagttagataacgctttgacgtttgatctcgggcaaggatacatagcatagattaatgtggattcacaaccaattctttatagaggaagtgattttatgatctacgtaggcatcgacgttgccaaagaaaaacatgactgttttatcgtctcttctgaaggtgaaataatcaaagatgttttcactttcaaaaacaacagctatgggtttaagtctcttctagctgctatcccagatgttcccaaagataaaattaaagtgggaattgaagctactggacactacagcttgaaccttatgagatttatcatcgataatcaactacccctagttgttcttaatcctcttcaaaccaaccttttcagaaaagctcaaacgcttagaaaaagcaagacggacaagattgatgctaaactcattgctcttatgctacagtcagataactttaaaccccactcacaattatcataccatcttagtgagttgaagtcattaactagacacaaatccaggataaaagaaaatctctcaaagtataaaatttctctgcatagaatcttggatatcatgttccctgagttggcctctgtggtatactcgattaatcaaaaatcaacatacgctctcttaaaggcgtttccttcaaaggaggctatatcatctgctcatcttaccaaacttacaaatactctaaagaatagctctagaggaaagtatggtagggctaaggctttgtcgataaaagaagccgctgccaactctataggatctgatagccgtgccttatcttttgaactatctcaaacaatctattttattgagctctatgctgatgagatttctaaaatagaccaagagattaaaaccataatggatgagttgcaaagccccatactctctatccctggaatttcatatggccttggatcggttatcctctcagaaattggagatatcaacaactttgaatcaccatccaagctgcttgcctttgcagggctagaaccttccacctttgaatctggaaagtttatcgctaaagacatgcgtatggtcaaacgaggctctcctcatcttagatgggctgttttagaggctgctaggttaatctccatgagagatgaaacctttagagcttattatcagaagaagaaagctgagggcaaacatcacaatgttgcaaactctcatgtagctaaaaaactgattagggtcattcatcatttactgactaacaatattgaattcgtacctcaaaactaaaacagttcgtaaccaattgtagaatgaattactcactacctctttttgctatgcgtttttttatcattaaccacaatatgaattattataattttttacttgacttcatatagttagt

SEQ ID NO: 1485 - DNA, 1537 bp, unidentified
  source 1..1537: mol_type = unassigned DNA; note = element_1e8664c
  misc_feature 1..2: note = core
  misc_feature 3..246: note = LE
  misc_feature 247..1410: note = CDS
  misc_feature 1411..1537: note = RE
  misc_feature 3..229: note = bridgeRNA
cttgtatgatgtatttacactgaaatacatcaatactctcctttcttttcaactttgttataatcaatagtaacactgtggactttttattttttttatagctttgactattttaaggagtgtattgccacagttttatctaaattatttatagttggataagtctttgaactttcatttcacgcaagtttatgatgataaaactaggtggataaacacagtgattaattcaaggaggttctgtttatgaactatgtcggcatcgatattgccaaacaaactcattatgcttccatcatgaattctgaaggggaaattcttgtagcaccatttcctttttctaatgatcatgctggatttcaaaaacttcttaaacatctttctgcgttttctcatgaagatgttcttattggtatggaatctactgctcattacgctgagaaccttaccagtttcctttttactagaggtttcaacatctgtatcatcaatccgattcaaacttcctctcttcgaaagtcaaacattcgtaagacaaaaacggattctgttgatacatatctaattattaaagccctttttcttaaccactatcgcctatttacggaacgtgactatgattctttacaattaaaaaacctctgtcgcttccgtcaaaaacttatgaaggcaaggacaaaggtcaaaattcaacttgtaacttatgtggatttgttattccctgaactacaatattttttcaaatctggcattcacggaaaggcttgttatgaacttctcaaaattcagccaaatcccgacagaattgccaaaatgcatctcacaaggctaactaaccttctatccaaatcctctaagggacactttaaacagtctcatgctgtacaattaaaagagcttgcatcgcactctgtcggtattaaaaataataccctatctttgcagattttgcaatctattcaacagatagaaatgtacaacaaacaactggcagaagtagaagcctccattcacgaaatcatggataagatggattctgtaatcaaaaccatccctggtattggttatcttaacggagccatgattattggtgaaattggtgatatttcccgttttgaaaaaccttgtcagcttcttgcttatgcaggacttgatccgtctgtgtatcaatctggtaactttaatgctgcaagaactagaatgtccaagcgaggatctaaactccttcggtatgcccttataaatgctgcctggcaaacaactcttgtaaataaaaccttcaaagactactataacttaaaggtttctcaaggacgtcgtcactacaatgccttaggacatgtcgcacataagctcgttcgtgtcattcataagatgatgacagataatgtggaatttaacttagtctaagtcttacctatctaactatatttaattttcaaagcaccttcttagatgctttatttcttatacacttttttattcaaaacttttattcaaaaaacatgcaattttctattgactattcatagttggt

SEQ ID NO: 1486 - DNA, 1429 bp, unidentified
  source 1..1429: mol_type = unassigned DNA; note = element_1e8eb84
  misc_feature 1..2: note = core
  misc_feature 3..88: note = LE
  misc_feature 89..1117: note = CDS
  misc_feature 1118..1429: note = RE
  misc_feature 1177..1415: note = bridgeRNA
tgatggggtggacggcccctgctctccaggcatcgaagtgccataacgtggtcgtcgctaaacgccacaatgagaggagccgtccgctatgcaagttaccacaatcggtttggatgtcgccaagagagtctttcagatccacggcgtcgaagctgccggcgcggttgttattcggaggaagctgaggcggtccgagctgttgcaattcttcgctcaccttgcgccatgcctggtcggcatcgaggcctgtgcgaccgcgcacttctgggcacgagaattgggcgcgttcggccatcaggtccggctggtgccgccgagctacgtcaaggcctacctgaagcgcggcaagaacgacgcggccgatgcggaggcgatctgcgaggcagtgacgcggccgaacatgcgcttcgttccggtgaaaactgtcgagcagcaaggcgtgctggtcttgcatcgcgcgcgcgaattgctggtgcgccagcgcaccatgctggtcaatggcctgcgcgctcacatggcggagttcggaatcgttgtgccgcaaggtatccagaggctgcctgagcttgtggcgttgctggaagacgagaagacgggcatcccacaaattgcccacgaggtgcttgcggcgatggtcgtgcagatcaacaatcttacgacgagcatccggcagatggagaagcgcattgtcgcctggtgccgcaccaatgcggcggcgcggcgtctttcgaccattccgggcgtgggcccgatcaccgcctcggcgctggccgccacgatcacggatccgacgctgtttcgatccggccgccatcttgcagcatggctcggcctcgtgccgcggcagcactcgaccggcggcaaggccaagctcggtcggatcaccaaaatgggcgatcagtatctacgcaagttgctgatcgtgggcatgacggcagtgatccgatcggcgcggcgcaccaaagctccggctttcgcctgggtcaacgcgttgctcgagcgccgtccggcgcgtctggtctcggtggcactcgccaacaaggcggcgcggatcgcctgggcgatcctgatccgcggagagacctaccgggcaccagcgataacagcagccgcatgaccgctaccgcgctatttgggggcgcgctcgctcgcggcttgctcccactgaattcgaccaacgacccgatgtgaccgttaccgactgcagggggtgctatgacgtgatggcgaaccggttgagccggggactgggaaaacccgaatagtgcccagcacttcgagtgcgggaagatgattgggacctggtccgcgaacttccatcagggccagcggtcgtgtgaaccgcgcaaacaggccggacacatgagcgcactcgaccagcttgccaaaacgtcaaaaaacctcttgcaccgcaggggccgtccacaca

SEQ ID NO: 1487 - DNA, 1401 bp, unidentified
  source 1..1401: mol_type = unassigned DNA; note = element_1e92874
  misc_feature 1: note = core
  misc_feature 2..88: note = LE
  misc_feature 89..1114: note = CDS
  misc_feature 1115..1401: note = RE
  misc_feature 1162..1393: note = bridgeRNA
caatggtatggacccctcccacctaacggcatcaatgtgccagtttggtaaaatttaactttccaaacacacggcggaggagtccgagatgaatattaaacgagtcggaattgacctggcaaaacaagtttttcaagtacatggtgtggactgtcatgataaagcagtgttacgaaaacaactgcgtagaaaccaatttttaggttttttcgctacgttgtctccttgtttgattggcatggaagcttgcggtggagcccatcattgggcaagggagttacagaaacaaggccataccgtgaaactgattgcaccacagtttgttaaaccctacgtcaagagcaacaaaaacgatgccaatgatgctgaagccatttgtgaagcggtagggcggccttcgatgcgttttgttaccatcaagacggttgcccaacaagacttgcaggctatccaccggattcgcagcgaattgattcgtcagcggactgccaaggttaaccagatcagaggcttgttggcggagtatgggctagttgtgggtcgacaagtacacgttttgcgtcgagctttgcctgatttgttggaaaatgccgacaacggtctcagtttcgatttcagggcgttattggataatttgcgggcagacctcgttcattttgatgaacgggtggcggaaatggataaaaaaatccacgccctagcccacagtgagcctgctgccaagcggttgctgagtattcccggcgttggcccagttagtgccaccgctattctttgtgcagtaggcgatggcaaacagttcaaacgtggacgggacatggcggcttggctggggctaacacccaagcagcatagcagtggaggtaaagaccgcctattagggatgagtaaacggggagatacgtatttgcgaaccttactgatccagggtgcccagtcagcactcaaggtgatcgacaagaagacggatccgaggagccaatggttgcaaaacttatgcggcaggcggcctaaaaacgtagccgcagtggccttggcgaataaaaacgccaggatagcttgggcattgctgaataatgagaccaattatctttcggaaggcaaaccggcttaagtccgaaggcaagccttcaaacttaaaccggttgagataaaacaccgttcaaccacgatttgtaaagcaacagcaacaactactaatggcgaacaggtcgaaccggcgtttgcaaaacctgaaacgtctgctgtgcttttaagcacgccaaagcaataaggagcaaacgcgcgaatagcccattatggccagagcttttgagctcgttaacaggccggatatacgtgtgcagtcgtacctaataaccaatggtgattattgcttgcaaaacgggaggggtccatata

SEQ ID NO: 1488 - DNA, 1395 bp, unidentified
  source 1..1395: mol_type = unassigned DNA; note = element_1e9764f
  misc_feature 1..2: note = core
  misc_feature 3..83: note = LE
  misc_feature 84..1112: note = CDS
  misc_feature 1113..1395: note = RE
  misc_feature 1141..1381: note = bridgeRNA
tgatgtggtggacggcgcccgctcccggcgacgaattgccgtaaggtgatcgttgcgacgaatcacatgagggagccgtccacatgcaaattagcacgatcggtttggatatcgccaagaacgtgttccaggtccacggcatcgatgcgaccgagaaggtcatcgtcaggaagcagcttcggcgcggtcaggtgatgaagttttttgcggcgctgccgccctgcctggtcggcatggaggcttgtgctaccgcgcactactgggcacgtgagctgacgaagcttggtcacgaggttcgtttgatgccggcgaaggatgtgaaggcctacgtcaagcgcaacaagaacgatgctgcggacgccgaagcgatctgcgaggcggttcgccggccaacgatgcgatttgtgcgggcgaagtcggccgagcagcagggcaggctgatgcagcatcgcacgcgcgatcttttgctgcggcaacagacccaggtgatcaacgcgctgcgggcacatctggctgagctcggaattgtagctgcgcaagggcgcgaggggctcaagcagttgctggcgattattgcggaccaggccgatgcccgcctgccccttgatgctcgtgcgtgcctgatcgtcctggcggcgcagctgcaggcgctgcacacattgatcaaatcgatcgagaagcggctccttgtgcagcatcgcgccaatgaggcgagcaagcgactggagagcatccccgggatcggcatcattggcgcgagcgctattgccgccactgttacggaccccaaggcattccaatcggggcgtgactttgccgcctggattgggcttgtaccgcgacaagattcaaccggaggcaaacagaagctcgggccgatctccaagcagggagaccgctatctgcggcgtattcttgtggtcggggcccatgccgtgatgcggtgggccaagcagaacccggggaaatatccttggctgacgcagctgctagcgcggcgaccgttcaaggtcgtggcaattgcgcttgccaacaagatggcccgcgtcgcctgggcattgttggccagcggagccaagtatcgcgcaccccggctcgcggcagcgacgtaagcgtaagaagggcttggcaacgggaggatgagattgcgtcggtgcgttcacgaactgcaagggtgatgatgacgttgatgcgaaacggttcgagaccgtcgatcggaaaacccgcgaagtgccacgcgaggaaagaacgcgtgcttttggttgggaccgatcagcggatcacatcagggccagcggccagaacggccgcactcaaaggccggatacatggctgcacccgaacgcttcgcaaaatgtcagattcgcctcttgcaccgcgggcgccgtccataca

SEQ ID NO: 1489 - DNA, 1590 bp, unidentified
  source 1..1590: mol_type = unassigned DNA; note = element_1ea3463
  misc_feature 1..4: note = core
  misc_feature 5..259: note = LE
  misc_feature 260..1438: note = CDS
  misc_feature 1439..1590: note = RE
  misc_feature 22..238: note = bridgeRNA
ctcctatctttaagtcgttgcatttttaggcctcttatcgaatgcttatggatgcaatgcagattctggcgggcagggttgccgacatgtcgcgtgagagccttgcttctcgtaaaggagtctggcaacctgccccattcgggcgaggccgcggataagctggatgaggtcggccccaagccggtcctcggatctcttctaggaggttgcggtcccgaatgcggtagcaggagcccgtcgcgagcgtgaggagcagcccatgatctacgcaggtgtggacatcgccaagatggaccacgtgatcggcgccgtcgacgagacgggggccgaggtcgccaggcccatgcccttcaagaacagcgaggccggcttcgagaggtgcgtcgcgtggctggagtccgtcgccgagagcgaggacggcgtcttcgtcggcatggaggccacggggcactactggatggcctgcttcgcctacctgacggcggccggctacagggtgtgcgtcgtgaaccccatgcaggtgcgcgccatgcgcagcctcaagggcatgcccggcgtgaagaacgaccgcgtcgacgcgtggctcatcgccgagaccctgcgccagggcgactacgacgagacccggctcgccaccgacgaggtgcaggcgctcaagcagctcacgcgctaccaccaggggctcaagcaggagctcgccaccgtgaagacgcaggccatctgcgtgctcgacgcctacttccccgagtacgcggggctgttctccgacatgttcggctcggcctcgctcaaggtgctcgcggagtgccccacgccgtcggaggtcgagcgcaggcgcgccgccacgattgccaagctgctctccgaggggtcccgcggcaggttcggcgaggccaaggcggcccaggtcaaagcggccgccaagtcgtcggtcggcatcaggctcggcgaggacgccgcttcgttccagctcaagaccatggtctcccaaatcgagttcctgaatcggaccatcgccaaggtcgagcgcgaggtcgccgccctgctcgaggagatcgagcccaacatcaccaccatccccggcgtgtcgacgaccaccggagcccagatcgtcgccgagatcggcgacgtgcgccggttcgggagcgcggcgtcgatcgtaaagtacgcggggctcaactccggcgtcgacgagtcgggcaagttctcagcccaaggagtcccgataaccaagcacggctcgccctacctgcgaagatcgctctggctcgccgccaaccgcgccaggcagcacgacgacaggctgcgcgagttctacgagaagaagcggcgcgagggcaagccccacagggtcgccgtcaccgcggtggcgaggaagctctgccacatcgtctacgcggtcatgcgggacggcgagccctacgacccggcaaaataggctaggctgacgctacgtgccaccgacacccccggcggggtccgcttcattgcgcccaaaagcattcgatattcggctctcaaagtgcatgtttgaacaaaaacgagaacttcgatttcttacggttttgcccttgacttcatatagctggt

SEQ ID NO: 1490 - DNA, 1437 bp, unidentified
  source 1..1437: mol_type = unassigned DNA; note = element_1ea3669
  misc_feature 1..2: note = core
  misc_feature 3..81: note = LE
  misc_feature 82..1158: note = CDS
  misc_feature 1159..1437: note = RE
  misc_feature 1169..1423: note = bridgeRNA
tgatggggtggacggcgccccgaacggcatcgaatgtgccaagatggtcgttgtcaaaaccccatctgaggagcgccgtccatgacgaattctagcgagaaaatggcgagtgtcacgcggattggcctcgatctggcgaagaacgtttttcaggttcacggcatcgacgcggctgggaatgtcgtcgtggcgcgtaaactgcggcgcggcgcggtgctggggtttttcgttcagctgccgagctgcttggtggcgatggaagcttgcggaagcgcgcactactggggacgggagatcgctgcgcttgggcatgaagtgcggctcattccgccggcgcatgtgaaaccctatgtgcggcgcaacaaaacagatgcggccgacgcggcggcgatatgtgaggcggcggtgcggccaggacaacggttcgtgcccgtgcgctcggccgccaatcaagcggctctgatgcgccatcgagtgcgggaacaattggtcggacagcgcacggcgctcttgaacgcgctgcgaggacatttgagcgaggtcggagtcatcgcgccacagggggcgcaatacgcctatgacttgaagcaagtcgccgcgaccggagccgacgggaatggcgagatcgtcgtatgcgacgaggttcgtgcggcgttggcgccgctcaccggtcaaatcgacgcgctcgacaaagagatcaccgccatcgacgccgagctcgagaaggtcgccaaaaccgacgatcgtgcgaggcggctgatgacgatacccggcgtcggaccgatcaccgccaccgcgctcgccgcgacggtggtcgaattcggagcgttcgccagcgggcgggagttcgccggcttcctcggcctgacgccgcgccagtattcgagcggcggcaaagagcggtcggggcggatcagcaagatgggcgaccgttatttgcgcaaactcctcgtcgtcggagcgacatccgtgctctaccgcgccggaacccacaaagatgcgttgcgacgttgggccacgggtctgctcgaacgcaagggcgggtttaagtacggattcaagctgacggcggtggcgctggccaacaagctggcgcgcatcgccttcgccatcctgcgctcggacggcgtctacgacgaccggcctgtcgcggcctgacggccgcaaagggcttggcggaaagaggtttcgccgcaaggcgagtacgcatcgagggtgactgacggggtgatgtgagtgaacggacaggttctggaagtccaaagggctgtaggcgccggatacgagcgcgttgaactgatggggctaagaaccgagcggaccaatcatcagggccagcagggtggctttcctgcaccaacaggccggagacatgaccgcacccgagatgtcatatcgcttccagaaatcccttgattaaggggcgccgtccagaca

SEQ ID NO: 1491 - DNA, 1339 bp, unidentified
  source 1..1339: mol_type = unassigned DNA; note = element_1eab27e
  misc_feature 1..2: note = core
  misc_feature 3..79: note = LE
  misc_feature 80..1096: note = CDS
  misc_feature 1097..1339: note = RE
  misc_feature 1075..1327: note = bridgeRNA
tgttggggtggaacggcccacggcatcggatgtgccaagatgaggtcgctcaaatgaccatcatgaaagggccgctccgatggaatttaaacggatatcgatcgatacgtcgaagcatattttcacgatacacggcgttgacgggcaagatcgtgtcattctgaggcgggatctgcggcgagggcagatggaagccttctttgccaaggtgcccgcgacagagattgctctggaagcctgcgcgggaagccatcattggggccgaaaatttggcgccttgggtcaccgggtcaagttgatccctccccagtatgtgaagcccttcgtaaagcgcggcaagaacgatcgcaacgacgcggaagcgatcagcgaggctgccgctcggccggacatgcgcactgtgccggtgaagacggtcgacgagcaggccgcgacgattatcgtgaagcaccgcgagatgcttgtcgggcaacgaacgcaggcgatcaacgccttacgtggccatgccggtgaattcggtatcgtcgcggccaagggctgcggcaatgttgcggcgctggtctgcgttctgacaaatgaggctgccatcccggaaggtgctcggacgatgttcgctcagatggggcgacacattgctgaactcgatctgaagatcgaggcgatcgaccggcagttgctggaacagcataaggccaacccagtcagccagcgtctcgctgcgatccccggcgttggaccaattaccgcgattaccatggcgatctcgataaacccggcgaatttcgagagtggccgccacttcgctgcgtggctgggactgacgccacgagaacattcgacaggtggaaagcatcggattggcaggatcagcaaggcaggcaatgaacggctgcgccagttgctggtcgtcggtgcgatgtcggtcgttcgatacgcgaagcctggcagcaaatcggcgagcacatggctgctgcaattgctggagcggcggccgcgcaagatcgcggcaatcgctctggccaacaagatcgcccggatcatctgggcgatgatggcgcgtggcgaggcataccggcggcagccggcatcagcctgaccgcggccggtgccggggaggcaggagcgacagaagatgatggtgatcggtcgaaccgacgaatggcgataatccagcctgggtcaacggcacgtcgatgccgcagatttgtttggatgtcattcgcggatcccatctgggctggcggtcatgaggccgcaccgataagccggacacatgaccgcattcgtgccgccgccacatcttcgaagctcgctcttgaatcccgggccgttccacaca

SEQ ID NO: 1492 - DNA, 1487 bp, unidentified
  source 1..1487: mol_type = unassigned DNA; note = element_1eaf80d
  misc_feature 1..2: note = core
  misc_feature 3..231: note = LE
  misc_feature 232..1440: note = CDS
  misc_feature 1441..1487: note = RE
  misc_feature 14..199: note = bridgeRNA
tccataccttccttgatgtgggtctgaactgatcattcgtaggatcggtggacccagggatcccgggtgtggctgtcaggcatatgccgctgaggtggctcaaggggattggccgcccaggatcccgcgacgacccggccactcattgggatacgcgaactgaatcgctcgtatggacacgtcggcgaggtcgtctgcagggactggaacggaacgacttcggaggtggctgtgcccgaactctgggccggtacggatgctggcaagggcgaacatcactgcacggtgatcgacgcggacgcgacggtggtgctctcgcgacgggtgcccaacagcgagaccgagctgctggaactgatcgcggatgttctcgatatcagcggggaggtcacctgggcgatcgatctgaacgccggtggtgccgcgctgctgatcgctctgctcgtcaatcatgggcagaggctggtctacatccctggccgcacggtccaccacgcctccggctcctaccggggcagtggcaagacggacgcgaaggatgccttcgtcatcgccgatacggcccgcatgcgtcgtgaccttcagcccctggtggcaggcgacgaagtggccgtggatctgaagaccctcactgcccgccgctatgacctggccgcagaccggactcgggcggtcaaccggttgcgggcccagatagtggagtactttcccgccctggagcgggccttcgactacagcaagtccaaggccgcgctgatcctgctgaccaagtaccagactccggccgccctgcgtcgcgtcggcaagagtcggctcgccgcctggttgaagaaccacggcgtccgcaccatcaacgtcgccaccagcaccgcggacgcggcgatcgctgcggctgaggcccagatcaccgcaatccctggcgagacgatggcggccgcgatggcggctcgcctcgcgcaggaggtgatagccctcgaagaggagatagcggagaccgatgccctgatcgagggccggtttcgcgaacaccgccatgccgaatcgatcctgagcatgcccggcattggaaccctgctcggtgcggagttcgttgccctgaccggcggtgacatgaacgtcttcggcagcgtggaccggctggctggcgtcgccggcctggctcccgtgcccagggactccggcaaggtcagcggcaacatgcgccgaccacgccgctacagtcggcgactcttgcgcgtgtgctacctcgcggcccaggtcgcggccgtccactgcccggtctccaagacgttctacgagcgcaagagaggcgaggggaagacccataagcaggccgtcctcgcccttgcccggcgccgcctgaacgtgctgtgggccctcatccgcgacaaccgaatcttcaacgccaccccacccgcaggtgcctccgccccggcgtgatcgactcacagcgcgtcaccgaaccggcttgacaacgtcattgggaa

SEQ ID NO: 1493 - DNA, 1164 bp, unidentified
  source 1..1164: mol_type = unassigned DNA; note = element_1eb1ba9
  misc_feature 1..3: note = core
  misc_feature 4..220: note = LE
  misc_feature 221..1153: note = CDS
  misc_feature 1154..1164: note = RE
  misc_feature 14..223: note = bridgeRNA
acttgtcttaagatttcccccggttcccgtgcgatacgggagccgctgtccggcacctcaaatatgccggacagcggcgggggacggatcgttgtggagatggtcggagagggccggtcagtagtgtgatcgcccccgccttttcgaatgtcctgaacggatacatggggaagacctcgcgtccttgccccgaatgacaaggccaggaggcgaaaagaccatgaccgacactatcgggatcgacatctcgaagaccacactcgacatctaccgtatctcggacggcaaacgagcccgcttcggcaacgacgcgtccggcttgaaggccatgcgcaagtggctcggggcggcaccgctccgcgtcgtctacgaggcgaccgggcgctatcaccgcgatctggaggccgcgcttgcggctttcggccatcacaacgtcaaggtgaaccccgcacgggcgcgacgcttcgcgcaggctaccggacagggagcgaagaccgaccgcgtcgatgcggagatgcttgcacggatgggtaccgtgctcggcctcgaggcgaccccggtcaaaactgacgaactgcacgaaatcaaggagctgcatgtcgctcgggttgctctgatcaaggatcggacggcctgccgaaaccggatcggcatggcgcgcaacaagatcgtcctggcgcagctgcgcgcgcgccttcgccagatcgacacccagatcgcgcagatcgacagggaactgcgctcccggatcaaagccgatcccgggctcgccaggcgctacgagatcctgacgtcgatccccggcgtcgggcccgtcgccgccatcgccctgatcatcgagatgccggagctcggggcgatgagttcgaaggaagctgcgagcctcgcaggcctcgcacctatcacgcggcagtcgggaacgtggaagggcaaggcccgtatcggcggaggccgcactgctctccgttgcatgctgttcatgcccgctgtgatcgcgacccgcttcaacgccccgctccagcaagtccaccggacgctcatcgctgccggaaagccctggaaagtcgccatcacggcggtgatgcgaaagctcatcgtcctcgccaacgccctgatccgggacgaccggaaatgggccgaaatcaacccttgatcaaaacggat

SEQ ID NO: 1494 - DNA, 1448 bp, unidentified
  source 1..1448: mol_type = unassigned DNA; note = element_1ebdc39
  misc_feature 1..2: note = core
  misc_feature 3..227: note = LE
  misc_feature 228..1433: note = CDS
  misc_feature 1434..1448: note = RE
  misc_feature 11..194: note = bridgeRNA
gccctaccttcatgacgtgccgccggtcgtccggaatgatcggtgggcgcgggcgggatcggcatggctttcatcacgctgctccccgatggctcaggtggctccgccaccggtcccgccaccttgttctgaccgctgattaggcgctgcggaccatcgctatgtagggcgttgacggcggaatgaggttgccgcgccaagccgttcgctgaaggaccggaggagccgtgacgctggtggcgggcatcgacatcgccaaggaattccattgggccgcaatcgttgtggctgaaaccgggcgggagcttgtatcgcggcgagtggacaatgcgcccgacgccatcggcgagttcattgccgagctcgcccaggccgccgccgagcacggtccggcgacagtgggcatcgacgtgctgggcggaatcgcgggcctggtcaccgcgatgctgctggacaccgaacaccgcttggtgcacgtgcccggcctgaccgtgaaccgctcccgccacggcacccgcggcggcgagcacaaatccgacccccgcgacgcccgggtcatcgccgaccagctgcggctgcgcgaggactggcggccggtcaccggcgacgacgagctgaccctcgacctgcgcctgctggtctcgcgccgcagcgacctggtgaccgagcaaacccgccgcatcaaccggacacgcgacatgctgaccggcatcttccccggcctggagcgagctctggacctgaccaacctcggggacctgcgcctgctgacgcgctacaccacaccggccgagatccgccgggccggacgagcccggatcaccgcctacctgcaccgcaacggggtccgcagcgaccgcgccgaccgacttgccgctgccgcgctcgaggccgccggacaccaacgcgtgcgggtgcccggcgaaacgcgcaccgcgcagttcgtgcgcgagctggccaacgatgcgctcaccacgcgcgctcgtctgtccgccgtggattccgagatcgccgaggttcttgaccagcaccctgacgcggccctcgtccggagcctgcccggaatgggggccaccctcaccgccgaattcctggccgaagcaggcgacctggcccgattcgccggcgctgacgcgctcgctgccgcctcgggcctggctcctgtgctgcaacagtccgggaagatgcactacctgcgcagagccaccggcggcggcaagaacctcaaacgcgtcttctaccactccgcgttctgcgctatccaagccgacccggccagcaaggcgttctacgcgcgcaaacgagccgaaggcaaacgacaccaacaagccctcatcgcactcgcacgccgccgcgtgacggttctctacgcgatcctgcgcacccgccagccgtaccaggccaaccacaccacagtcacccctgccgcttgacaaaagcattagaca

SEQ ID NO: 1495 - DNA, 1613 bp, unidentified
  source 1..1613: mol_type = unassigned DNA; note = element_1ec558c
  misc_feature 1..4: note = core
  misc_feature 5..391: note = LE
  misc_feature 392..1603: note = CDS
  misc_feature 1604..1613: note = RE
ctcactggactacctttcggctgttagtggacgttggcatggcacagcgcagggttgtccacggcggcggacggtcggcgcctgcgacgaaccgaccggctgccgcggtgggcaacccgtgttcggtgcgccagtgttggccagcgaagttcttgactcggcacacgcgttgcgccgatgtttcgttccgacttccgtgccctcggggcgactgcccagagtgctggccgcttgacggcccccatgagacccgcagccctcgaggtgccggaagacccagacgggctacagggtgtagcgccaaggtgtgcagccaggagcgccgatcagtgagcgacccgccgggccttccgacacggcaagtcataccgcaacttgcaggagtttgtccatgagcatttgttttgccgggctggactgggccagccgaacccacgccgtttgcgtcatcgacgagcgcggcagcgttctcactcagttcgagattaaccacgacgccagcggccttgcggacctgcaccgccgtctgcgcggggctggggtgaccgctgtggccatcgagcggccttcggggctgatcgtcgatgcgctgctggaggccggcttgtcggtcgtacccatacatcccaatgtggtgaaggcctcccgcccgcgttaccgcagccacggcggcaagagcgacgccagcgacgcctacttgctggccgatctgctgcgcaccgacggccatcgcttcaagcccctggccccgcagagtgatgacatccggtcgctgcgcgccctggtgcgcggtcgtgacgacctcgtggccacccgcgttcaactggccaaccaactgcgcagcctgctgcactccttctggcccggcgccaccgaggtcttcgccgatgtggactcgcccatcgggctggccttcattcggcgctaccccacgccagcttctgcccaacgcctgggtcccaagcgtatggccgccttctgcaccaagaacgcctacagcggtcggcgcagccctgaggaactgctcgaccggctgcaccaagcacctgccgcggccctgggcaagctggagatggcggccaagggcgagttggcgctcagtctggcacgcaccctcgatcgcctgggcgatcagatccggctgctgacccgccgaatcgaaaaccacgtcagctccatcgacgacggccgcatcctgatgagctttccgcgcgccggccgcatctgcgctgcccagatcctggccgaactgggaagcgtgcgcgagcgcttcgacagtgacgagcatctggccgctgaagccggcgtcgcgccggtcacctacgcctcgggtaagtccaaggccgtcaccttccgctgggcgtgcaaccaccgactgcgtgcagcactgacctgcttggccgataactcccgtcacgccaatgcatgggccgccagcgtgtacgccaaagccaaggcccggggctgcgatcaccctcacgccattcgcatcctcagccgcgcctggttgcgcgtcatctggcgtgcctggaccgaccgcaaaccctacgacccagccctgcacggcagcgctaaactgcttctccaaactcaagggggttgacacagggtgt

SEQ ID NO: 1496 - DNA, 1167 bp, unidentified
  source 1..1167: mol_type = unassigned DNA; note = element_1ec872b
  misc_feature 1..2: note = core
  misc_feature 3..207: note = LE
  misc_feature 208..1155: note = CDS
  misc_feature 1156..1167: note = RE
  misc_feature 12..213: note = bridgeRNA
cttgtcttatgactttgtctcgttttaggcgacaatggattgccgcctgtggacctgaacacccacaggcggcgggaggggtgggatcgggaaaccgctggtctgaaagaaccgttgcgcaataggatcgcccctttcttttccatgaggcctgaacggatagcggggctttgacggcccgcatgacaagcatgggacacggaaaagatggctgacacgatagcacgaaccctcggtatcgacatctcgaaagatcgcctcgatgtccatctcctgccggatggcatcgacaagcagttcctcaacgacgccaaagggctgcggacattgatccgctggctgtcgccctacgcgcccacccgcattgtcttcgaggcgaccggcgcctaccatcggcgcctcgaacgcatgctggcaacggcgaacctacctggcgtcaaggtgaacccgcagcgcctgcgcgccttcgccaaagcctgtggccggctggccaagacggatcgcatcgacgccagcgtcatggctcggttcggcgcagtgatggccccggacatccggccgatccgcagccaggcgcttgatcttctggccgaattgctgaccgcgcgtcgcgctctcgtcaaggaccgcagcgctctgctgcatcggcagaagcaactgaccatccccctgctgcagcgccaggccgagcagcggctgcggcaggtcgaggctcaaatcgaggccgtcgatgccgagagccgccggttgattgccgccgagccgcaattgcagcaccgcttcgacattctcaccagcattccgggcatcggcgcaacctgcgccatggcgctgattgccgacatgccggaactcggaacgttggccaacaaacaggccgccagtctcgccggtctcgcgcccatcgtgcgacagtccggccaatggaggggcaaaagcttcattcaaggcggaaggacccagcttcggcgcgccctctatatgccggccctcgtcgccatccgcttcaatcccgacctcaagagcaaatatcagcaactcaccgcaaccggaaaagccgctaaggcggcaatcaccgccatcatgcgaaagctaatcgtcctcgcaaacgcactcatccgggaggatcgcttttggacgcctcagcaagcttgactaagacggata

SEQ ID NO: 1497 - DNA, 1610 bp, unidentified
  source 1..1610: mol_type = unassigned DNA; note = element_1eceaab
  misc_feature 1..2: note = core
  misc_feature 3..363: note = LE
  misc_feature 364..1590: note = CDS
  misc_feature 1591..1610: note = RE
  misc_feature 13..239: note = bridgeRNA
ctaatgagatttgggagtaagccatccggcagactcctggtggataggcagccgccggcgggtgagcactcgttgctcctggacgttgagtcctgacgaaagatcgtgcccctgccggtgggttgggagagttgatcgctgatgggatgtcgtgcccgcctggttgcggcgtgagcactgcttcattaggtcgctgatggttctcccgctggcctcgatatttcacgaaggtcgtccaagatgcccactgacctgggctgatgcggggcgatggcttgcaccgttgggtgaagccgctgatggggccgtagtgcgtggagccgtcgcatctccgcaggccaaggtgggtagacgggagatgcggtgctgtttgttggggatgactgggcggaggaccatcacgacgttgagctgatggacgccagtgggcgcacgctggccagggctcgcctgccagagggtgtcgcgggcatcgcgcggctgcacgcgatgatcggcgcgcggcttggcgaggatgtcgaggatgtggccgggctggtccaggtcggcatcgagaccgatcgtggtccgtgggtgcaggcgttggtcgcggccgggtacacggtgttggcggtgaacccgttgcaggcggcccgctaccgcgagcgcctcggggtgtcgggggccaagagcgacgccgccgacgcgcacatgctggccgacatggtccgcaccgacgcccaccagctgcgtccggtcgcgggtgacagtgccgaggcggaggcggtgaaggtggtcacgcggatgcacaagacactgatctgggagcgcacccgtgccagccagcggctgcgccacgcgctgcgggagtacttcccggcggcgttggcggcgttcgaggacctcgacgccgctgacaccctggagctgctggccaaggcccccgacccggcaagtgccgcgcggttgagcatcgcgcagatcagcgcggccctccaacgtgcccgccgccgcgacatcgcggcaaaggccgcgacgatccaggccgtgctgcgcaccgagcatctgggccaacccgccgtggtcaccgcggcctacgccgtgtcggtgcgggcgctggtcgcggtcctgggcaccctcaacgaacaggtcaaggccctgcaagggcaggtcgaggcccattttggccggcacccggacgctgagatcatcctgtcccagccgggcctgggtgcggtcctcggtgcccgggtgctcgcagagttcggcgacgcgcgtgatcgctacgcctcggccaaggcccgcaagaactacgccggcaccagcccgatcacccgcgcttcgggcaagaagaagacggtcgctgcccggttcgtgcacaacgaccggctcgtcgatgccctcatgacgcaggcgttcgcgtcgctgcgaaattccccgggagcaagggcctactacgaccggcagcgcaaccgcggcgcggactacaacgccgcgctgcgccaactcgccaaccggctcgttggcatcctgcacggatgcctcaaaaccggcacgccctacgacgagacgaccgcctggtcgcaccacttcactgaggccgctgcttgacattcaagctcctgggatgt

SEQ ID NO: 1498 - DNA, 1409 bp, unidentified
  source 1..1409: mol_type = unassigned DNA; note = element_1ecf22a
  misc_feature 1..2: note = core
  misc_feature 3..78: note = LE
  misc_feature 79..1095: note = CDS
  misc_feature 1096..1409: note = RE
  misc_feature 1084..1336: note = bridgeRNA
tgttggggtggacggcccccgaacggcatcgactgtgccaagcttgttgttgtgcaaccaagctgaaggaggccgtccatgggcgaggttatcaggattgggctcgatacgtcgaagcatgtgtttcaggtgcacggcgtgaacgcggcggagcaaacggttctgcgcaagcggctgcgtcgaggggatatcgaacgattcttcgccgcgctgccggggacgttgattgggctggaagcatgcggtgctgcgcatcactgggcgcgggtgctagggaaacttgggcacgaggtgcgattgctcccaccacaatacgtgaagccgtacgtgaagcggggcaagaatgatgcggccgatgctgaggcgatctgcgaggcgatgagtcggccctcgatgcgttttgtgccggtgcggacggcagcgaaccaagccgagctgatgctgcacggagcgcgcgatctgctgctcaagcagcgaacgatgctgatgaatgcgatccggggccatgcggcggagtttggcatcacgggagccaagggggttggcaggatcgcaacactactggagcggatcggagctcatgggtccgttcccgatctcgcgcgtgagatcctcgcgcggctggttgaacagcttgttagcctcgagcgacaagtgagcgagctcgagaagaagctgctggcttggcatcgtaccaatgagcgcagccgccggctggtggcgattccaggtgttgggccgatcggcgcgacggctctaaccatgagagtgcccgatccgagcattttcaaatccggccggcactttgccgcttggctcggcctgacgccgaaggatcactcaaccgctgggcgacagcggctcggagtgatcacgcgagcaggcgatgagacgctgcgccgccttttggtgagtggcgcgatggctgtgatcaagtgcgccaagtcgggacgctcctcgccctggctcctcaagttgctcgcgcgcaagcccaaaaaactggccgccgtcgcacttgccaacaagaccgcccgcatcgcctgggccgtgatgacgcggggtgaggtctacagacgcgtgatgccagacgcgtgatgccgacttaacgacgcgcacggagccggacgcttgcaagggaacgaagagatggtgatcggtcgatccgagggtcggataagcccgggcgcatccagggcctgcttaaaggtcgccgccatgtttgggaacccgatccgcggaacccatctgggccagcggtctcatccgaccgcaccaacaggccggacatatgaccgcaagcaaccgatcgcattcccttcacatcttgcaagccgggggccgtccacatatgaccgcaagcaaccgatcgcattcccttcacatcttgcaagccgggggccgtccacata

SEQ ID NO: 1499 - DNA, 1425 bp, unidentified
  source 1..1425: mol_type = unassigned DNA; note = element_1ee7960
  misc_feature 1..2: note = core
  misc_feature 3..79: note = LE
  misc_feature 80..1153: note = CDS
  misc_feature 1154..1425: note = RE
  misc_feature 1158..1412: note = bridgeRNA
gatggggtggacggcgccccgacggcatcaagcgtgccaagatggtcgttgtcgcaaacccatctgagggaagccgtccatgggcaagtctatcaagaatctgtcgtctgtcacggtcgtcgggctcgacatcgccaagaacgtttttcagcttcacggcgtcgacgctgcgggcgctgtggttgtcgcgcgctcggtgcggcgcggccaattgctgaaggtcttcgcctcgctgccgcgctgccgggtgggcatggaagcgtgcagttcggcgcaccattgggcgcgcgcgctgagcggactcgggcacgaggtgaagttgatcccgccggcctatgtgaaaccctacgtgcggcgcaacaagaacgacgcggtcgacgcggcggcgatctgcgaggcggcggcgcggccgagcatgcgcttcgtggcggttcgcagcctcgacaaccaggccgggctgatgcgccatcgcgcgcgcgagcttttggcgggcaaccgcacgcggatgctcaacgcgctgcgcggcaacctggcggagatcggcgtcgtggcggcgcaaggggtccagcacgcctatgcgctcgagcgcctcctcgccgacggcagcgacgacgacggcgaagtcgtcgtccccgattgcgtgcgccgagccctggcgccgctggttcgtcagatcgacgccgtcgacgcggagatcgcggcgatcgacaaagagatcgcggcgctggtcaaggccgacgagacggcgcggcggctgacgaccatccccggcgtcgggccgatcacggcctcggcgatcgtcgccaccgtgcgggacgtcggcgctttttccagtgggcgggagttcgccgccttcctcggcctgacgccgcgccagagctcgagcggcggcaaggcgcggctcgggcggatcaccaagatgggcgaccgctacttgcgcaagctgctggtcgtgggggcctgcgccacgctcagccatcgcaaggggcacaccgacgcctcgcgggtttgggcctcttcgctcatcgagcgcaaggcggtcagatacaagttcaagctgacggcggtggcgctggccaacaaggtggcgcgcatcgtcttcgccatgctgacgcgcggcggcgaatacgacgagcggacgatcgccgcttgaagagggctatcgacaagggggcttggccgcaaggcgatacgcaatcgagggtgaccacggggtgatgtgaaccaacggataggctcggaagcctgttgtactgtctgcgccaaatcgagcgcgatacggtgatcgaggcaaagagccaagcggacgaatcatcagggccagcgggtctcgaccccccgcgcaaacaggccgaagacatgaccgcacccgagacgttcgcaaagcctcaaacaagcccttgacaaggggcgccgtccagacag

SEQ ID NO: 1500 - DNA, 1726 bp, unidentified
  source 1..1726: mol_type = unassigned DNA; note = element_1ef014a
  misc_feature 1..2: note = core
  misc_feature 3..324: note = LE
  misc_feature 325..1572: note = CDS
  misc_feature 1573..1726: note = RE
ctcatatactaattggtagcgagcagaggacttgtcgagagaccaggaatctgcgagactgggaacagaagcgggagagccggagtagcgactcgtagcccgtctcacatgcgagatggtgacttccatcaaaagacggctccccgcctacccgtgtgacaaacgtcgattgggcttgttgcagcggctggttctccaatgagaccttgctgactgccgatccagtatgagttcacgcttgctcggtgtgggagggtgtcccgctgaaagcgcaggaaaaggaagagatcaaggaagggttagtgagaagaaagaagggacgtgatggcagaagcttcaaccacagaagtcttggacccgtcagcgtttacgtatgtcgtcggcattgatatcgggagtgaaacctgctgttttaccgttctgaccccccagaaacaggtggtggtgaaaccgactgacctggccaatgccgcctcgggttttgcctacctgcaggagcggatcgcgcgtctgggcgtagccccggagcaggtcgtggtgggcctggaggcgacctcgcgctatggggagaatctctttcagtttctccagcgacaggggtatcacctgtgtttgttgcatcccagacaaacccatgaattcgccaagcagcggggattgcgggcgaaaaccgatcgtctggacgcgagtaccattgcacgggtcctgctcagcggggaagcgcgcgtggggtatgtgcccgatgagcagatcgccagctatcgcgagttggtgcgcttgcacacccaactcagcgatgaactggcgcgggacaagaatgagatccaggggctgctggtcgtgctgtttcccgagttcacccaggtgtttgccgatccctgtcggctgacggcgacggcagtgctccaggcgtatcccagtgccaaagccatccgctcagcaggagtggatgccattgcagccattttgcgagccacggctccccgcaactacgggcgagacaccgcccagcggctggtggatctcgctgagcgctcgatcagtagtgatctcgcggtcgaggcacgttcgctcagcttacagatctggtgcgaccaattgcaccacaccgctgcccatctggcacaaatcgaagagcagatcgcgcaactgctctcccatgaccgatcagctaaagggttacaaggggtgcctgaatttggcagcaagaccgtggcggtcctgcgcgcggaactgggcgaggtggttcgtttccaccgtctcgatcaggtggtggcctatgtgggcatggatatcgagatcaagcagagcggcaaatggcagggcaaggccaaactctccaaacgcggcagtgggctggttcggcggatgctctacatggccgccatgcgctgcatctggcttcccggttcggcctttgggatctactaccatcgtcttctagcccgaggcgtggagaaaatgaccgctttgatggccgtgatgcgcaagatgctggtgatcgctgcctacttactccgaactggggaggactatgatcccaccagggtcgccacagggccagcgggctaaccgctgcggttagcccgctggccccacccctcccagacaggcagtgctttcgcgcttcaggcttgccctcaagcgcaagggagggagttgttttgacctttccctgcagcttttcttttggctcacagggggggcttgacaatttatatggctt

SEQ ID NO: 1501 - DNA, 1433 bp, unidentified
  source 1..1433: mol_type = unassigned DNA; note = element_1ef5e1a
  misc_feature 1: note = core
  misc_feature 2..247: note = LE
  misc_feature 248..1306: note = CDS
  misc_feature 1307..1433: note = RE
  misc_feature 6..223: note = bridgeRNA
tcgtattatgagatcaaccagttctttctggttgatcctttttcatttgcatagaggattaaggtagcctggtcgaacgtaactgcccgtgggacttgatctcgagagctataatgttcacccctacttgtctgactatgattgaggctggttgggacatatgatcccgtataacaagcgatgctatggagcgacaagaaaaacctaagggggtgccggtaaatctaaacttacagggagagatgaaatgaatccagttatcggtctagatatttctaaagaagaaagccatggaaaagcctttttagagcgcggaaagccattcaaagggacattccacttcgagcacactcgtgatggcttagctaatctccatcaagctttaaaggacgttgaatctgtatccaaacaacgtccttcacttattctagaagcaaccggacattaccaaagccccgttgttcagtttctagaggaacatcactatatttacattatcattaatccgctcatctcaaatcggcttaggaagtctcaacttcgtaaagttaagacggatgctgctgacgcttaccttctgagtgagttgtactacaaggaagagtttgaaccatttaggaaaagggctgtacaactcctcaatctacgctatttaacaaggcagtatgaatctctttcaaagatgtgcgtacagactaaactacaattccaagctgttttagatcaggttttccctgcttacaaaggtgtctttggagctatgtattcaggcatttcactacggtttttaagtgaattcccaacctcacattcggttttgcagacagacgaagatacaatcaaagctaaaatcaaagctaaaatgaaagaactgctattctcgaaacgaggacgttcagaggactggattaaccaacgcgttcaagaattaattcagtcgattcccggtattggacataaaattgcggcaacaattttatctgaagttggagaagtcgtccgatttgatcatcctaaaaagctagtcgcctttgcaggcattgacccgagtgtctttgcttctggtaagtttacagcgactcgaaaccgaatcacgaaacgtggtttcagacagctacgttacgcgctggtgatggctgttcagtggggacttattcgttctcgcaacactcggctcaaagaattttacgaacgtaaaagaactgagggtaagccacataaagtggcattcgtcgcatgtgcaaataagctagttcattggctccatgccatcctaaaaagcaaaaaagtatttcgtctagcttaattactctaattggttgaaccttccaaaacactgtttgatttggagggttatttggcttgcctattttaactataacacatgatttagcttcactttactggtaatcttgacaagctattagctggta

SEQ ID NO: 1502 - DNA, 1351 bp, unidentified
  source 1..1351: mol_type = unassigned DNA; note = element_1ef8417
  misc_feature 1: note = core
  misc_feature 2..74: note = LE
  misc_feature 75..1100: note = CDS
  misc_feature 1101..1351: note = RE
  misc_feature 1121..1347: note = bridgeRNA
taatgagatggtcaccctccaccctacaagttactaaacttgcagggtgttgttctttctggacggaggccatcatgcaagacgttacgctcatcggtatcgacctcggcaagcacagctttcatgtgcacggccaggatcgccaaggcaaagccctgctgcgcaagaagttcagccgcaagcagttggtcgaattcctcgccacatttcatgcttgcacagtcgtgatggaagcctgtgccggtgcccatcatatggcgcggctgctggctcattacggccaccatgtgaagctgatctccccgcaattcgtccgtcctttcgtcaagagtaacaagaacgacttcatcgatgccgaagccatctgcgaggcggcatgccgtccgtcgatgcgtttcgtaacgccgaaaaccgaatcccaacaatgtctgtcggcgctgcaccgcgtgcgcgaaacgctggtgcgcgagcgtgtcaaggcgagcaaccagatccatggcttcttgctggaattcgggatcagccttccggttggccacgcagtgattcgacgtctgccttccgtgctggcagagcaagctctgccagcacggctggtggccctgctcgagcggttgcacagccatttcaaatatctcgacgagcagatcgccgatatcgagaaggaactgggccggcaattgcacgacgatgaccccgggcagcgcttgatgtcgataccgggcgtggggccgatcacggccagcatgctcgctgccgaggtgggcgatggcaagcagtaccgatgcgggcgcgactttgccgcatcgatcgggctggtaccgcggcagtacagcacaggtggaaaaaataacctgctcggcatcagcaaacgtggcgacaagaatattcggcgcctgctcgtgcaatgcgcccgagcgtacatgcagcgcctggagcgacagaccgatcgcatggcgcaatgggtgcgctcgatgctgatgcggcgccactccaacgtcgtagcctgcgccctggccaacaaactggcacgcacggcttgggcgattgctgcgcaccacacggaatttaaacgacaagaggccgtcatggtggcatgacggcctcttgagcttgcttcttacacctgcctggttttgcgactgctgaaattggatgacgtgaacggcacaccagcctgacggataacctggaataaaaatcggctgttgcaagccgagcggcttttaaggaccgtcaggcgcgactctcatcgtggcgcggagcaagtctccaaccagacgccggatagatttgagcaagccacaccatcatacaaaattggggttgcaaaaaggagggtgaccataga

SEQ ID NO: 1503 - DNA, 1539 bp, unidentified
  source 1..1539: mol_type = unassigned DNA; note = element_1eff8c3
  misc_feature 1..2: note = core
  misc_feature 3..247: note = LE
  misc_feature 248..1423: note = CDS
  misc_feature 1424..1539: note = RE
  misc_feature 3..224: note = bridgeRNA
ctcgtataataaatgtagtagtttttagagttcctctccaagaactatgttataattgtttagatgctgtggattggtttatttttcctaccactcgatggtttcagaaaggctccaaccacagtctctttgcagtttgttaatcagttagataccgcccgacggtttatgtggaacgaggttacaagagcaacgagtccctgtgggtctaaacagcgtcatattacttttttcaggaggtatccttatgatttttattggtattgatgtagctaaggacaagcacgattgttttgttatcagttctgacggtgaggtgttatttgatgtgttcactatctctaacactctttacggcttcaatgacctacttgcaaaaatcaagtcagtttcgtctgatttgagtaaagtaaaagtaggacttgaagccacaggacattacagttacaatctgctcggatttttacttgacaatggtcttcccacctatgtcttaaatcctctgcacaccaatatctaccgcaaaagtctgtccctgagaaaaactaaaacagacaaggtagatgctcgcacaattacttctatgttaatgtcttgcgtagacctcaagccctacacaagagcattataccacaatgaagaactaaagtcactaaccagatacagatttgataaagtttcagagcgagccaaactgaaatcttctgtatcaagacttgttacaattctttttccggaacttgaaaagttagttccgacattacatatggtttccgtatacgcactcctttcagagttcccatcagctaaacatatcgctaatgcaagccttacaagactaactaatctgttatacactgtttctaaaggacattacgacaaagatactgctattcgctttcgtgaagctgcaagaaactctatcggctctgttatgcctgctaaatctcttgaattaaagcatacaatcaagttaataggtgaacttgattatgaaatctccgagatagaagcagagattgaactgattgtagacagtttgggaactaccatattaaccattcccggtattggttatgcaacagccgcttcaatccttgcagaagttggtgatttttcaaattttgaaacacctgataaaatacttgcttttgcaggaatgtcaccgtctacatatcaatcgggacaacttacaaactgttatgcacatatggaaaagcgtggttctaaatacttgcgattcgctctctacaatgctacaaaatatgtttgtaagtgggatagtaactttgccgcctatcttgctaataagcgttctgagggcaagcattacaatgttgccatatctcacgccgcaaagaagttagtaagattgatttttgctttagaaaaatctcgattaccttatgtgcctgctgtataactaatttaccaatattttttcaaggcttcctttggaagtctatttgccatgcctatttttatcagataaattttttcaacttttttcattttacctattgacttttaatagttagt

SEQ ID NO: 1504 - DNA, 1452 bp, unidentified
  source 1..1452: mol_type = unassigned DNA; note = element_1f036ab
  misc_feature 1..2: note = core
  misc_feature 3..219: note = LE
  misc_feature 220..1437: note = CDS
  misc_feature 1438..1452: note = RE
  misc_feature 12..201: note = bridgeRNA
tccttacctttcttgcagggtggttgttgccctcggccgtaggcttcgaactgcccagggacgtcgggtatggctttcatgcgtttgcggtgtttcatggccgaaggagattggccgcccgacgtcccgcgacgactcgaccgctaattgagagatgcgatttgatcgctgtgtaaggacacgccggcgtggtcgtctgctgggttgatagggatgccaatgatcacggaggtggctgtgagccaacaggtctgggccggtgtcgatgccgggaagtccgaccaccattgcgtggctatcgatgcggagggtcagcgactgctgtcgcaacgggtagccaacgacgaaaccgcactgctggagctgatcgacgcagtagcggcgcaatccgacggcggtgaagttacctgggcgatcgacctgaacgccggtggtgccgcgctgctgatcaccttgctcatcgccgccgagcagcggctgctctacatccccggccgcaccatctaccacgcctcggccggctaccgtggcgacggcaaaagcgacgccaaggacgccgccgtcatcgccgaccaagctcggatgcgccgcgacctgcagccgctgcgacccggtgatgacatcgcggtcgagctgcgcatcctgaccgctcggcgcaccgacctggtcgccgatcgcacccgggtgatcaaccggctgcgtgcccagctgcttgagtacttccccgccctggaacgcggcttcgattacagcgccagcaaggccgcgctgatcctgttgaccggctaccaaacccccgacgggctgcgccgcgccggcgctgcccgcctgacagcttggctgcataaacgcaaggcccgcaacgcctctgctgtcgcggccacggctatcgaggccgccagcgcccaacacaccaccgtgcccggccaaaacctcgccgccgccatggtcgcccgcctggctaaggaggtgatgaccctcgacaccgaaatcgcagaaaccgacacgatgatcgaggaccgatttcgccgccaccgccacgccgagatcctcctgagcatgcccggcttcggcgtcatactcggcgccgagttcctcgccgccaccggcggcgacatgagcgctttcgactccgtcgatcgtcttgccggcgtgtccgggctggccccggtaccgcgggattccgggcgcatcagcggcaatctcaaacgcccccgccgctacgaccgacgactgctgcgagcctgttacctgtccgcccaaatcgccatccgtaccgaccccgcatcccggacctactacaaccgcaaaagagccgaaggcaaaacccacacccaatccatcctcgccctggcccgccggcgcctcaacgtcctgtgggccatgctgcgcgaccacgctgtctaccaacccgcaaccactactgcggcggcttgacaacgtcattgagat

SEQ ID NO: 1505 - DNA, 1452 bp, unidentified
  source 1..1452: mol_type = unassigned DNA; note = element_1f0637c
  misc_feature 1: note = core
  misc_feature 2..173: note = LE
  misc_feature 174..1436: note = CDS
  misc_feature 1437..1452: note = RE
  misc_feature 54..199: note = bridgeRNA
cgttaccttcttcgggtcgctgagagacagtctcagcgacctcggctcgagccctccggcatgacttacgtctcctgtcgttgatgatggattttgtggtgtcaccggagggttcgggtgatgggtgaccgctgataggggcaagaccgcgttctcttcgaggtcgccgtaacgtggatgccgggactcatcaccgtgtcgagccgagcaagtttgacaggaaggtgagtcaattggacgaaggtgtagacggaccgattgaggtgttcgtcggggtcgacgtcggcaagtcggcgcaccatgcggttgcgctcgacgtcggcggccgggtgctgctcgatcggtcgctgccccaggacgagagccggctcgttcagttaatcgaggagctccagacgcgtgggcgggtgctgttcgtcgtcgaccagcccgccaccatcggggcgttgccgctggctgtcgcccgatcgatgggggtggaagtcggctacctccccgggctggcgatgcgcaggatcgcagacctccatgcgggcgaggccaagaccgacgctcgtgacgcagcgatcatcgcccaggccgcccggacgatgccgcatgcgctgcgggcgctccgccgagacgacgaggtgacagccgagctggcaatgctgtcggggttcgacgaagacctcgccggtcagatcaaccaggtctcgaaccggatccgaggcctgctcacgcagacccatccagcgctcgagcgggtcctgggtccgcgactcgaccatccagcggtcctcgatctcctcgagcgctacccatcacctcagctgctcgcatcggccgggcgggcccgacttgagtctcggttgcggaagctcgcccctcggatcggagaccggatcgccgctgaggtctgggccgctctcgccgagcagaccgtcgtcgtcagcggcaccaccgcggcagcgaaggtgatgccgcgactggcggagcagctcatcgtgctccggcgccaacgcagcgagatcgctgaacaggtcgagcaagtggtcgactcgcaccctctttccgaggtcctgacgtcgatgcccgggaccggcgtcaggaccgcagcacggatcctggtggaggtctccggacgcgacttcgcaacggccgctcacctcgctgcctacgccgggctcgcgcccgtcacccgacgctccggcacctcgatccgaggtgagcgacgcccaacacgagggaaccgtcggctcaagcgggcgctctacctctctgcattcgcctcgttgaaggacccgacgtcccgctcctactacgaccggaagcgagccgagaacaagagccaccagcacgcgctcatggcactcgcccgccgccgatgcgacgtcctctacgccatgatgcgcgacggcacgctctacgaccaggatcacgtcgctgcggcttgacaaccgcataggggca

SEQ ID NO: 1506 - DNA, 1434 bp, unidentified
  source 1..1434: mol_type = unassigned DNA; note = element_1f149ad
  misc_feature 1: note = core
  misc_feature 2..71: note = LE
  misc_feature 72..1124: note = CDS
  misc_feature 1125..1434: note = RE
  misc_feature 1211..1428: note = bridgeRNA
taatgggatggtccgccgccctttaccaagccagcagtttgggtataagaggtgaacggaggaggcatcccatggagctacacacgatcggcattgatctcggcaaaacagtttttcatctagtagggcttaaccagcgcggcgaggttgtggtgcgcaagaagttttcacgcaaacaactgctgcacttcactgcgaacctgtgggtcgaattaattggcatggaagcctgcggagggtctcactttctagggcgggctctgagagagcaggggcacgaggtgcggctgatgccggcgcagtatgtcaagccgtacgtaaagacgaacaagagcgactacattgatgccgaggcgattgcggaggcagtcgagcggccgaagatgcgcttcgtaccgatcaagagcgatgaccaactggatctgcagtccctgcatcgggtacgggagcgttgggtgacgcgtcgcaccgcagtcatcaaccagattcgtggcttgctgctcgaacgtggaatcactttgcgccaggggcgacgccatatcgatgcggcattgcccggaatcctggaagatgccagcgcccagctctccggcgcattgcggttgctgctggcgcaactgaggctggagctcgatcacttgcaaatgcggatcgacgaagctgatgcagtgatcaacaaaattgctggtgacaacgacgcctgccgacggctggtagcgatccctggcatcggacccgtgacggcgactgcaatcatcgccgcgatcggcaatggagcagctttcaaaaaggggcgagggttttccgcgtggctcggaatcgtcccgggcgaatataccactgggggtaagcaaaagctgctggggattagcaaacgcgggaactcgtacttgcgaagacttttcgtgcaaggggcacgtgccgtcctgcaacagagcgcgaagcaatcttccggtctgagtgcgtggctggcccaactcacaacccgcactcacagtaacgtggccgcggtggccttagcgaataagctggcgcgcatggcctgggctgtgctcgctaagaatgaaccctatcgacccccaatgttggccggcgcagctacagaatgcctggcctgcagatgacgcctggctaaggccaggcttggaaatcgcattcgcgattcccacatctacagaccagcggcgactacggtgttgatgattttctgccaggtctgctggcgaactatgagatgacacaacggtcgaacccggcgctctcgaaacctgtaaacaggaaaagccttccaaggctgcattactaaataggacgagcgcgcagcgcattccatcaaggcccggagccttgtgctccaacaaaggccgaatacatttgcgcagaccatcctgtcaactctcatttttcgcttgcgacaaagcggcggaccataca

SEQ ID NO: 1507 - DNA, 1581 bp, unidentified
  source 1..1581: mol_type = unassigned DNA; note = element_1f1629f
  misc_feature 1: note = core
  misc_feature 2..255: note = LE
  misc_feature 256..1455: note = CDS
  misc_feature 1456..1581: note = RE
  misc_feature 6..229: note = bridgeRNA
tcgtattatgaggtcaatcagaatttatttctgattgaccattttaatggtttaataggggtagccggaggagaacgaacgggcgcgtgggacttgattgatcccgtccagaaaactgttccccctctacttacagaaacatgggtgaggctggttgggacattttcagatgatctcgtataacaagcgaagatatgacactgtaggagagatagaggttaccggtaaatattctgaaagggaagtgatcgacgtatgaatcctgttataggtctggatgtggcaaaggaagaaagccaggtccaagcctatttacgaagaaagaaaccctacaaaaagagcttcaagtttaagcacaacattcaaggattggaaaagttttataccttctatcaggaagttgagcaagcaagtggtaagtatccgaccgtcatcctggagtcaaccggacattatcatgaaccggtggttcagtttctggaacgaaaccaaatggtttattttcttgtcaacccgattgtctcctttggggctaagcaaacgggcatgagaaaggtcaaaacagatgcggtagatgctgctcacttatgcgagttgtactataaggaagatttggtgccttttcggaaaaagagcgttcagattttaaatctgcgccacttaacaaggcaacatgatgcgctcactgattcttatgtagaagtcaagctgaaattccaaacggtgctggatcaactattccctgaatacaaaaaagtatttggatcgatttattcaacagtctcactgcaacagcttctggactttcctacaccggcaaccgtgttagctgcagacattgatgaattagccaagggcattaaagcccattgccatacgcgatcctatacatgggctgtgcaaaaggcagaacaattacaagaagcagctcttcgggatccattccagcaagcgctctatcaaagtcctgtcattagtctaaaaatgtacattaaactgctgcttgaataccaagaacacctatccaccttgaaagaggagatagatgctcaggcaaaagaagtggatgactatgatttgattcgatccattccaggcatcggagacaagattgcagccacaattttgtctgagatcgggggaattgatcgatttcatcatccgaagaagttagttgctttttcagggattgaccccagggtccatgaatcaggaaaattcaaagctacgcaaaaccgcatgaccaaacgcggttccagtaagctgcgtcaagccttgtatactgctgtattatgcggcttgcgtaaatctcgaaatacaaagctcatcgctttctatcaaaacaagcgagacgagggcaaaccccataaagtcgtgatgggagcctgtatgaataaactgattcattggattttttacatgcttaagcgaaaagaagcctttgtagaggcctaaagagtcatgaaaacgaatatttccaacgccttccaaattggagggctatttgtcgttccttattttattgtatcatgttcttaagaacttttttagccttaagggttgacctcttattagctggta

SEQ ID NO: 1508 - DNA, 1303 bp, unidentified
  source 1..1303: mol_type = unassigned DNA; note = element_1f162fc
  misc_feature 1: note = core
  misc_feature 2..260: note = LE
  misc_feature 261..1256: note = CDS
  misc_feature 1257..1303: note = RE
  misc_feature 96..253: note = bridgeRNA
cctttagatttgtattataaatataatctataataatgttgaaaagagggggtccgggggagactcataacttttaaaatgttcataaatttaatgtaaaacaaaaaagaacggggtgaactttcctgccgcaaaggtttgtgacctattgcctgtatcagtccccgttcttctaaccggttgccaagaaccatataggatttcagccagatcttttaaaggtcttagtttaggcaaccatattaaaacattataaaattatgaaaataaaagatgtaatcggtatcgatgccagtaaattgacactggattgttgccttcacaaaagtggggcccaagaggtttttgaaaatactcccgaagctatcgtgtttttggtggattggtctataaaaattagtggcctggccaaaaatgagcttttgttcgtttttgagcacacgggcctttacacccatcaacttgtccgttatctgagcgaacagggctattactttctcttggtccctgggctggagatcaaacggtccctgggcattgccagggggaaggatgatagagcggatgcaaaacgtatcgccctttacggatatcgcatccgggaagaggcaaggccctatcaaatgccaaaggaatctttgataagcctgaaacggttgatgtccatgcgcagaaaactggtttcacagcgcgcagggcatattgccactctaggggaacaaataagagtgctgaacaatgatctggggcccatattgctacaggtacagcgcgatattatcggggtactggatgtgcagataaccaaaatagaaaaagaactcgataggcttatcgagcaggatccagaactgcagattatatatcggttattggtcagtatcaagggcatcggagcggtaacggcccggttcatgatcgttcataccgttggcttcacagcttttaaatcgtggaggaaattcgcctcctattgtggcattgccccttttcccaacagatcggggaccagtataaggggaaggaccaaggtaagccaactggccaataaggaaggcaagacattgctgaatctttgcgccggctccgccattcaatgtaatccagagatgaaggcctattatacccgaagaatagatgcgggaaaaaataaaatgagtaccctgaatataataagaaacaaattattggccagggcatttgcagtagtggtaagagggacaccgtatgtcaacaccatggggtatatatcctgaactatagaaaaaatttatgagaaaaaatttgttttaaccataggata

SEQ ID NO: 1509 - DNA, 1415 bp, unidentified
  source 1..1415: mol_type = unassigned DNA; note = element_1f1840e
  misc_feature 1..2: note = core
  misc_feature 3..87: note = LE
  misc_feature 88..1122: note = CDS
  misc_feature 1123..1415: note = RE
tgacgctatgtgggtcgggcccccgtcccctgctcagcccgacagcctaggcttcgggaccaatcgagctcggggaaggaggccctgatgagtatgtatgtcgggatggacgtgcatcgcaagcgctcccaggtcgccatcgtggacgacctcggcgtcccccagcgcaaccgcaacctccccaacgatccagccaagctggtgtcggtccttggcgggctgccgccaggcaccccggtcgcgttcgaggcggcctatggctgggggtggctggtggagttgctggaggagctggagctggaaccgcatctggtccatcccagccgctgcaaggccatcgccgccgctcggctcaagaacgacaaggtcgatgcggccaccctggcccagctgttgcgcgctgatctgctgccggaggcctggatcgcgccaccgcagatccgcgatctgcgggcgttgctgcggcaccgggccagcctggtgcggttgtcgacctcctgcaagaaccgggtgcatgctgtgctcgccgaccgtgggatcggtgaggaccggatcctttggaccggtcccgggcgggcctggctggccagcctcgagctgccggcgattccacgggcgatcatcgaggactgctgcgggctgctggacgccctcgctcccccgatagcccggctggaacaggagatcgccgggctggctaagcccgacccgcgggtccaggcgctcatggcgctgcctggcgtgggtcggctgacggccatgacgctggtcgccgagatcggcgacatcgaccggttcccgactgcccgcaagctgtgcgcctgggccgggttgaccccggcggtgcgcaactccgaccgtaaggtccgccacggccacatcaccaagcagggttcggtgtgggtgcgctggatcctgcaggaagccgcccagacggccaagaagagtcccatgttcgccggcgcctacgcccagctggtccgccgccggggcaagcagatcgcaaccgtggcgatcgcccgacggctgctggcccgcggcttccacatcctcaaggaggtccagaccgccaccaccaccactggagaaggccagaccgggtgcgctcggaacaccgcatgagcctgcaacacggccgttgacctgactgagcagcccggcccggatgccatcgtcatgcggaccccacctcggggcccgaatgggtgcgtgcgagaccaactccgctgagatcatccggccttctcgcccacgaccctgcgccggtccttcgccagcgtcaaggtcgctggtcccagggcgtccacctcgacccggctccaggccagcggacaccaccacaagaagccagccaaatgagccccaccaccggggctggatccacttgcgccccttgacaggcccgaccccatggg

SEQ ID NO: 1510 - DNA, 1404 bp, unidentified
  source 1..1404: mol_type = unassigned DNA; note = element_1f20002
  misc_feature 1..2: note = core
  misc_feature 3..117: note = LE
  misc_feature 118..1155: note = CDS
  misc_feature 1156..1404: note = RE
  misc_feature 1167..1399: note = bridgeRNA
agatgccgtaatgggccggcgcttcaagagtagccatgttgggtggctgtccctcagaatgatggtgttggaacgaggtccgagcgatcggcctcatgcatcatgagaggaacagccatggagcattatgccggtatcgacgtctctgtgaaagagagcagcgtgtgcatcgttgacgcgacgggcaagctggttcgcgaggtgaaggtagccagcgagccggaggttttgctccggtatttcggcacgttggggctgccggtgacccggatcggccttgaggctgggccattgtcccagtggctgcacgcagctcttgtagcggccgggcatgaggtggttctgctggagacgcggcatgtgaaggcggcgctttcggcgatgacggtcaaaaccgaccggaaggacgcgcgcggtatcgcgcagttgctacggatggggtggtatcgcccggtccatgcaaaatcgtcagcggcccaggacacgcgagccctgctggtgggccgcaagcttttgcagagcaagctgctcgatgttgagctcagtatccgcggcatcctgcgaggctatggtctcaaggtcggtgaggtcagccgcggccggttcgaggcgcgcatccaggatctgatcgcgggacacgccgctctctccgttgttatcggcgcaatgctagccgcgcgaacagccctgtggaacgagtttacaaagctgcaccgtgagatgctcaggatcgctcgcgccgacaaaatttgccaacggctgatgtcgacgcctggcgttggcgcccttgtgtcactgacctaccgttcagcggtggacgatccgacacgcttcgcgaaatccagcacggtgggtgcctacttcggcctgacaccgaagaaatatcaatcgggcgagaccgaccgggatggcggcgtcaccaaggtcggcgatgcgatggtgcgaacagcgctgttcgaggcggcgcacatcatgctgacccgggcgacgcgcttttccagactcaagcgctgggcactcgaagtggcgcagcgtcgcggcatgaagcgggcgaaggtagcactcgcgcgtaagctcggcgtcgtgctccatcgcatgtggctcgacgcgaccgacttccgctggagcacagcgccagcgtcagtagtggcatgaaagcgtagatgtgatcggggcgagctgatgtagaacgcctccaatgaggtcccgtcgccgggacgagggctcggcaaggtcgtgtgtagtgctgtgattgcctcggcaaatcccgcttcctagattgaccagccggctctggatctgatggcatggtgtggcggccctcgtgccgaccacggacagaagcatgatcctggcggcgcgatatcgttcagagggacttgacgatcaaaggcccattacaga

SEQ ID NO: 1511 - DNA, 1454 bp, unidentified
  source 1..1454: mol_type = unassigned DNA; note = element_1f213f6
  misc_feature 1: note = core
  misc_feature 2..233: note = LE
  misc_feature 234..1439: note = CDS
  misc_feature 1440..1454: note = RE
  misc_feature 12..231: note = bridgeRNA
cgttaccttgttggtggtcccgggtggtccggggctgggccagccgctgcgggcatgatgtcttgcccctgtacgtagatgatccggggggtgttgtcacccgcggcggccgggcgccggtgaccgctgataaggggaacgacccactgcgtgtgaggtcttccgtaacgtgggtgcgggaccgatcgtccaccggctggtcctcacccacttaagcgggaggcggcagaaagatggatatcgaggacatcgaggtcttcgtcggcatcgacgtcggcaagactcaccactgggccacggccctgaccaagggcggcaagaaggtcttcgacaaggccctgcccaacgacgaggcgcgtctgcgcgccctgtacgagaaactggccgcccacggtcaccttctggtggtggtggaccagcccgccaccatcggggccctggccgtggcggtggcccgggacatgggcatcaccgtgggctacctgcccgggctgtcgatgcgccgcatcgccgacctgacaccgggcagcgccaagaccgacgcgaaggacgcggccgtgatcgccggcgccgcccgcaccatgccccacaccctgagagccatcagcacctcggacgaggacgccgcggcgctgagcatgctgaccggtttcgacctggacctggccagacaggtcaaccagaccgccaaccggatccggggcctgtacacccagatccaccccgccctggagaccatcctgggacctcggctgaagcacgacgccgtcctggaggtcatcgccgcatggcccacccccaccgcgttgaggaaggccggcagggcccgcatcgacgccaagctcaagaagcacggcgcccggcgccacgccgcctgggccggcaagatcgtatcggccctgggccggcagaccgtcaccgtcaccggcaccgaggccgccggcacggtgctgccccacctggcccgccagctcatcgccctgcactcccagcgggccgacgtcgccgcccgggtcgagaccctggtgcgggcccaccctcttcacgaggtcctgacctccatgccgggtgtcggggtcgggaccgcagccgtcttcctggccgagaccctgggcaagaccttcgacaccggcgcccagctggcctcctacgccggcctgaccccggtcacacgccgctcaggctcatcgatccgcggcgagcgcgtctgccgcaccggcaacaagagactcaaacacgccatgttcctgtccgccttcgcctccctgagagatcccgtctcccgtacctactaccagcgcaaacgggaccagggcaagcgccacaaccaggccctgctcgccctggcccaccgccgcatcctcaccctgcacgccatgatccgcgacggagccctctacgacccgcaaccagccacgaaaccacccgcagccgcttgacacaccacatagggg

SEQ ID NO: 1512 - DNA, 1366 bp, unidentified
  source 1..1366: mol_type = unassigned DNA; note = element_1f30a9b
  misc_feature 1..2: note = core
  misc_feature 3..78: note = LE
  misc_feature 79..1104: note = CDS
  misc_feature 1105..1366: note = RE
  misc_feature 1080..1353: note = bridgeRNA
tgatggggtggacgcctccccgacggccgttagtgtgccagagtggtagtgttggtcaccattgaacaggaggcgtccgtgtcggaagctagcacgatcgggttggacttggcgaagcgagtgtttcaagcacacggagcagatgcatccggcagggtggtatttcgcaagcggctgcggcgcgatcaggtgcttacgtttttcgctggcctgccagcgtgcgtggtggcgatggaagcctgcagcagtgcgcactactgggcgcgtgcgatcggcgagcttggccataccgtccgcctgatcccgccggcttacgtgaagccgtttgtaaagcgacagaagaacgataccaccgacgccgaggcgatctgcgaggcagcgcagaggccaacgatgcgctttgtgtcggtgaagagcgaagcagctcaggccaatgcggttgtattccgagctcgggatcttctggtgcggcagcggacacagacgatcaacgccttgcgcggccatctcggggaatatgggctcgttgtggccaaaggccccagtcacgtcgcgcagctcatcgcacacgtagaggatccggtcgccgatttacctgaggccgcccgaacagtgcttcgcgtgctaacagcctcgctgcaattcttggccgaacgggttgccctcctcgatcgcgagattgctcgtcgtgcccgcgaagacaaggaggtgcgtcgtctaacgaccatccctggagtaggtcccgtaatcgctaccgcattagcagcattagcaccgcctgcgggcgctttcagaaggggccgcgacttcgcggcctgggtcgggctcacgccatcgcaacgctctagcggaggcaagcaaaagcttggtgcgacctcaaaaatgggcgagcgaacgctgcggcgcctgctgatcattggcgcgagttccgttgttcgtaaggctatcaaatacggcaccccatcggggtcctggcttgcgcggatgctggcacgtaagccacggatgcttgtaatcgttgcgcttgccaacaagacggcgcgcatcgtttgggccttacgggcgacaggggagatctatcgagctccggtcgtggtgtcttaaagcggcccgcgatcgggaggcgtcggaggcgtaggagggtcgaaaggagagtatggcgcacagtcaatgagagacgggatcgggaagccagtttttcacactgcgcctcgagcgcgtggccgtgatttggacccggtctgcgaactcccataccggcccgcggcaactgagcggccgcagcacaggccgaacagatgtcagcacctgactacgcgcaatacagtccgaagattcttcttgcgatcacggaggcgtccacaga

SEQ ID NO: 1513 - DNA, 1366 bp, unidentified
  source 1..1366: mol_type = unassigned DNA; note = element_1f31585
  misc_feature 1..2: note = core
  misc_feature 3..81: note = LE
  misc_feature 82..1101: note = CDS
  misc_feature 1102..1366: note = RE
  misc_feature 1127..1353: note = bridgeRNA
tgatggtgtggatggctcctgctcccggcgttgctttgcgccatgatgggtgagtcatcatcccaaatggaggaaccatccatgtcgcaagctatcacaatcggcgttgatctcgccaagaacgtgttccaggtccacggcgtcgagagcaccggcaagcctgtggtgcgccgacagctccggcgcagccagtttctcgcgttcttcgaagggctgccgcgctgcctggtcggcatcgaagcctgtgcgggggcacatcactgggggcggcagctgcaggagatgggccacgaagtgcggctgatgccgccgtcctacgtcaagccctatgtcaagcgcggcaagacggatgcagcggatgcggcggcaatctgcgaagccgtgacgcggccgtcgatgcggttcgtcgccgtgaagagcgaagccgcgtcggcggtaatcgttctgcaccgggtgccggactttcttgtccgccgggtcacccagaccggcaatgcgatccgcgcgcacatagccgagttcggaatcgttgccgcaaaggggtcaaaggttgtcgaggggctggcctcggagctcgatgccttgccggaggccgcccgcctgccgatcgaggtgctcctcggtcaactggcggatataagggcgcgggtcgaccggctaaccggcgagatcgaggcggcgcaccggaagagcgaggtcagcctgcggctggcagcgattccgggcgtcggaacgctcaccgcgacggtcgttgccgcgacgacgccggatgtcagcaacttcgcgtcggcacgtgactacgcggcctggctcggcctcacgccgaaaccccattccaccggcggcaagccgaggaccggccggatctcgaggatgggcaaccgctacatccggcgcctgctgtatctgggcgccatgtcgctgatcatggtccgccgccgccgcgggccgggggtggactggctgtggcagaagcctgcggcaaagaagacaagggtcgtggcgatcgcgctggcgaaccgcatggcgcggacaatcttcgcgctcctgcgcgacggcgcgatgtaccgaccgcgcgtctcggcgacgatgccgggctgacagcggtcgagctggctgcggctcaaggaatggtcagggcagagtaaggtgatggcaaactgacggagaggacgaaccggggcatcccgataaacccgaagcgcattcgacaagcgcgttcgattgagtgggacccgttctccaggcgaatatttatcatggcgcgcagcgaacccgctgcacagagacgccgaatacatggccgcagccgaccagttcgacagaaccctcacaaagcccttgccatgcaggagccaaccataca

SEQ ID NO: 1514 - DNA, 1454 bp, unidentified
  source 1..1454: mol_type = unassigned DNA; note = element_1f3ee24
  misc_feature 1..4: note = core
  misc_feature 5..231: note = LE
  misc_feature 232..1437: note = CDS
  misc_feature 1438..1454: note = RE
  misc_feature 1..235: note = bridgeRNA
ccccgttaccttcttcgtagctcctgatcaaggagttgtggtcgccaggtccggcatgactaacgcccccagtcgcacgcatgatccgggggtggtgtcaccgggcctggtggcatcgagggaccgctgatagggacacggccacccggtgggtaggtctcgtcgtaacgtgggtgccggccatcgatgccctggccggcgaccactcgcgacgaacgaatggcttgatggatgaccagcggttatcaggtgttcctcggcctggatgtgggcaaggacgcccaccacgccgtcggcctggacccggccggcaaacggctgcacgacgggcccctgcccaacagcgaaccgaagctgcaaacgttgttcgacaagctcgccgcgcacggaccgctgctggtcgtggtcgatcaaccagccacgatcggcgcgttgccggtcgcggtcgcgcgagcctgcgggcatcaggtggcttacttacccggcctggctatgcgtcgcatcgccgatctctacctgggccgcgcgaagacggatgcgcgggatgcgttcatcatcgccgacgcggcccgctcgttgccgcatacgctgcgcccggtcgacgtcggcgacgacgccctggccgagttggacgtgctggtcgggttcgatgacgacctggccggcgaatccaccaggatcagcaaccggatccgcggtctgctcaccggcatccaccccgccctcgaacgcgctatcggccccaagatcagccacccagcggtgctggagatcctgtcccgccacggcggcccgaccggcatccgcaaggccggccgccgcaaactcgcccaggtcgccaccaaacacgcaccccggatcggcgagaaactggtcgaccccatctggaccgcgctcgacgagcagaccgtcaccgttcccggcaccaccgccgccgacaccgtgctgccccgcctcgccgacagcctgaaaaccgttctcgcgcaacgcaaacaggtcgctaaacaagtcgaggagatccttgatgcacaccctcttgccggggtcctgacctccatgcccggcatcggggtcaggaccgccgcccgcatcctcctcgaagtcggcgacgccgcgaacttcgctacctccgctcacctcgccgcctacgccggcatcgccccggtcacccgcagctccggcatcagcatcaagggcgaacacccagccagaaccggcaaccgcaaactcaaacgcgcgttcttcctcgccgcgttcgccgccctcaaagaccccaccagccgtgcctactacaaccgcaaacgtaccgaaggcaagaaacacaacgccgccctcatcggcctcgcccgacgacgctgcgacgtcctgttcgccatgctccgcaacaagacccactaccgacacccacaaccgaaaaacctgcccgcagcggcttgacaagaaacatagggaca

SEQ ID NO: 1515 - DNA, 1511 bp, unidentified
  source 1..1511: mol_type = unassigned DNA; note = element_1f47fb7
  misc_feature 1..2: note = core
  misc_feature 3..236: note = LE
  misc_feature 237..1298: note = CDS
  misc_feature 1299..1511: note = RE
  misc_feature 14..184: note = bridgeRNA
cttgtatgttgcgttcagaggcgtgacgataggttacgtttcggcggagaggccgttcccacccgaggccagccttgctgagcctgatgcgaagatcggccgccgtccctctctttttatgctgtggagaatcggaggcctttggagcctgcatgttcaaggtcagcagaaagaggaagcccgtggacgcggacagggacggctgctgaagcccatcctagtgccgaaggaggtctatgagcaagcagatcgttgctcttggtaagcccgcagtttcaaccgagaaatacccagatcgccaagtgaagaagttgttttgcggtattgatataggcgcggaaactctggcgattgcagtgatggaggtggaccatccgtgggtgcaacgcgagtttgccaacaccgttgcgggacacaaggcgctgctcaactggctgggaaagatgaaggcgccggtgcgggtatcgctggaggccaccggcatttattcgatggacctggccttggccctggatgcgaccgagtttgtggaggtagcggtgctgaacccaaaaagggttcacgactttgcgcggacacttcgccggtccaaaacggactcagcagatgctcaggtgctggcagagttcagtctgcgcatgccctttgcagcctggcaaaagcccagtcaaagcgccctcgctctgcgcgccatcagccggcatctggaggcgttggtggtccagcaaaggcgggaaggtaatcgcctgcacgccgccgaaagatcgttagccacgccgcgctgtgtgatcgcggacctgaagcgttcgctggccggagttgaccggcgcatcgtgaagctgcgccgtgaggccctgacgttgatcgccgctgatgcccacttgagccagcgtttcaggctgttaacaagcgttccgggcatcgcggccgtcagcgcgttgcagatcctgggcgaactggtcctgctggccccagacatgaaggtgcgtcaatgggtcgcgcgcagcgggctcgatccggtacaccaagactctggcacttcggtgcataaaccatcgcgcatcagtcgcgctggcagtcgccacctgcgccgggcgctttatatgccggctctggccgcagtgcgttgggacccacatctaaaggcgttctatgaagccttgcttgcgcggcacaaacgcaaactgcaggcactgatcgcggtcgctcgcaaactgcttcacgccatctacggcatcttcggcagccaaactccctacgacggaagcaagctcttcccgcatctgctgaccatataaacgctacaatcgcctcatcaagtgaaacggaagcgggctctgctgggaagcaaccatgccgagggataacttggtgggctcatcccgacgatgaaccaacagccgagcggggatatcctcgctcggcccagacaggcatcggagggaaagacccaccatgccttgaaaatccattccatccccaccgaaaatgcttgcactacaagagagaat

SEQ ID NO: 1516 - DNA, 1359 bp, unidentified
  source 1..1359: mol_type = unassigned DNA; note = element_1f610b9
  misc_feature 1..2: note = core
  misc_feature 3..75: note = LE
  misc_feature 76..1107: note = CDS
  misc_feature 1108..1359: note = RE
  misc_feature 1080..1347: note = bridgeRNA
tgatggggtggacgccccccggcggcatcgatgtgccaaagtggaggtgtgaacacaccacttgaggaggcgcccatgtcggaagttaccacaatcggtctggatatcgcgaagaacgtttttcatgcgcacggggcagatgccagcggcaaaccgctgttcagtcgtaagatcagccgcaccaagttgctggagttcttcgccaaacatccacgttgcctggtggcgttggaggcctgcggcggtgcgcatcattgggcccgcgagctcacgcagcagggtcaccaagttaggctgatcccgccggcctacgtgaagcccttcgtaaagcggaacaagaacgatgccgttgatgccgaggccatctgtgaagctgcacagcggccgaacatgcgcttcgtggcgatcaagagcgaggagcagcaggcgtcggccctggtgttccggacccgcgatctgatggtgcggcagcggacccagttgatcaatgcgatccgcggtcacctgaccgagtatggatgggtggcacccaagggaccgtcgcacatagcggtgctgactgacctgctcgatggcgagattggttcatcgcttccagatgaggcgacacccatgttccgcataatgctcgagctgcttgaggtgctgaacggcaagatcgccgaactcgacaaggagatcgctcggcgcgcccgcgaggatgtgatcgccaggcggcttatgaccataccgggcgtgggcccaatcacggccacggccattgccgctctcgctccgccagtcgagacgttcaccaaagggcgggactttgctgcatggttgggcctggcgccgcgtcagctatcgagcggaggcaagcagaaactgggatcgatcaccaagatgggcgagcgaacgctgaggcgcctcatcatcatcggctgcagtgcagtcgtcctgcaggcgagcaaaagaggggcgccggcggggtcgtggctcgagcagatgatggcccgcaagccgcggatgctggtcaccgtcgcgctggccaacaagaccgcgcgcatcatctgggcgctgctcatcaaacaagaggaatacaaagctccggtcgcagctgcggcataggccaaggcgaaccagaggtcgtcggagacggagtcggtcgaaggaaggtatggcgcaacagtcggcgagacgggatcggaaaaccagggcaatccactgtgccttgagcacgccgtgggtgatgtggatccggtccgcgaactcccatacgggcccgcagcctctggcgctgcaccagaggccggacagatggcagcatccgactacgggcaaccttcaaaaaccgcttgcgtcttacggggcgtccacaga

SEQ ID NO: 1517 - DNA, 1365 bp, unidentified
  source 1..1365: mol_type = unassigned DNA; note = element_1f643d4
  misc_feature 1: note = core
  misc_feature 2..68: note = LE
  misc_feature 69..1178: note = CDS
  misc_feature 1179..1365: note = RE
  misc_feature 1137..1356: note = bridgeRNA
tatggaatggcccgcccctccacccggcgttgtagcttcgccggaggttcaaaccggagggacgaatcatgcaggtttccgtgctcggtatagatcttggcaagaatgtttgcagcatcgtcggtctcgacgcggcaggcgctgttgttttacgccggcgcgcgaagcgagagacgctgattggcctggttgcgaaattgccaccttgcatcgtcgccatggaggcgtgctgtggcgcgcacgatcttggccgtatgttcgcgggccatggacacgacgtaagactaatgtcgccagaatatgtgcggccctatatcaaggcgcaaaagaatgacgatcatgacgccgaagggatcgccgaggcggcgacgcgtccgaccatgcgctttgtcgagttgaaagcccaagaccaactcgacatgcaaacgctccacagatcgagagaccggttggtcggcgaacgaacggctttgatcaaccagttgcgcgcgatcgtgctggaacgtgggatcgtgattcctcagggcaagcgtaatctcgaacgccatctcgccgccttgctcgacggtcaggacagacaggggttgagcccacggatgcgtctgttgatcgccgacggtcgcgcgcaatggcaggaactcgatcggcgcatcgccgtcttcgacgcggagttcgcggctttcacgaaagagaacgaagatacgaagcgattggcgacaatccccggcgtcggcatcatgatcgcttcggccatgatcgcggcaatcggaaaagcggagactttcgaacacggtcgcgatctggccgcgtggctggggttggtcccacgtcaatcgacaactggcggcaagccgcggcttttcggcatcagcaagaggggcgacaaatatctgcgcaagttgctgatccatggagcgcgggcggcgttttccacacatcgccggacgcgacacagcgcttggccgatgggccaagagattgctcgcccgcgtgcatcagaatgtcgccgttgtggccttggccaacaagctggcgcggatcgcctgggcggtgttgcgacgcggcgaaacattcaccgcaaagggagcgtccctggcggcgtagctattggttggtcggcgcatgaggcgctgatcggccgacgatgtttgcgggtggtggatcgagagatggcctgactgacagtcgaacggcgttccggaaacctggttcaaaaaacggcgctcgacgccgagacttttatgaggacagggacgcgcgtatctccatcttggccgggggctcaccccgaggccggatacgttgaagcagactgatcaaacggcgctgtcgaaaaaactgcttgcagacggggcgggccatacg

SEQ ID NO: 1518 - DNA, 1410 bp, unidentified
  source 1..1410: mol_type = unassigned DNA; note = element_1f6fa4d
  misc_feature 1: note = core
  misc_feature 2..91: note = LE
  misc_feature 92..1120: note = CDS
  misc_feature 1121..1410: note = RE
  misc_feature 1169..1408: note = bridgeRNA
taatggtatggactcctctccttcccaacggcatcgcgatgtgccaaagtggaagggaagccaccacttaactgaagaagaggaatccaccatgaatattaagacaattgggttagatattgcaaaaaacgtttttcagctgcacggtgttgatagtaacggaaaaactatgctgcgtaaacagcttaagcgggataagttattggaatatttcgccaatttgacaccttgcctgattggcttggaagcctgctctggagcgcattactgggcacgagagttgattaaattaggccatgatgcccgtttgatcagcccccagttcgtcaaaccctacgtcaaaggcaacaaaaatgacgccaacgatgcagaagccatctgcgaggcggtaggtcggcctgccatgcggtttgtccccatcaaaagcattgagcaacaagatatccagatgttgcatcgggttcggagtgggctagtcaaggaacggactgccctggctaaccgtatcaggagcttgttggccgaatatggcataatcgtacccataggtctagtcaaagtgcgacaagcgctacccgacatactggaagacgctgacaacggcctaacgatggcggccagggtgatatttgctgatttgcaggatcaactggttgaattggataaacaggtaacgacctacggcgacaagattcaggacgtgcaccgcgccagtgaagtgagtcaacggcttagtgacgtgcctggcattggcccaatcaccgccaccgccataatggctgcgctaggggatggcaaggcctttggttcagcacggcaggttgccgcttggctgggcctggtgccaaggcaagattccagtggtggcaagcctaagctcttgggcatcagcaagcggggggatgtttatctgcgcacactgttgatccatggtggcagggcggtggtcaatgccgccgccaagaaagacgatgcccaaagccgctggatcaatgagctggtcaaacggcgcaatatcaatattgccgccgtcgctgttgccaataagaatgccaggattgtttgggcattgctgactaagtcagtggaatatgacgtatcagcacccagcagtgtttaacaaacgacaacagtgaccgctgtttaacatttagtgaagtaagaaaggcacttccagttgcgaagttttttcaacacgatggcaaaacaggtcagaccggtgttttcggcaatccgattagctttaaagtcttcaaggctgataacgtaatagggatgaaaacacgcggatatccatcagggccaggggtaatcaagaccccattaacaggccggatatatggaagcaactgcgtttactgaccaatgcaatcagacagaaaaagcttgcaaaaacgaggagtccatata

SEQ ID NO: 1519 - DNA, 1401 bp, unidentified
  source 1..1401: mol_type = unassigned DNA; note = element_1f767de
  misc_feature 1..2: note = core
  misc_feature 3..87: note = LE
  misc_feature 88..1131: note = CDS
  misc_feature 1132..1401: note = RE
  misc_feature 1164..1399: note = bridgeRNA
tgatgtgatggacgactcccgctacgcagcgagagatttatgccagagtggagaggtcgagatatccacggcaaaggagcgttcatcatgaagatagcgattgttggactggatctggccaagaatctgctgcaggttcacgcagtggatttgcaaggccacattgttgtacgcaaacagctgagacgcgcggatgtgcttcggtatttcgcatcgcttgaaccgtgcgtgattggcatgcaagcgtgcggctcgtcgtactactggggccgggagctcgcgaagctcgggcataccgttcgactgatcgccccgcagttcgtccggccttacgtaaagagcaacaagaccgacgcggccgacgctgaagcgatctgcgaggcaatacagcgaccgcacatgcgcttcgtaccggtcaagacgcaggcgcaacagacaattctgtcgctgcaccgcgcacgcgccgggctggtcaagtcgggcacagcactggccaaccagatccgtggtcttctcggtgaattcggcatcgcgctgccacaaggtatccggctgctggggcaacgggccatagcggcgctatccagtcacgacagtgagcattgcgagccgttccgtgcgttagtccagatgctcgtcgagcacctgcgcgaacttggcgacaaggtggctgaactggaagggcgtatccgcgcgatccatcgtacggatgcgcccggccaacttctcgaaaccatacccagaatcggcccgctcaccgcatcggccttggcagcctcaatcgggaaccctcgagcctttcgcagcggccgtgaactcgctgcatggctgggtctggtcccacgcgagcattcctcgggcgggacaccgcacctgctgggcatcagcaagcgcggcgatacagcactacgaacgcttctgattcacggcgcccgcgcggttatacgcatggcagcctccaagcccgagatggctgactcctggctgatgaaactgtgtcgacgccgacacaaaaacatcgctgccgtagagctcgcggcaaagaatgcgcggacagcctgggccatgctgatacgaggtcaggcctatcaggctagccacgtgccgacacgatccagcacgacggattgacagatccagcgtttaacatcgcgacagcgtccactttccagaggttgcttgagcagacttcaattcgatgacacaacggtcggaccatggtgggtcaaacccgctttgcaccatgggcaaccaggcccgaggttctgatggggtacccattcgcggatatacatcgcgggccagcagcgagtgctgcgaactgagcccggatacatggctgcaatctcgacccaatgccagagaacccggactgcttgacaacagggagtcgtccataca

SEQ ID NO: 1520 - DNA, 1493 bp, unidentified
  source 1..1493: mol_type = unassigned DNA; note = element_1f77684
  misc_feature 1..2: note = core
  misc_feature 3..231: note = LE
  misc_feature 232..1446: note = CDS
  misc_feature 1447..1493: note = RE
  misc_feature 12..197: note = bridgeRNA
tccatacctttcttcgtgggttgatcgcggtcattcgtaagatcgggacacccagggatgccgggtgtggctttcatgcgagtgccgcgttcgtggctgaggaggattggccgcccggcatcccgcgacgactcgactgctgattgggatgcgcgaaccgaatcgctcgtatggacgtgacagcgaggtcgtctgctgggacagcacaagcgaacgacgaaggagagtccggtgcccgaactgtgggcggggacggatgcgggcaaggccgagcaccactgcaccgtgatcgatgcggacggtgagaaggcgctctcgcgccgggtgccgaacagcgaggacgagctgctgcagctgctcggtgacgtcctggacctcgccgacggcgaccccgtcacctgggcggtcgacctcaacgccggcggcgccgcgctgtggatcgcgctgctggtcaaccacggacagcggctgttctacatccccggccggaccgtgcaccacgcctccgggtcctaccgcggcgacggcaagagcgacgccaaggacgccttcgtcatcgccgaccaggcccgcatgcgccgcgacctccagccgctgcaggagaccagcgggatcgcggtcgacctgaagatcctgaccggccgccgcatggacctgtccgccgaccgcacccgggccgtcaaccggctgcgagcgcagatcctggagtacttccccgccctggagagggccttcgactacagcacctccaagaccgcgctcgtcctgctgaccggataccaggccccggccgccctgcgccggatcggccgggcccggctgaccacctggctcaagaaccacggcgtccgcaccctgaacgtcgccaagagcgccgccgacgccgccgtcaccgccgccgaggcgcagttcaccgtcgttcccggggagaagaccgccgcgaagatggtccacaccctggccagggaggtgatggccctcgacgaggagatcgcccagaccaacgccctcatccagggccggtttcgcgaacatcccgacgccgaagtgatcaccagcatgcccggcatcggcgacatgctcggggcggagttcatcgccgcgaccggtggtgacatggccgccttcggcagccccgaccggctcgccggcgttgccggactcgcccccgtcccccgcgactcgggcaaggtcagcggcaacctgcgcaggcccagacgctacagccgccgactcctgcggatgttctacctctccgcccagaccgccaccgtgcactgcccgcagtccaggaccttctaccagcgcaaacgcgccgaaggaaagtcccacaagcaggccgtcctcgcgctggccagacgccgcctgaacgtgctctgggccctgatacgcgaccatcggaccttcgcggccgtcgcgccccaacccgctgccgcagcggcatgaccccgtcacgaggcgtcaccgccccggcttgacaacgtcattgggaa

SEQ ID NO: 1521 - DNA, 1534 bp, unidentified
  source 1..1534: mol_type = unassigned DNA; note = element_1f77847
  misc_feature 1..3: note = core
  misc_feature 4..86: note = LE
  misc_feature 87..1115: note = CDS
  misc_feature 1116..1534: note = RE
  misc_feature 1272..1520: note = bridgeRNA
tgatggtgtggacgaccgctgctcccggcatcgaggtgccatagattggtggttgcagactcccaccagacgagagggccgtccacatgagcattgtcaccgtcggtctcgatcttgccaagcacgtcttccaggttcatggcgttgatgaagtcggaaaggtggtcgtgcgccggcagcttcgccgggagcagatggaggcgttctttcgtggcttgacgccttgcctggtcggtatggaggcgtgcgcgacggctcatcactgggcgcgtctcatcagggctctcggccatgaggtccggctgatcccgccgacccgggtcaaggcctacgtccagcgcggcaagaagaacgacgccgccgatgccgcggccatcgccgaggccgtgacccggccgcagatggcctttgttccgatcaagagcgaagaccagcaagcggttctggtccttcaccgctcccgtgacctgctggtccgccagcgtaccatgctgctcaatgccctgcgcgctcatttggcggaattcggcatcgtgggggcgcagggcccccggaagctggtcgagttgatcgatcggctgagcgatctgccgatccccgagctggttcgcttggccctgggggaattggtccagcaggtcgagagctgcagcgcgcggattgcggccctggagaaggccatcctggcgtggcatcgcaccaccgaggccagtcgcaatctggccaccattcctggcatcgggccgatcaccgcctcggtgctcgccgccaccgtcaccgatccgagcgcgttcaagaacggccgccatctggccgcgtggctggggctggtgccgcggcagaattccagcggcggcaaggatcggctcggcggcatcaccaaggccggcgaccgctcgatccgccgtcttctggtcatgggcgccaccacggtgatccgctatgcccgcagcaaagcgcccggcgagggcgagtggctgaagggcctgctggcccgcaaaccggctcggttggccagcatcgcgctggccaacaagatggcccgcatcgcctgggcggtgctcagccgcggcgacgtctaccgcaagactgtcccggttctggcggttacctgagccgtcagcgtcaggagcatccggagcggatggtccgcccgtccgcggaaccttctcaagcctggccctgcggcggcgctgggcttgacaaggccccgccgacgagcggtctgtcccaccatcggatgcaagccaccgtgtcgctggaccgtccggtttggtaacgctgaagaacaggaccacgctgtgtgagggtgcagagagaggtgatggcgaaacggttcgagccagggattgggaagacccacgtactgtcatgcgcctcgagcccggcaagttgatcgggacccaatcccgcggagttcatcatggcccgcggtcatcagcaccgcattcttcgaggccggacacatgaccgcacccgaccttttcgccaagccagatctcttttcccttgcgccgcagcggtcgtccacaca

SEQ ID NO: 1522 - DNA, 1389 bp, unidentified
  source 1..1389: mol_type = unassigned DNA; note = element_1f7df43
  misc_feature 1: note = core
  misc_feature 2..74: note = LE
  misc_feature 75..1100: note = CDS
  misc_feature 1101..1389: note = RE
  misc_feature 1153..1386: note = bridgeRNA
tactgagatggacccgacgccaccattgagacgaaactgcgcatctcaacaaccctctggctcggaggttcgccatggagatcgagattctcggcatcgacttggccaagcgcgtgttccagcttcatggcgccgatcgccatgggcatgcacagcatcgttcgaaggtaacccgcgccgcgctattgcaagccgtacacgagttgcggccgcgggtgatcgcgatggaggcatgcagctcggctcaccactgggcgcggcgcttccagggactgggcatcgaggtgcggttgatcagcccgcactacgtgactcctttcttcaagacgaacaagaacgaccgtaacgacgcggaggcgattgtcgaggccgcctgccgcccggcaatgcggttcgtgaccgtgaaatctgtggaccagcaggacatgatggccgcccaccgtgtgcgccaactccttgtcgaccagcgcacggcgctcatcaaccaggtcagaggcttgttcggcgagcgcggcattgtgatcgcccaatcgcctgaggccctgaagcgcgccatgcccgagatcctcaaacagtgcgaaggcgagctcaccagcttctgccagacgctgctgatggaattgctgcagcaagtacacgtgctcgaagagcgcattgcgcctgccgaggcgtggatcaagtcgttcatgaagagctcggccctgtgcaagaagatcacggccatcgacggcgtcggtccgatcaccgccacggcgatcgtcgccgctgtcggggacgccaaggagttcaaaaacggccggcatctggcggcctggctcggcctggtgccgcgtcagtactcgtcccgcggcaaatcgcgtctcaagggtatcagcaagcggggcgattcgtaccttcgaaccctgctgattcacggcgcacgctcggtcctgcgctacgccgtcggcaaggtcgatgcgcgcagccgctggctgcaggagctggtcgcgcgccgcggctacaaccgcgcggcggtggcgctggccaacaagaatgcgcgcgtcatccaggtcctgctcagcagcgaagacgtgtatcgacccacgggcgccgcgctctgaaatcccgtggcatctacaacagtaccttgagggggaaagaagatacccagcactggtttgcgaagcttctcgaacatgatgacgagatcggttggaccaacaccccgaaacctgtttttggtgccggctgcacgctcaggctcaagccgccgatttgctaaggacagggtgtgcggatctcatcaaggctgcgggcgtgtctcgacgggcccactggcaagccgtaaacatgcgtgcagaccgtttctcatcgccaacgagaacttgcaaaaggcgtcgggtccataca

SEQ ID NO: 1523 - DNA, 1362 bp, unidentified
  source 1..1362: mol_type = unassigned DNA; note = element_1f7f250
  misc_feature 1: note = core
  misc_feature 2..77: note = LE
  misc_feature 78..1103: note = CDS
  misc_feature 1104..1362: note = RE
  misc_feature 1140..1350: note = bridgeRNA
caatggtatggactcctcacttccactcacaatgtgagctaaagtgaatgtaaccaaacaaaaaaggagcccataccatgaaaaatactagcatcatttgcattgatcttgctaaatctaaattccaagcaggcttattcaataagcacaatatacttaaatcaaataagcaatattctgaatctgcactattgaaatttgttgctatgcatcccgaagctattatttgtatggaggcatgtgccacctcaaattatcttggtcgttactttcaaaaccaaggacataaagttctgcttattcctgctcaggtggttgctaaataccgactgggtaacaagaatgatgcgaatgatgttctcgctatttacgaggcagctaaccgccctaaagtgaaatttgtcgcagtaaaaaccattgagcaacaagatttagcagcgttattaaaactacgagagagttacgtaaaacgcagaactcaactatcaaatagaattcgcggtgtagcaatggagtacgctgtcaaaatgccacaaggcctgaatcagctgcgaaaaaatcttcctgttcacttatcagatatgaataatgatctcactcatattgcccgctttgttttaagtgatttatatgagcagcttattaaaatagacgaaaatattgcaaaagtgaccactcaattaattgaatttgcaaagcaaattccttcctgccaattactcattacattacctggagttggttggattgtagctagtgggttatattctcgatttggtgatgcatctatgtttcgattcggtcgagatgctagcgctagtttagggctagtacccgctcataatggaactggtgggaaaaatgtaaatataggtatatctaaatcaggagataggacactaaggtcattagttgtccatggagcaagagccgtagtttctaacataaaagaaaagcaggatcctttaagttgttggattcgtgagcttttaaagcgaaaccatccaaataaagccacaattgctgtcgcaaataaaatagtcagaatggcttgcgccatgctgaaaacaagccaaccctatcaaccacaattcgctaattaagcgttgataaggctgtataagtagcaattggtgactgtcgagtacaacaagtagacaagatgaagtgtaacaaagcacacaacagaaactctgagaggaacgacggtataaaataccttttactcgttaagaactgttgtaatgtgaattaagccatacaggttaagggtagctccctattataaaaaaccgaatatacgtgcacttgtaatttacactaacagcaaaatttacttgttatacaagaggagtccatata

SEQ ID NO: 1524 - DNA, 1190 bp, unidentified
  source 1..1190: mol_type = unassigned DNA; note = element_1f8cf49
  misc_feature 1..2: note = core
  misc_feature 3..209: note = LE
  misc_feature 210..1187: note = CDS
  misc_feature 1188..1190: note = RE
  misc_feature 33..189: note = bridgeRNA
tcctttagacttgtattatctttatagatgatagactgagaaaaggagaaaggtaaactaagacaggctccgagtaagactcatacgttgatttagacctttctcccttttcatcaagttcctcaaatagaaatttgggttcgcggcccattattaaggagttgagtgccttgatgattttctcaatcagtaaacctaaacactaatttatggaaaagacatttattggcattgatgtaagcagcaatcgtttggacatttgcgtgttcagtcagggagaaaggcattcatttgtcatcaaaaacgctattcagtccattacccgattttttaaaaagcataattcagaaaccgtgtttgtagctatggaaaacacggggcgttataattggtcattgtatgaagcgttatcttctttcaaggggcacatctacgtaatttctccccttcatatgaaaagatcaatggggttgatacgaggtaaaaacgataaggttgatgccattagaatcgttgattttattcagaagaattatgaacagcttacagaatggagaccacttcctgtggctattgaaaatattaaagtgctgctttctgaaaggaatttacgcatctcccaaaagaagcagatggatcagcagcttagctattatggtttattgaagaacaccggattagataaggagttactgaaactaaaccgccagatgatcaaaactctaaaagcgcaaattgagttgctggagaaaaaaatcaatgagatcatcaatacggatgagagcttatcagttctggctaaactaatttcctccgtacctggtgttggaaaagtattgacatggacactaatatcagcaacagaaggcttccagaagattacagaagccagaaagcttgcgtgtttttgtggcgttgtgccttttgaacatcaatctggaacatcggtacgtggccgaacaagagtttcttcatttgctgacaaacgcctaaaaacaattcttcacatggcagccatgagagcagtaaggctcaaaaatgaactacaggtgtactacaatcgaaaggtaaaagaaggaaaaaacaaaatggctgttctaaacgctgtgagaaataaaatcatccatagggtctttgctgtcatcaaacagcaaagaccttatcaaatggatttggctttgtcatagaaa

SEQ ID NO: 1525 - DNA, 1381 bp, unidentified
  source 1..1381: mol_type = unassigned DNA; note = element_1f8db74
  misc_feature 1..3: note = core
  misc_feature 4..182: note = LE
  misc_feature 183..1118: note = CDS
  misc_feature 1119..1381: note = RE
  misc_feature 1149..1369: note = bridgeRNA
tgatgctgtggacggctcctccaccggcacgagagtgccacggctgtgggagtagttgaggctcccacgattcggaggagctatccatgcaaacggttacgacaatcggtctcgacatcgccaagtcggtgttccaggttcatgggcatgatggcgccggccaggtagtcatccgccgttagttgaaacggcgctctgtcctggcgttctttcagaagttgccgccgtgcttggtcggcattgaggcctgcgcttcggcgcaccattggtcgcgcgaactgcaagcgctgggtcacaaggtacggttgataccgccggcctatgtgaagccttacgtcaagcgacagaagaatgatgcggctgacgcggaggcgatttgcgaggcggtcaccagggccaacatgcggttcgtgccgaccaagactctagagcagcagagcggcctggtgctacaccgcacgcgccatctgttcatccgtcagcagaccgcggtgatcaatgccattcgggcccatcttgccgagttcgggatcgttgcgccggttgggcgccacggtgtcgaggagctgctcaatgtcgtggctgatccaaacgacaagcgagttccggagatggctcgtgcgtgtctctcggcattcggggctcaattgcgcaggatccaggagcaggtactggagttcgaccgactgatcagggcctggcaccgatccgacgagatgagcatgaggctcgatgaagctcctggcgtcggtccggtgttggccactgctgtggtcgccaccgtagctgatccaaagtccttccgatcaggacgcaacttctcggcctggatcggtatcgtgccgaagcagcactcgagtggaggcaagaaccggctcggcaatataagcaaacaaggtgaccgctatctgcgcggcctgttcgtggccggcgcgctcgccgtcatccgttacgccaagatccatggcaccaaacatcgcccctggctcacggcgttgctggcgcgacggccgaccaaggttgcggctattgcgcttgccaacaagctcgcgcgaatggtctgggccatgatggccaggggcgagcgatacaaggaacccgtcgcgcttgcggcgtaaacgagatcgcgccggacaaccggcgtgatgtgaaggttgggagggcgaacagcacgtaatgcagagccggtcgatccggcgatcaggacaacccacttgggtcgaggcattgtcaaatgcgcgagtttgatcgggacctgatccgcggagggcattatggccagcggtcatatgaaccgcgtcaaaaggccggacacatggctgcaccgaccaatgctgcaaaacgtgaagaaagtccttgccaatccggagccgtccacaca

SEQ ID NO: 1526 - DNA, 1555 bp, unidentified
  source 1..1555: mol_type = unassigned DNA; note = element_1f9405c
  misc_feature 1..3: note = core
  misc_feature 4..229: note = LE
  misc_feature 230..1234: note = CDS
  misc_feature 1235..1555: note = RE
  misc_feature 11..194: note = bridgeRNA
aaacatactaagattagtagtgaagaaatctccgacgggagaaagtactcactgcttttcctttgtgataacgtagaggtggcttgtaaagtcgtagggctctatggcgcttgacgtcgcgtatggaaaatgaaatcactaaaacaaggaatcattcaagacaaagaggtaatatcatgcgtgcagtatttggaattgatgtgagtaaggcaattcagaggtggctattgtggtcaatggtgagaaggttcatggctacaccatgcctaatgattctataggattccatcggctacttggtgacttgaaaaccttccacaagctagagattgtcttcgaggcgactggcgtttattctcgtcgtcttcaagcttttctcgaggacaatggctatgcttatacacgactcaatcccttagaagccaagaaacaactggacagcttgcgtgtccgtaaaacagataaaatcgatgctgaaaaactggcgcagtcccagtttatcctcaatcgcaaaacaacctacgttcaggaggaagtctatcaaaatttgcgtgatctcagccgtttctatcaacatctgactgaggatatcgtgtgcgctaaaaatcgtttgcacaaggttttacaggttacttttccagaattggaaaatttcttgtctgcctcaactggggaacagtactggaacttggtgattgctttcccatctaaagaatttgtattacatttaactcaaagtcaattgaataatagtattcgtcaatctacgaccaaacgcatttctgacaagcgagctacctatctggctgacaaactcaaagaactggctaaacaaagctattgtgcggtcaagaaaacctctccaatacttgaagaggtccgttactatgcaaaagaactgcttagactatctgaccgtcggaaagctgttttagatgacagggtcaaactggctcagtcattaccagaatacgagattctcctctccatacctggtatcgcagaaacgacagctacagctatcattggcgaattgggagacattcgccggtttcgatctgccaatcaaatcaatgcttttatcggcattgacttggggcactatgagtctgggaacttccttgccaaggaacgtatcaccaaaagaggcaatccttatgccagaaaagattctcttcaagtgtattcacaacatcgcttctgccagccacaccaagccttgccatatcgctgatttttacgagaaacgaaaaagacaatcgcaaacagcttcaacgaaaccgcacacgattgccgccatacatcgcctcatcaggacaatgtattaccttatgacgcataacaagctttacgactacactttagccaaaagtcagtaaagtcatctatgctctatcattgtagcaccttgtttcaaaaaatgctagataaggggctccttttgtatgcactttttaaaccaaactttgaaccaaaataaaataatttccttgttttgcctactgggctcaaatttttttcgtcaaataccttgatagacttgacaaatggtaga

SEQ ID NO: 1527 - DNA, 1209 bp, unidentified
  source 1..1209: mol_type = unassigned DNA; note = element_1f95b5b
  misc_feature 1..2: note = core
  misc_feature 3..207: note = LE
  misc_feature 208..1197: note = CDS
  misc_feature 1198..1209: note = RE
  misc_feature 11..190: note = bridgeRNA
cttgtatcttacttgcgtgatgattagctctcatcacatgaggctgaggaagccagattcgaaccttaaggaactaaaccttgtgccgtagatatggccctcatcctcacctcatcgccaaacccgacactgaacggtagccaagggctcagaccctgtatgtacaaggcaagtgggcgatttggtcattaacatgaggaatttgccatgcactatctcggtattgatgtggccaaggccaagttggattgttgtctattgcttgagctctcgagctgtaagcgaaagacaaagtccttttccaacaacgactctggttttaccgagttagtccattggcttgataagcaacggatctcggcttctgatacccatgcggtaatggaaggcactggggtttatcacgaacgagctgccatcgcactacatgacgcggggatgcaggtatcgatcatcaatcccgcacaggctcgcgattttgccaaaggattagctattcgaagtaaaacggatgggctcgatagcttggtgctggcgcgctacggcgcattagtccagcccaccatttggatacccccaacgccacaggctcgagccctgcaagctttgctgtctcgagttgatgcagtccaccaagacctgctgcgtgagaaaaatcggcaggaaaaagccgacgcaacagacacgccagaactgattcgccagtcactggctgactcaattatgttcctgcaaacgcagctcaaaaagcttcggcaagacatagatgatcacattaatcgtcatccggaacttcgtgacgatgccgcattgctgatcactattccgggcgttggaataaaaacaagtcagcacctcttgtcagtcatacacctccaccacttccatacagctgaacgcctcgcggcctatttgggcgtggtgccgatacagcggcagtctggcagctcggtacttggcaggcccaagctatccaagactgggccttcgcatatcagagcggtgctctatatggcagccgtggttgcaagcagacataacccccatgtaaaagcactttacgaacggctgatcgcgtctggaaaaagcaaaatgtcggcattaggtgctgcaatgcgcaagctggtacacctgtgctttggcgtcattaaaaaccgtcagccgtataacaaaaactacagccaggaatcttgctaacacagacggtat

SEQ ID NO: 1528 - DNA, 1497 bp, unidentified
  source 1..1497: mol_type = unassigned DNA; note = element_1f999b9
  misc_feature 1..2: note = core
  misc_feature 3..241: note = LE
  misc_feature 242..1477: note = CDS
  misc_feature 1478..1497: note = RE
  misc_feature 7..244: note = bridgeRNA
ctaatgagtattagcgggtccggccttcgggcagacttgctgccggtagcggccggtgggtgagcactgatgcctcctggatttcgagtcctgatgtcagatcgtcgcccccaccggttcgcctgggagaagggatcgctgatgggatgtcgtgcccgcccgcgtggcgtgagcactgcttcattaggtcgccgagagttctcccgcacgctgccggaccaactgcagacaggagcgaggagtggcgaaattgctgtacgtgggcgacgattgggcggaagatcatcacgacgtcgaactgatggactcggggggacgcaggctggccagggcgcggctgcccgagggcgcggccgggatcgcgcggttgcacgcgatgatcggcgccgagctgggcgccgacgccgacatggccgaggtggcgatcggaattgagaccgaccggggcccgtgggtggccgcgctgatcgcggccggatacaccgtgtacgcggtgaacccgctgtcggtggcccggtaccgggagcggcacagcgtctccggcgccaagagcgacccggcggacgcacacacgctggccgacatggtccgcaccgactcgcaccagctgcgcccggtggccggcgacagcgcggcagccgaggcggtgaaagttgttgcccgctcgcacaagacgatgatctgggaccgcacccgccacacccagcggctgcggcacgcgctgcgcgagtacttccccgccgcgctggaagccttcgacgatctcgacgcggccgatgcgctggaactgctcggcagagcccccgaccccgcgtcggcggcgaagctgaaccgcagccagatccgggccgcgctcaaacacgccggtcgccgcgacatcgacaccaagaccagccggatccaggacgcgctgggcggcgagcagatcggccgcgatccagtgatcaccaccgcgtacgcggctgccacccgctcgatcgtggccgtgctcaccaccctcaacgagcagatcgcgatcctgcaagagcaggtggaggagcattttcaccggcacccggacgctgagatcatcctgtcgcagcccggcctgggaccgatcctcggcgcccgggtgctcgccgaattcggcgacgacccagcacggtacgccgacgcgaaggcccgcaagaactacgccggaaccagcccgatcacccgcgcctccggcaagaagaaggtcgtgctcgcgcggttcgtgcatcaggacaggctcatcgacgcgctgatgacgcaggcgttctccgcgctgcgcgcctcgcccggcgcacgcgcctactacgacaagcaacgcgcccgcggcctcggccacaaccccgcgctgcgccagctcgccaaccggctcgtcggaatcctgcacggctgcctcaagacccgcacgctctacgacgaagccaccgcctggccgtcccaaaatcaagatcaacaaaccgccgcttgacatttaagctcctgggatgt

SEQ ID NO: 1529 - DNA, 1155 bp, unidentified
  source 1..1155: mol_type = unassigned DNA; note = element_1fa4817
  misc_feature 1..2: note = core
  misc_feature 3..207: note = LE
  misc_feature 208..1143: note = CDS
  misc_feature 1144..1155: note = RE
  misc_feature 12..213: note = bridgeRNA
cttgtcttatgactttgggagcttttgtgcgaaacaagagtcacagatcagcattttaaaatgctgatctgtggtggtggttggatcgtttagcgcttggtctttgaggactgtttcagagtaagatcaaccaccaccttcgccacaggcctgaacggatacagagcggcacgaagccctctaggacaagcataggatatgacgaagatgacggatgataccattggtatagacatttccaaagccactttagacattcaccggctgagcgacgggaagatgatgtcgtttagcaattgccctgcaggatttaaggcgctttccaagttctgcgcaaagacggcagtgacacgcgttgtttatgaagcaacaggcgcttaccacagcgggctagaacgggccctgggtgcgcacttgccattggtaaaggtgaaccctttgcaggcgcgccggtttgcgcaagcacaaggtgtgcgcgcaaaaacggacgccgttgatgccaaaatgctggccgttatggggaatgcttttgtgttagagccagatgagccagttataaaagtacagtatgatcttaaggagttacgctcatttagatcgggattgatcaaggatagaacgggcatcatgagtcgtctgaaaacccaaaccctgtatatcacttgccgtcaaagcaaaacccgcttggctcaagttgataagcagatcgctgaaatcaatgctgagattgaccgtctgataaactccagcggcacgctggcgcactcgatgaaaatcctccgctcaattccaggtatcggcgcggtttgcgctgccaccattttgatagagatgcccgagatcgggagtatggatcgaaagcaggtggccagtttgactggggtagcaccgatgacacgtcaatctggacaatggcgaggaaaatcattcattcaaggtgggcggaaagtggtgaggaacgccctctacatgcctgccttggtggccatgagattcaaccccgacctcagggtcaaatatcaagccctgattaaagctggaaaaccaccaaaagtagcgcttactgcgcttatgcgaaagctcattgaactcgccaacgccctcatcaaggcagatcggtattgggtgaaaaaaggggcttgatcaagacggata

SEQ ID NO: 1530 - DNA, 1478 bp, unidentified
  source 1..1478: mol_type = unassigned DNA; note = element_1fa8855
  misc_feature 1: note = core
  misc_feature 2..242: note = LE
  misc_feature 243..1463: note = CDS
  misc_feature 1464..1478: note = RE
  misc_feature 10..246: note = bridgeRNA
ccgttactttcttcgtagcccggatggagggatcctgaggggtgacggcctgccgggtccggcatgactctctgccccctgtccttgatgatctgggggggtgttgtcaccgggcctggttggcggtgtgtgatcgctgataggggctggacccgagtgctctggtgcttgaggccgttcgtaacgtggatgccgagactcaccgccggtggacgccgtcatgcaccggaagcggaggaccaatgatggtcagcagcatcgacagatacgacgaggtcgacgtgttcatcggcctcgacgtcggcaaaggcgagcaccacgccgtcgctctcgatcgggcaggaaagcgcctgttcgatcacgcgttaccgaacgacgaggcgcggttgcggggcgtgctcgagcagctgagcacgcatgggctgatcctgctcgtcgttgatcagcccgcgacgatcggtgcactgccggtcgcggtcgcgcaagcgagcggcgcgctggtcggttacctgccgggtctggcgatgcgccgcatcgcggacctgcacccgggtgaggcgaagactgacgcgcgggacgcggcgatcatcgccgagaccgcccggacgatgccgcacacgctccgttcgatccaggccgccgacgagcaggtcgctgagctgtcgatgctctgcggtttcgatgatgacctcgccgggcagatcaccgcggtctccaaccggatcaggggcctgctcacccagatccaccccgccctcgagcgcgtgatcgggcccaggctggcccatccggcgatcttggacctgctgcagcgttacccgtcgcccgcgttgatgcgggccgccggcgaaaggcggctcgggactcggctgctgaagaacgcgcctcgcaaaggccgcgtctgggccaccctgatcatccaggccctcgacgagcagaccgtcgtcgtcaccggcacggacgctgcagccctggccctgccacgcctggcagagcaactgaccgcgttgcgccggcaacgtgatgagatcgcggctgaggtcgagaggatcgtcgacgcgcaccctctttccccggtcctgacgagcatgcccggagtcggcgtcaggaccgccgcgaggctcctcaccgaagtcaccaccaagaccttccccaccgccggccacctcgccgcctacgccggcatcgcacccgtcaccagacgatccgggagctcgatccgcggcgagcacccctcccgaagcggcaacaagatcctgaaacggaccctgttcctctccgccttcgccgccctccgcgatcccgaatcacgcgcctactacgaccgcaagatcgccgaaggcaagcgccacaatcaagctctcatcgccctcgcccgacgccgagccgacgtcctcttcgccatgctccgcgacggcaccctctaccaacgacacgactcagcagccagcctcgccgcttgacaaacgacatagggg

SEQ ID NO: 1531 - DNA, 1620 bp, unidentified
  source 1..1620: mol_type = unassigned DNA; note = element_1fac60b
  misc_feature 1..2: note = core
  misc_feature 3..280: note = LE
  misc_feature 281..1507: note = CDS
  misc_feature 1508..1620: note = RE
  misc_feature 17..303: note = bridgeRNA
ctcctaatatataagttgtagggaatacaccacctaacagccagttaggatgtttccctcttgttgctaaagctgtaagatagataagtatcggtctgacctattactccttggaccattgggcgtccgcaggaaagcctgtcagccagcttatcattacagccgttcgatttatgtaggtgggactgctatgtgcacgtccgattgagaccccaggagattgaataagcaatgaggaatgctggataccatacaatttcaactaatggaggaaacctttatgtacaacgcagtcggaattgatgcttctaaactcaaaagcaccatcactatcattcagcccgcaggagttgttattcgcaaaccctttgatgtcctacatacatctgatgagctgaacacccttgttacctatctcaagtctctggtgggtgaaaccagagccgtcattgaatgtacaggtcgttatcacgagcctgttgtcaaatctttatctgaagcaggtatttttatctctgccgtcaatccaaaactgattaagggtcaaaaacaaaatacactccgtaatgtaaaatcagatcccgctgatgcgagaaaaatcgctaagtatgctcttgacaactgggcagaactgcgtgaatattcaagtatggatactacaagagaacaacttaaaacactaaattcgcagttcactttcttcatgaaacagaaagttgctgccaaaaccaatcttatttcactcctagataatacttatcccggtgtgaacaaactcttcgacagccccactagagacgatggtagtgaaaagtgggttgattatgcctattctttttggcatgttgattgtgttcgcaaaattgggctaaaagcctttacagaacgctatgaagcattctgcaagaagcatcattataactaccagaaaaataagccagccttactattcgaagaatccaaacaacttgttgcagtgttcccaaaggaaaaatcttacaaactccttattcagcaaagcattcaacagttgcgtttggcatcggaacacatcgaaatcattcgtaaagaaatgaatgagcttgcttctacactgcccgaatacgaaaccgtaatgagcatgtacggtgttggtgaaacctatggacctcagttgattgctgaaatcggggatgtatctcgttttacacatcgagaagctatcactgcatttgccggtgttgatcctggtgtaaatgaatctggacaattcaagcaacgaagcaaccgtgcttcaaagaacggttctacaaggcttaggaagaccctttttcaagtgatgtccacataccttcaaaacaagcctgtaaacgaacctgtctatcagttccttgatagaaaacgcgctgaaggaaaaccataccttgtttacatgaccgctggtgccaataaattcttacgaatctactatggcaaggttaaggagtgcttacgcaacttagagcaatctcaaatcgaagagtcttaaatatcaaacgattatcacctccgttaagctagccgttttgggtagcctatttcttgtacctatttttcaactcttaaatttcttcaaaaagtacttgactttttattagtagg

SEQ ID NO: 1532 - DNA, 1219 bp, unidentified
  source 1..1219: mol_type = unassigned DNA; note = element_1fb68eb
  misc_feature 1..2: note = core
  misc_feature 3..247: note = LE
  misc_feature 248..1204: note = CDS
  misc_feature 1205..1219: note = RE
  misc_feature 31..239: note = bridgeRNA
cttgtatggtttagctcccatcaaccaacctgtaagaaagggcgaggagccgggatgcagggacatcgacaagcatcggcagttgcttcagatccaactgaccgacctactgagtcattaccccatccctgcgccgagcgtcgataaggaacctgacgagggcaagctgcgcttggcagcaccgatcgtcaattcttgcaagctcacgccgacagcaggacacatcccggcgctcgtattttgagcgatgaaccctcaacaagctactgagtttgtcggcgtggatgtcgccagcgcccatctggacgtggccgcgcagggccaggccagcgtgcgccggtttgccaatacaccccagggcattgccctgctgctgcgcacgttgcgccccgcaagcgtactggcgctggagtccaccggccgctaccacgtgccgcttgcgctggcagcgcacgccgcaggcctgcgtgtctatgtcctcaatccgctggatgcacgccgctacgcccagtcggtgggtcagcgcggcaagaccgatcggatggatgcgctcgtgctggcacgctatatctgccacgaacatgcgcatttgcagcagtggcagccacccaccgcttgccaagccgtgttgcgcgagctcctcgcacaccgggcaactctggtgcgtcagcgcagcgcactggctcaagccggctgccacagcaagacgcttgcacgcctggacgagccagtgctggcggccttgcaacaagccatcaaacatgtcgatgggcaaatagaaactaccctgcgggctgatctcagcagccaccaagcgtttgaacacatcacctccgtgcccggcctggggctggtttgtggcgctttgctggtgatgctgtttgggcggatgcaaggcggcagtgctgatgcggtcatcgcatttaccgggctggaccctcgccccaacgactctggcaagaaaacggggcaaaggcgcttgtccaagaggggctggccagagatcaggcgcttgatgtacgcagcagccatgtcggcggcgcgcacgaagacgtggaacggctattactgtgctcagcgtgacaaaggcttgagcacgaccgctgcacttgtcgtgcttgcccgtaagctcttgcgtgtggctttctcactgttcaagcagcaagctctgttcgatcccgcgctggtcgctggcagagcttgacgggaaccatagaac

SEQ ID NO: 1533 - DNA, 1370 bp, unidentified
  source 1..1370: mol_type = unassigned DNA; note = element_1fbd82d
  misc_feature 1..2: note = core
  misc_feature 3..77: note = LE
  misc_feature 78..1103: note = CDS
  misc_feature 1104..1370: note = RE
  misc_feature 1136..1367: note = bridgeRNA
ttaatgagatggtcagcctgaccgaaacagcccgatcggcttacgctgatcgggctgtttccttatgggagatcgtcatggacaccatctcgttgattggaatcgatcttggcaagcattgcttccacctgcacgcacagtccgcatcgggccacatggtgttgcgcaagaagctgacgcgcaaccagatgttcacactgcttgcccgtgttccgagctgcacggtggtcatggaagcctgtgccggcgctcactgggtcgcccgtcgcctccaggaacttgggcactacccgaagctgatatccccgcagttcgtccaacctttcgtgcaaggcaacaagaatgacttcgccgacgcgcaagcgatctgcgaggccgcgtcacgtcccagcatgcggttcgtcagtccgcgcaacgaggtgcagcagacgatctcagcgctgcatcgggtacgcgaagcgctggtgcgcgaccgtaccggcacgatcaaccagattcatgcctttctactcgaattcggcgtgagcctgcccaaggggatgggcgtcatccgccgacttcctgccgtgctggcctcgcatgatctgccgccgcgactagtcgcgctgctcgagcgtctgcaggcacatttcaagtacctcgacgaacaagtcgcgcaactcgaaagcgaattgatccggcaactgcgggaggacgaacgcagccagcgcctgttggagattcccggcatcggcccaatcacggccagcgtgctggcaaccgaattgggcgacgcccaccagttcgcttgcgctcgccagttcgccgcatccatcgggctggttccacgccaatacagtaccggcggcaagcccacgctgctgggaatcagcaagcgcggcgataagaatttgaggcgactgttagtccagtgcgcgagagcgctcatgctgcacatcgagcggcacgccgatcgcctgggggcctgggtccgcgacctgctggcccgacggcattccaacgtggtcgcttgtgcgttggccaacaaattggcgaggatcgcctgggccatcctcgcccgcggaacacactaccaaagtgctcaggctgtggcagcagcctgactgtgcgccgcctacgttactccttctgacccaggtcacttcctggttttgcgacgagagatacgtgaagacataaacggctcaacggccgagcaagcaacctggcaaagcaaatagtattccgatactgcggctttttttaaggtttgcccggcgcggctctcatcatggggcgggaacctgttcccacaacgaccccggatagatttgcgcaagcccaatttacgtcaacaccacctcgcttgcaaaagtcaggctgaccataga

SEQ ID NO: 1534 - DNA, 1496 bp, unidentified
  source 1..1496: mol_type = unassigned DNA; note = element_1fc74e7
  misc_feature 1..4: note = core
  misc_feature 5..241: note = LE
  misc_feature 242..1480: note = CDS
  misc_feature 1481..1496: note = RE
gtcactggtgaacactccttgatgcgggccctgagagggtgctcgttgtagggactcggcgggagccggggtgacggccttcgtcggtcgccgttcgacggccacgatgacactgccgcccccggttctcgcggggctgtaaaccggcaacagagggacgcgccgcagagcgccagtcagtgaccgcccggtgatcggcctcctcgccgagtcgtcgctgccgttgtgaggagttgttgagttgtccctgcccgaatgcgatttctacgtcggtatcgattgggccgcccaaacgcacgccgtgtgtgtgcaggacgcggccgggaagatcaccgcgcagttcacgatcgagcacaccgccgacggtttcgcgaccctgttggcccgcctgggtcggttggccagcgacccgatgcaggtcagcgtcgccctggaacggcccgacggtcggctggtcgacgccctgctcgaggctggctacccggtggtgccggtcagcccgaacgcgatcaagacctggcgcgacggtgaggtgctctccggcgccaagtccgacgccggcgacgccgccgtcatcgccgagtacctgcggttgcggtcgcaccggctgcggccggccaccccgttcaccgcgcagaccaaggcggttcggacggtcgtgcgcacccgcgatgacatcgtggccatgcggaccgccacggcgaaccagctgaccgccctgctcgatgcccactggcccggcgccaccaaggttttcgccgatatcgagtcgccgatcgcgttggagttcctgacccggtacccgaccgccaaacacgccgcgggcctgggtgagaagcgcatggccgcgttctgcgtcaagcacggctactccggtcgccgctcggccgcggagctgctgacccggctgcgggctgcgccggccggcaccaccgacccggacctggtcgaggccgtccgggacgccgtgctggcgctggtggccgtgctgcgcaccctcggcgcggtccgcaaggacctggaccggtcggtgaccgcccatctcggggagcacccggacgccgcgatcttcacgtcgctgccaaggtcgggtcagatcaacgccgcccaggtgctcgccgagtggggcgattcccgccaagcctacgactcgcccgacgccgtcgcggcattggcaggcctgacgccggtcaccaaagcgtccgggaaataccacgccgtgcatttccgctgggcctgcaacaaagggttccgcaaagcgatgaccacgttcgccgacaacagtcgccaccagagcccatgggcggccgacgtataccgacgagccatccaacgcggacacgaccacccgcacgccgtccgggtgctggctcgcgcctgggtgcacgtcatctaccgctgctggctcgaccggcagccttacgacccggcccggcacgggaacgcgatcaagatcaacaacggccaaattgcggcctgaggttgacacagagggt

SEQ ID NO: 1535 - DNA, 1368 bp, unidentified
  source 1..1368: mol_type = unassigned DNA; note = element_1fd09aa
  misc_feature 1..2: note = core
  misc_feature 3..79: note = LE
  misc_feature 80..1123: note = CDS
  misc_feature 1124..1368: note = RE
  misc_feature 1101..1355: note = bridgeRNA
tgttggtgtggacggcctccgatcgagcttcgcagtgtgcgaaagtcaaattggagattttttgcaaaggaaccgtcccatggagtacatcacaagaattggtatggatacgtccaagcatctcttccaactacatggcgttgacgccgaggaaaacgtcgtgttgcggcgccaggttcggcgctcgcagatgttgacgttctttcaaaaacttccgccgaccgtcattggtatcgaagcatgtggcgcctcacatcactgggcgcgaatgctgcaatcccttggccacgaggtcagacttcttccgccccaatacgtaaagccgtacgtaaaacggaataagaatgatgccgccgatgccgcagcagtttgcgaggcgatgagccgaccacatatgcgatttgttcctgtgaagacaaaggacaatcaggcagtgctgatgctgttgggggttcgtgagcgacttttgcgggttcgcactcagctcagtaatgcgatccgaggatatgcagccgagttcggcctgacagtagggagaggcatatccaggcttgagcatctgttcgagcggattgcgggagatacctccctacccgccttggcgcgggagctcttcagcttgcatgcgcaggaatatcgggatctgcagatgcggattgctgaaatcgaagacaggcttgatgattggcgtcacgagaacgagaaagtccgccgattaacgaaggttccgggcatcggccccatcggtgcttcattgctggtgatgaagactcctgatcccgagtgcttccgatctggccgtgattttgcagcgtggattgggttaacacccaaagatcattcaagcggcggcaaaaggcgtctgggcgggatcacgcacgcgggcgacgaagccttgcgaagtgtactagtcgcgggggctacaaatttaatccgatacgcgcgtctcggccgaggtcaagtatcgccatggctcgcagctctaatcaaacgcaaacctcccatgctggcggctgtcgcattggccaacaagatggcccgcattgcctggaagctcctcgttagtggtgaagcctatgcgcaatcgtcgaactcgcgccagttatcagcgcaacccgggtagctcctgacccgtcgcttacaaatattgcagtggatagatagatggtgtgatcgatcgatccgagacggaagacattccgaatgtcgcataggctgccacaagccgcccaagtgttaggaactttcgtcgcggaaaccatcttggccagcggtcctatgctgccgcatgaacaggccggacatatgatcgcaagcgatccgatcacataacttttatccccttgcgaggcggaggccgtccacata

SEQ ID NO: 1536 - DNA, 1373 bp, unidentified
  source 1..1373: mol_type = unassigned DNA; note = element_1fd2090
  misc_feature 1..3: note = core
  misc_feature 4..71: note = LE
  misc_feature 72..1112: note = CDS
  misc_feature 1113..1373: note = RE
  misc_feature 1114..1363: note = bridgeRNA
ttatgggatggcccgcccctctcgcggcgatcgggtagtatcgccgctggtttggagagaggagcagaccgatggatatcgtgattgtcggcatcgatcttggcaagaactcttgcagcgtggtgggcatggacgccgccggccgggttgttttgaggcggagacttcggcggggaacgttggaaagtttcgttggcgagcttgggtcgtgcattgtggcaatggaagcatgttgcggcgctcatcacctcgggcggattttcgccgcgcggggccacgaggtgcggctgatgtcgccggaatatgtccgtccgtacgtgaaggcgcagaagaacgatgatctcgacgcggaggcgatcgcagaggctgcgacgcggccaacgatgcgtttcgtgccggtgaagagccaggaccaatctgatctccaggctttgcaccgagcccgggagcgcctggtctcggaacggacggcgctgatcaatcacttgcgggcgttgctgctggagcgagggatcgtcgttccgcaaggccggaggaaactggaagccgagcttgagacattggccgaagatggcggttttgccgcgttgagcccgcgcatccggacgttgatcgaagatcttcgggcggaatggcgttcactcgaccagaggatcaccggcttcgacgccgagttcgttcagttggctcgtgacgacgtggctgtgcgacgtttgaccaaaatcccaggaatgggaacgataaacgctacggcgctggcggcggcggtcggcgaggcgcaggcattcaaacgtgggcgggacatggcggcgtggctggggctcgttccacggcaaatgacaacgggtggaaaaccgcgcctgctcggcatcagcaaacgcggcaatcgttatttgcggaagaacttgatccatggcgcacgagcggcgctgccttatcttgtcgaacgcgatacaccgttgggccgctgggcgcggggattgctcgatcgagcgcataagaacgtggtcgtagtcgcgctggccgcgaagctggctcggatcgcatgggccgttttggcgcacggttgcgattacgacgcccaattcgaagcggcggctgcggccgcatgacggaatcgcccgaacagcgctcatagttgggcgcgaaagggcagtcgatgtctgcgtgaggtgaaaggaagatggcctgacagtcgaacggcggcttgaaaacctgacccagtgaacggcctccgaggccggtgtgattatgaggatcaggccgcgcggatctccatcttggccgggttcgaagcccgagaccggatacgttgaagcagactgattagagccagatgaaaatcaccccttgcggacggggcgggccatacg

SEQ ID NO: 1537 - DNA, 1499 bp, unidentified
  source 1..1499: mol_type = unassigned DNA; note = element_1fd2d55
  misc_feature 1..2: note = core
  misc_feature 3..243: note = LE
  misc_feature 244..1479: note = CDS
  misc_feature 1480..1499: note = RE
ctaataagagttaacgggtcggcctacggcagactcggagtgtggtggccgccggcaggtgagcactccgttgtcccgggcttcgagccctggggttagatcgtgtccctgccggctgccgggagagttgatcgctgctgggatgtcgtgcccgccgggtggtgtgagcactggttttattaggtcgccgatagttctcccgctggctgccgccgtgttccggttttggtggcgggagggctgatgcggctgtttgtaggtgatgactgggcggaggaccatcacgacgtcgaggtgatggacgaggcggggacggtgctggtcaggaagcggctgccggagggtgcgggcggcatggcccggctgcatgccctggtcgggggcctgctgggcgaggacgccgatgacagtgaggtgctggtcgggatcgagaccgatcacgggccgtgggtgatggcgctgctcgcggccgggtaccgggtctacccggtgaacccgcagcagtcggcgcggttccgggcccggcactgggtgtcgggggccaagagcgacgccggggacgcgcacgtgctcgcggacatggtgcgcaccgactcccaccagctccgcgaggcggctggggactccgcggaggcggcgggcatcaaggtcctggcgcgcacgcacaagacgatgatctgggagcggacccgggaggtgcagcggctgcggcaccagctgctggagtacttccccgctgcgctggaggccttcggggacctggacgccccggacgtgctcgagctgctggcgaaggcgccggacccgcagcgggcccggaagctgactcgcgcccaggtgtcggcggcgctgaagcgggcccggcggcggaacatcccggacaaggccaccgcgatcctggcagcgctgcgcggcgagcagctcgcccagcccgccgcgcttaccgccgcctacgccgccaccgtccggtccctcatcgcggtgatcgccgcgctgaacgagcaggtcacggtgctggaagagcaggtgagggagcattttggccggcacccggacgctgagatcatcttgtcccagcctgggatgggagccatcctcggcgcccgggtgctcgcagagttcggcgacgaccccggccgctaccgcgacggcaaggcccgccgcaactacgccgcgaccagcccgatcacccgtgcttccgggaagaggaaaatcgtcgccgcgcggttcgtgcacaacgaccggctcgtcgacgccctcaacgcccaggccttcaccgccctcaccgcctccccgggcgcccgcgcttactacgacgagctccgcacccgcggaatcagccacaacgacgccctcagaagactcgccaaccggctcgtcggcatccttcacggatgcctcaagacccgcaccctctacgacgaggaaaccgcctggggccaccgccaaaaccagccccaatcacccgcagccgcttgacatcaaaacccctgggatgt

SEQ ID NO: 1538 - DNA, 1373 bp, unidentified
  source 1..1373: mol_type = unassigned DNA; note = element_1fd8334
  misc_feature 1..4: note = core
  misc_feature 5..262: note = LE
  misc_feature 263..1363: note = CDS
  misc_feature 1364..1373: note = RE
ctcactggtgcaccatccttgagtcagtgatcgtgtggtcgctgatgcgcctgaggtgctgtcgggtcatcgccctgctcgcttgacgcggttgatgtccactgtgagatttgcgagatccgacggtcacccgggacgtgtggaccgtcgacagggctgagcgcctacgagcgccgatcagtgagcgaaccggcagctgcgtcccggaaccatcagcacgtgaaggcgcctccccactgggactagcagcgaggaggctgacgtgaagtctgccagcaacaccccgaacgtcgcatcgcccagaaccgcggccgtgctgccggacgagccgccgggtggggtgacggccgggctggactgggctcgtgacgatcacgccgtggcggtcgtcgacgagcgtggccgtgaacgtgtccggcaccgtgtcgagcacagcgccgccgggctgcgagagctgatcgagaccgtgcgcggcgccggctgcggtgaagtcgcgatcgaacgccccgacggcccggtcgtcgacgcgttgttcgccgccggattgacggtggtggtgatcagcccgaaccaggtcaagaacctgcgcggccgctacggctcggccggcaacaaggacgaccggttcgacgcctacgtactggccgacaccctgcgcaccgaccgcgcccggctgcgcccactcgtgcccgacactgcgcagacgatctcgctgcgccgtgcggtacgtgcccgcaaagacctcgtctcccaccgcgtcggtgtggccaaccagctgcgcgcgcacctgcgcaacgccttccccggcgccgtgggcttgttcgccgagatcgattccccgatcagcctggcgttcttgacccgcttcgacacccaagaccgcgccgactggctctcccccaagcggctggcggcatggctgagcagcgtcggctacagcggccgcagcgacccggccgtcctgcacaccgggcgcgtgcgcgcagcccggctgctcgccgagatcggcgactgccgagcgaagttccccaccccggaatcgctggcctgcctggccggcgccgcaccctccacccgccagtccggcaagctgcgcaccgtcggattccgctggtcctgcgacaaacaactccgcgacgccgtgatcgacttcgccgccgactctcgccgaacccacccctgggccgctgacctctacaaccgagcccgcgcacgcggccacaaccacccacacgccgcccgcatcctggcccgcgcctggctctacgtcatctggcactgctggcaaaacaacctcgcctacgaccccacccaacacggagccctgcaacgcctcctgcaagatcaacaagcggcagcttgacacagggctt

SEQ ID NO: 1539 - DNA, 1419 bp, unidentified
  source 1..1419: mol_type = unassigned DNA; note = element_1fda3ef
  misc_feature 1: note = core
  misc_feature 2..80: note = LE
  misc_feature 81..1112: note = CDS
  misc_feature 1113..1419: note = RE
  misc_feature 1189..1410: note = bridgeRNA
taatgagatggtccgccgcttgatttgcctgcgcgagcaggttgatcgtagaggtagctctgacaaggaggatcatcgacatgcagatacattccgttggcatcgacctgggcaagacgaactttcacctggtagctctcggcgaagcaggcaaggtgctcgtccggaagaagttctcacagcggcagttgctgacgtacactgcgaacctgcagacgtgtttgatcggactcgaggcctgttccggggcgcatttcctcggacgtgccttgcgaaggcaaggccatgaggtgcggctgatcgcagcccagttcgtcaagcctttcgtgaagtcgaacaagaacgactttgtggatgcggaagccatcgccgaagcagtcgagcgcaagaacatgcgctttgtcccgatcaagacggacgatcagctggacctgcaggccatccatcgcgttcgtgaccggctgatctgccgacggacagccgtcatcaaccagctgcgggcctttctgctcgaacgtggcatgaccttcgcgaagacaccggccaagctgagaagcgccatgccggacatcctcgagaacgcagaggccgacctgacaccgctgatgcgcaacctgatcgacatgctgtggcgtgagtggaagaccgtcgagcagcagatcgaggaactcagcgacgaactggaacggatctctgccgcggacgccggctgcacccgtatccggcagatcccagggatcgggccgattgtcgctacggccatcgtcgccgcgatcggcaacggcgctgcctttcgcaagggccgagacttcgctgcctggctcggcgttgtgccgcggcagtactcgactggaggtaaggcgaagttgctcggcatcagcaagcgcggcaacgtctatctacgcaagattcttattcacggtgcgcgagcggctgtgctgcgcatcaagcgggatcgtgcaccgattggagcctggctggacggactggatgccagagctcctaaaaacgtcgtcgtggtcgccatggccaacaagcttgcgcggattgcctgggcggtgctgtcgagcgggcaagactacaggccatctctcaacgtgattgcagcatagagcagcgcggaaagacgcctgcggcttggaagcgctaacgcgctcccactttatccactgcgacgattaagagttcacccaccaaggtctgcacaggaacagcaaagacgaaagaacagtcacaacggcgtgcccacaacctgtgctcaagaatggtcgttgaagaccgttccctttataaggaagggcacgcgcgcaactcatcatggccaggagagactatctccactaaaggccgcatacatttgcgcagacttgtcttctcgttccacagcttttcccttgcagtcgcgcggcggaccataca

SEQ ID NO: 1540 - DNA, 1439 bp, unidentified
  source 1..1439: mol_type = unassigned DNA; note = element_1fde3dc
  misc_feature 1..2: note = core
  misc_feature 3..226: note = LE
  misc_feature 227..1423: note = CDS
  misc_feature 1424..1439: note = RE
  misc_feature 10..222: note = bridgeRNA
gctctaccttcctgcgtgggtcgtcccagccattcgtagggttgtggcacccaggggagctgggtgtggctttcatgcctgtgccgttggtggctctggaggcttggccgcccggctccccacgacgactcggccgccgattgggaagtgcgagaaggtcgctgtgtagagcaatgccggcgaggtcgtccgtggtacacgagcaggcacgacctctgggagcacgatgcgccggatatgggccgggatcgactgcggcaaaacgcaccaccactgtgtggtcgtcgatgccgaaagcaagactctgctgtcgcggcgagtggccaatgacgaggaggaactcctcaaactgctgggcgatgttctcgccctcgtcgacgacagccaagcgacctgggccgtcgacatgaccggcggggaaccgggcctgctgatcgcgctgctggtcaaccacggccaggaactcctctacgtgcccggccgcatcgtcaaccgcgcctccgacgcctaccgcggcgaaggaaagaccgatgcccgtgacgcccgcgtgatcgctgatcaggctcggatgcgccgcgatctccaaccggtccgcgctggtgacgaagcgaccatcgaactgaagctgctgaccggtcaccgcatcgacctggtcgccgagcgcacccgcacggtcaaccgtctccggtccacgctgacgagcatgttccccgccctggaacgcgccctggacctcaccaacgcaggaccgctggtactgattacgggctaccagacccccgcgtctctccggcggatgggccgtaaccggctggccacctggctgcgcaaccgcaaagttcggagagccgaggctctcgcggaggccgcactcaacgcggctgagcggcagcacaccgccgtcatcggcgagaaggccgtcgccaagatggtgcacaccttggcgaaggaggtgatggccctcaacgaaaaggtcgcggagatcgacaagctcatcgagggccggtttcgcgagcaccagctcgccgaggtgatcgccagcatgcccggcatcggccccctgctcggggcagagttccttgccgctatcggcggcgacctgagcgccttccccactccagacagcctcgcagccttcgccggcctggccccggcaccgcgcgactccggcaagaccagcgggaacctgcgcagacctcagaggtaccaccggcggcttcagcgcgtcttctacacatccgcgctcttcagcatccgaagcgatcccaactcccgtcagttctacgaccgcaagagggcggaggggaggcgacacatccaggttgtgctcgccctggctcgccgccgcgtcaacgtgatctgggctctgattcgtgacagacggtcctatcaagtcacacctcctgtcgccgtcgcggcttgacatcaggcattgggaa

SEQ ID NO: 1541 - DNA, 1395 bp, unidentified
  source 1..1395: mol_type = unassigned DNA; note = element_1fed8cd
  misc_feature 1: note = core
  misc_feature 2..90: note = LE
  misc_feature 91..1119: note = CDS
  misc_feature 1120..1395: note = RE
  misc_feature 1164..1387: note = bridgeRNA
taatggaatggtcgcccctacccgaaacggcatctaaagtgtcaaagtgtggcgaattgaaattcccactgactgagagaggcgaccaaaatggaaattacgacgattggcattgatctgtcaaagaacgtgtttcagatccatggcgtggatcatcgcggcaagacggcgctgaagaagcaactgaagcgagagcagatgttgccgtatttcgccaatttcccgagctgcctaatcggtattgaagcatgcggaagtgcccattattgggcgaggaagctcactgctttggggcacacggtgaagctgattgcaccccaattcgtcaaaccctacgtcaagacgaacaagaacgatgcggccgatgctgaagcgatctgtgaagcagtgagccgaccgaatatgcgcttcgtgccaatcaagaatggcgagcagcaggcaattctcgcgcagcatcgcgcccgacaaggcttcgtcaaagcgaggacggcacaggccaaccagattcgaggtttgcttgccgaatatgggattgtgattcctaaggggattggtcatatcggcaaacgcctgccggaaattctggaagatggggagaacgagttgcccggcatctttcggcaactgattgatcgtttggggtcgaaccttaaagaactcgatcggcaagtcaaggaattggaagcccagattcaaacctggcatcgaaacagcgtcgacagcaagaaattggctcagattcccgggataggtccgatttcggccagcgccctcgtggcttcgattggggatgccaaaaatttcaaggatggccggcaattggctgcctggctcggattggtgccaagacaacattccaccggaggcaagccaacgctacttggcatcagcaagcgcggggactgctatctacggaccttgctgattcatggcgctcgttcggtagtcagagttgtcgagcaacaagccaaccatgctaaccagtggttggcggggcttatgaggcgtcggaacaagaacgtcgccgcagtggcattggccaacaaaaatgcccgaatcatctgggctctcctgacccagaatcgcgaatattcagccgcgtacgggctagccgtttgaacatggtgtagcactgctacggacgcaactttcaagaggagaacccaccgattgcacaggcaatcaagacgtgatggcaagacaggtcagaccggggtcgatgtaacctgcaactcacacagcacttcgagtgcgagatagtgtagaggcatcgaccagcatattccatcagggaccaggggctgtagcctcgatcagagtccggatctatggctgcaatctccaccttcttaacatcatcgattgagtgcttggcaaaacgggggcgaccatcta

SEQ ID NO: 1542 - DNA, 1289 bp, unidentified
  source 1..1289: mol_type = unassigned DNA; note = element_1fefaf3
  misc_feature 1..2: note = core
  misc_feature 3..187: note = LE
  misc_feature 188..1186: note = CDS
  misc_feature 1187..1289: note = RE
  misc_feature 28..200: note = bridgeRNA
cttgtgtctgcaaaatctgccagaatgtgcgaacgggcggttctgaccaaccgcccgtcgctggatctgagcccgaagtgctcaaaggtctcgaacctgtcgagggagcgagggacagatccggtggtcttcctcaacccgaacagttgcatgggctatgagcccgaacgagcaaggaagggaatggatgatggcacaaaacgatctgattgtcgtcgggcttgatgtggccaaggataaggtggatgcgtgcattcgctcattgtcgcagcggcagacgtttgcgagcacggcggagggacggcgggcgctgatccgctggctgcgcaggcacaaggtcagcaaggcagcgatggaagcttccggcggctacgagcgggactgggccagggccctgcgcgaggccggcatcgaagccctgatcgtcgacccgaagcgggttcgcagcttcgcccggtcggccggacggctcgccaagaacgacccgatcgatgcggagatgatcgcctggttcgccgagacctttgtcgaggcaaagggccaagcctacgacgcgacgcgtgagaagctggctcagattgtgaatgcgcgccaagtcttgctcaatgtgagaacgagcctgcggaacaggggcgagcattgcgcaccagaggtcgtgcagaaaatgcaggtacggctcttgaaggacatcgccctcgaaattgccaggctcgaggctgcgatcgcaggcttgatcaaggcgacaccgcactttaccgagctcgccgagatcatcgagagcgtgccggggcttgccgaggtcacctctgccggcctgatcgcggcgatgccggagctcggccagatgggcaacaatgccgccgcggcgctgttgggtgcggctccctacgataacgacagcggcaaacgtcggggcgagcgccatatccagggcgggcggcgcagggtccgcaatctgttctacatggcctgcatgggggctgcgacccggcacaacccggtgctcaaggccttctatgatcgcctgatcgcgaaggggaagccgaagaaggttgccatcgttgcctgcatgcgcaagctgatcgtcatcctcaacgtcatgatcgcgcgcggtgagaaatgggatgtgacccggtacaaagagagcgagcccgctcggcttctgccgagcgtatgcgcggcctaaagaccggtgagcggacggggtcaaggccggcagccgccgcaggcggtggcgcgcagcgccagccttgaggccggccgatcgccggtctacttcaacacagttg

SEQ ID NO: 1543 - DNA, 1440 bp, unidentified
  source 1..1440: mol_type = unassigned DNA; note = element_20035fc
  misc_feature 1..2: note = core
  misc_feature 3..230: note = LE
  misc_feature 231..1433: note = CDS
  misc_feature 1434..1440: note = RE
ctcctaccatgaattcatatatagaatgatgtataatggatttgtagtatttatggaaaggcgggaagacttattccttcctgggcataagagcccttattacagtatgtcccaagcctctatgaatcataataggttggttggatcattgaatccttgtaacattggaggattggtctggaggctacgtcacctgcttttcaattattcttttgtgaggaggtgattttatgacgggattaaaagataacgttggtagttttgtcggtatagatatttccaaggataagtttgatgcttgtgggataacaggggaagaggcaaatctctttcagttttcagcaactatggatcggaagggttttgagaaactgaagggacatcttggtgctatttctgtgtcatccgttttaatcgggatggagtccacggcctcatatcatgtgaatctcttctcttacctggtttctgagggttacagggtcattctcatcaatcctttgctgatttccaattacgtgaagatgcagctcaggaagaccaaaacggataagaaggatgctgttgtcattgcccagtttcttcttgcaaatggggctacattgaatcaacgggtgactccgtctttgatttctgatcttcgtgatctttcccgtcagcgggagagcctggttgatgagatgacatctctgaagatcgagatcaagcaactcctgaatatcacctttccggaacttgagcatatggtagggatatttacaaaatctattattaaacttttgcagcaatacccttcggcatttgcgcttagagatgcggatcttaatcaattgtctcagaccttgattacggattcctatggtcataaaaaagaggagtttgcaaaaaagctaataaaggcagctctttcgtcgattggcaccaacagtcccgccaaagaaataattattaaacagaagataggattttttctacaccttgaagaagcccttcaggaaataaccaccatcctcgtagatatggcccgaaagctgatggaagaagacataaacatcatgacttccataaaaggcatcggagataaaactgccgccaattttctcgttgagatgggtggtgacatcaatcagtttgaacgttccggcaaaatcattgccatggcgggattggatcctgctgtttaccaatccggtaaacatgaaggcaaaggccggataacaaaacgtggtaaccgtcatctgcggaagatcatctggatgatgacaactaaagctatccaatacagtgaaattttcaaggattattatctcaagcgaagaaaggagggattgccttacaaaaaggctgttttagctactgctcataagttgatccgtgtcatttatgccatgctgacacaaagaacaactttttgtccgcaggtaaattcatgatagttga

SEQ ID NO: 1544 - DNA, 1691 bp, unidentified
  source 1..1691: mol_type = unassigned DNA; note = element_201a03a
  misc_feature 1..3: note = core
  misc_feature 4..239: note = LE
  misc_feature 240..1445: note = CDS
  misc_feature 1446..1691: note = RE
  misc_feature 54..228: note = bridgeRNA
cttatacgttaaactaaaaccaagccctcttgagggagggtctcagcagggttatacttgctagatgaggacaaccagggaaaggctctttcctcctcacggctcgaccgattaaaaaagatcgctcttccctggcaggttcctggaccagattgaccattagagggttgtgcttcgagcaccgaggtataaggacacaagggtccaggatatccttcgtttgagaaaggagtaatcccatgtggtatgctggactggactgggctgactctcatcatgatgtcgtggtgattgatgatggaggtcgccaagtcgcctcgcgtcgcgtggcccatagtgcccaagggctggccgaactgaccgcgtttttgcgtcagattgccccacttgatcagattgcttgcatcgtcgaaaccaatcaaggtctcctcatttcgacattgctggaagcaggatgcacgctctatcccgtcaatcccaagacgattgatcgccgccgcaacgcttctggagccaagacggacttgattgatgcctacctgttggcgaaaacagggcgaagtgatctgcgggatctgaggaaattgactcctgatagtgccattatccaggaactgaaagctctgactcgcgatcaagatagcttggtgcagagtcaaacgcggctggtcaatcagctgactgcctgcctgaaagcctactatccggtcgcattgcagctcttcagcaaattgcagcaacgctctaccctgatcttcttgcagacctatccaacgcttgaggcagcgcgacaggcttcggtcgaggaaatcacgagcgtcctcaaagaggtcggacaccccaagcccagcaaagtcgctccaaagattcgtgagacactgcatcagccccagttgcatgctaatgcgattaccacgcgcaccaagtcgcgactgatgttggctttggcagcccagctcttgccgctcatcgagcagatcgcttcctacgacaagcagattaccgccctttttttgacccatgcagaccatgagatcttcagcagtcttccgggagcgggaaagcgtctggctcctcgcctgcttgcggaatggggggatgatcgcacgcgctacactgcaagtacgagtgtccaggctctggctggaacggctcccgttgccttccaaagtggcaattatgccaaagcccataagcgctatgcctgcttgaagccgctgcgcaatgtgctgcatcaattggcctggcagtccaccaagcaagaagcctgggcactgacgtattacaaacgcaagcgagctgagggcaagagtcatagtatggctgtgcgttcgcttgccaatgtctgggtgcgcatcatctacgccatgtggtttgagcacaaaagctataagacggcgacctttgaggctgcacaacaccaccatgctaagagagccgcttagaaacctgtaatcaggtgacagacgtttcagacaaacaaaaaagcctgctgtttttttgttttcaacttggcatgcccaaaaaagaccacgcaagcgagaggctgtcaaggaaagcgaagcggcttgacagccgtgagcggcgtggtacactttctcatgcctcgttgaaaacatttctcctcctctttttcccagtttttttctcttgctacaaattggtcgtcttaggacttgacaatagagggt

SEQ ID NO: 1545 - DNA, 1557 bp, unidentified
  source 1..1557: mol_type = unassigned DNA; note = element_201be81
  misc_feature 1..2: note = core
  misc_feature 3..264: note = LE
  misc_feature 265..1428: note = CDS
  misc_feature 1429..1557: note = RE
  misc_feature 3..243: note = bridgeRNA
cttgtatgatgatttcagaagctaaatcaacattttcctttctttttcaaactgtggttcaatacattcagatactgtgggacttttaattgttttctgtagctttgactacttaataggagtgtattgccgctgcctttatctgaattgtttatcatctggatgtgccggagaacttctcctgagtacttatttcaatcaagtctacgatgataatcgctggtggatgccacagtatccggaaaccgaaaggagggtttcactatgtactatgcaggcatcgatattgccaaactcaatcactttgcctctgtcgtttcagcagatggtgaagtactcgttaagccgttcaaatttacaaatgacaatgatggcttctgcaggctgctttccgcgctcgcatcatacgatcgcagcagcctcatcattggtcttgaatcaacggcacactatgctgacaacctggttgaattcctcgtatctaaacgctaccaggtctgcgtcatcaacccgatccagacttccacgatgcgtaagaacaacatccggaagaccaagaccgacaaggtggatacgttagttattgccagaacgttaattactcagccgcatagattcttctcgcaggaggatatcgacctcatgcacttcaagaatctcggccgtttccggcagaagagcatcaaggagcggaccaggcttaagatccagctcactgcttacgttgaccgggttttcccggagctgcagtatttcttcaaatccggacttcatcagaaggccgtttatgcccttctgaaagaggctcctacacctgaactgattgcttccatgcacttgactcatcttgtgcacctgctcgaagttgcctcccatggtcacttcaataaagagcaggccaaagaattaagaattctggcacagaagtctgtcggttccagcgacagagccctatccttacaagtaacacagtctgtggagcagattgaattactggacaggcaggtcaaggatatcgaatcacagatgaccgaaatcatgctcggactcgattccgtaataatgaccatccccggcattggttatgtcaatggcggtatgatcctgggcgagattggcgatattcatcgcttccaaaagccctgtcagctgcttgcatttgccggactggatccttccgtatatcagtctggtaatttcaatgccagccacactagaatgtctaaacgtggctcccgggttctccggtatgcattgataaatgcagctcacaacgtggtgaaaaataactcgacatttaaagcgtattatgatgccaaaatagccgagggccggacgcactacaatgcccttgggcattgtgccggcaaactcgtcagggtcatctttaagctgcttactgacgatgtggcattcaacctcgagtaagttctaacccgagatcatagtggattttgaaaagcacctttaagggagctctattaaagttaccctattatagccacagaacaaaaagataattttctgctaatttatacttgacttttcatagctggt

SEQ ID NO: 1546 - DNA, 1210 bp, unidentified
  source 1..1210: mol_type = unassigned DNA; note = element_2024963
  misc_feature 1..2: note = core
  misc_feature 3..187: note = LE
  misc_feature 188..1207: note = CDS
  misc_feature 1208..1210: note = RE
  misc_feature 43..206: note = bridgeRNA
tcctttagacttgtattgttatttttagagtagtataaaccaagaaaagagagctgaacttaggtacactaaaggcgctcagaacaaattagttcatccttcgattcagacctaagttcaggctttcatcaacaatctctaatagaaattcgggatctaagcccattattaaggagttgagttattgatgaaatccctcttatctacaaagtatcacaaatttatgaaaagtatttatgtaggtatcgacattagtaaaaacacgttagatttttgtattaaatcttcaaatgggataagctttcaaaagattgataataagattagaaacatccgtaagctactgaaaactctagttaaaatgaatgttaaggtttttatagctatggagaatactggatattataactataatctctaccaggtgttggaaagctttgattttaatgtgtatgttttagaccccaagcatatcaaaagaagtattggtcttgttcgtggtaaaaatgacaaggtggatgccaagagaatagctttttttatagaaaggaatcatcaagattttgaatgctgggaaccttgtagtgaagctgtcaaatctttaaaaatattaatgggccaacgtaaatcaaaaattaagcagcgcaaagggatcaaacagcaaatgaccgatttgagagatattgcttttaacagcagtaccagaaaactaatcaagatcaaccaaaaggcaatcaatgaactggatcgacatatcaaagaaatagagactttgatacgagctgaaattaaatcggaaccagctttaggagcacaggtcaaaaggattaagacagttccaggcataggcgatgttaccgcttggatgatcaccatcaaaacggaaggcttccaacgtttaacagatcctaggaaactggcgtgctttgcaggagtagtaccctttgagcaacagagcggcactagtctgaaaaccaaaccaagggtatcaaaaatggcagatatggccttaaagtccgtacttcagatggccgctatgcgagcggtaagaatgaaaaatgatttacaggcctattacctaagaaaagttgaggaaggtaaaaataaaatgagtgttttaaatgcggtcaggaacaagttaatacacatcgctatggcattaattaaaaatcaaacaaattataaaaaccgcttggaattgtcatagaaa

SEQ ID NO: 1547 - DNA, 1716 bp, unidentified
  source 1..1716: mol_type = unassigned DNA; note = element_202c74b
  misc_feature 1: note = core
  misc_feature 2..270: note = LE
  misc_feature 271..1488: note = CDS
  misc_feature 1489..1716: note = RE
  misc_feature 13..290: note = bridgeRNA
cctgttattatatatttgccccttgatttatggcagccggccataggcatgggacatctcattgcctaagctgttagaatagagaggtagtggtctgacattcaccgccaagggtttttacatccgtgagaaagtcagtcagccgacctcctattcacagcgttcgattttagtaggtggaaccgtgcgttcgtatcaaaaaacagattgaatcggtggtgggtaaaggtcgttgtcaaccgttacaaatacaatacaaggagttttaagatgaacgcagtaggaattgacatttccagaggtaaaagtacggtagctgttttaagaccgtttggcgaagttgttatgcttccttttgaagtgaaacacaataacgccgaactgcttgcacttgccgaacaattaaaatccattgacggagaaacccgtgttgtgatggaacatacaggacggtactatgagcctgtagccaatgctctgcacaattccggtctttttgtaagcagcgttaatccgttgttaatcaaagaatacggcggtaattcactccgtaaagtgaaaacggacaaagcagacgcacagaaaattgcacggtatactcttgacaattgggcggaattgagagattatactcctatggatacagttcgttatgatttaaaaacgcttaaccgccagttcaatttggcttcaaagcagaaaaccgcaagcgctaacaatttaattgctttacttgaacaaacctttcccggaatccgtaaatgctttaacagtccggtgcggaatgatggctcacaaaaatgggtggactttgtcattaccttttggcacgccgattgtgtgcggaagtacagcaaggaggctttcgctgagcgttaccgaaagtggtgtaagcgacacagatatttagtgcgttcaaataccgtccaagaagtatatacccttgctcaaaatgccgttgttttagttccgaaatctcaaaccgcaaaggttattattgtggaagcggcaaaacagcttacagctatttcccgttctgtagaactataccgttctgaaatgaaccgtcttgccgaaatgctgccggaatatccggttgttatgcagatgttcggcgtcggaagtaccttcggccctcagcttatagcagaaatcggtgatgtccgccgtttcgcccgtaagcaatcccttgttgcttttgccggcattgaccctgcaccgaacgattccggagacaaatacggcagaaattccggcaccaccaagcgaggttctccatatttacgcaaaactttgtttaacataatgaaatgctatcttcaaaacgcccccgaagacgaacccgtttaccaatttattgataaaaagcgttctgaaggcaagccgtactttgtatatatgactgctgctgccaacaaatttcttcgccgttattatgctaaagcaaacgaatatttagcttcctctgaaaatacaatttcggaatgaggtggctttgccacccttatttaccgtacagcactgtttcggcaggctgtcaaggacgcccttggcgcagcatagctgtttatccttgaccggctgacaaaactgtgctactgattttttgaccggctttcagggcggtctttttgtcgtgctcattttttcctcctactttgcctgcaaaaatttttgtcatttttatgattttctccttgactttttatttgtagg

SEQ ID NO: 1548 - DNA, 1325 bp, unidentified
  source 1..1325: mol_type = unassigned DNA; note = element_202ea97
  misc_feature 1: note = core
  misc_feature 2..71: note = LE
  misc_feature 72..1094: note = CDS
  misc_feature 1095..1325: note = RE
  misc_feature 1114..1297: note = bridgeRNA
atgggcacctccccaaaacggcttcagtgagccatgctgaatacatcagcaaaaatatgaagaggtgtccaatggaacaagttatcggaattgatctggcaaagcgagtatttcaattaaatattgtgtctccactcggaaaaacaattaaaaatacggtgattaagcgtgagaaactcaccgaatttattgctcaacaacctccttcaaaaatcgtgatggaggcgtgtggcagcgcaaattattggagccgccaatttaaacgctttggtcatgaggtgaagcaaatcagtccccaatatgtcgccccattcagaatgggcaacaagaatgataaaaacgatgctgtggctattgtggaagccgacagtcgtccgggaatgcgttatgtcccggaaaaaacgcaggcacaacaggatattcagtgtttgcaccgggtccgccagcggctcatgaaaaacagaacggcgctgattaatcaaatccggggactgggattagaatatggcattgccatccccgaaagcgcccacaaggttgagcaatgtttgcctgaccatctggaaaacgcggaaaatgacctgacgccattgagccgtgaattatttcaggaactcttgcgtgaactcaaagaacaacagcagcgcctgaacgtgctggataaacgcctcaaccacctgaatgcgcaacaagaagatatccgtcgtttgctaacactaccgggtatcggcccgctgggggcatcggctctgatgatagccctgggagacagcacggacttcaaaaatggccgccattttgccagctatctgggtctggtgccaagagagcatagcagtggcggcaaagtcaggttattgggtatcacgaaacgcggcgatggctatttgcggggaatactgatccatggtgcccgttcagtggtgtatcgggtgcaaaaactccccgatgaacaatgtaatggcttacaacgctggttaaaaggtgtgatagcccgcagcgggatcaataaggcggcagtggcactggcgaataaaaatgcccgaatcgcgtgggccttagtcaatcaacaatcggtttatgaagcacgatgaattaacaatacgacgtcatgatgtaatagaagtccataaattgatgtactgacaggtagtaccgactctctgtgaacctggtaaatgcctcagtttgtcgagactgttgaaataatgagggcagagagtgcggattttcatcagggctcattgaagccgaatatatgtttgcgactacgttgtcagaaaaatttactcactcacttacttgaattaagtcggtgtccatat

SEQ ID NO: 1549 - DNA, 1341 bp, unidentified
  source 1..1341: mol_type = unassigned DNA; note = element_203168e
  misc_feature 1..2: note = core
  misc_feature 3..70: note = LE
  misc_feature 71..1090: note = CDS
  misc_feature 1091..1341: note = RE
  misc_feature 1104..1338: note = bridgeRNA
ttaatgagatggtcagcccggtccgtctttagcgttacgctgaggagggatttatagaggaggccatcccatgaacgcagtcaccctcatcggtatcgaccttggcaagcacagctttcacctgcacgcgcaggaccgattgggtcggatggtgtttcgcaaaaagctttcccgccagcagctgctgcggacgctcgctaacgtgccggcctgtcgcgtggccatggaagcgtgcgcgggctcgcattggctggcacgtcggctcgccagcctgggccacgaggcacggttgatctcaccgcagttggtgcggccgttcgtggccgggaacaagaacgacttcggcgatgcccaggcgatctgcgaggctgccagtcggcccagcatgcgcttcgtgagcccgcgcaacgaagcgcagcagacggtatcggccctgcatcgcattcgggaagcgctggtccgtgatcgcaccggcacgaccaaccagattcacggcttcctgctcgagttcggcatcagcttgcccaagggggcagcgatcatccgccggctgccagcggtcttgagccaggagacgctacccgcgcgtctggtcgctctggtggagcgactgcgcgagcactgcaagtatctcgaccagcagattaagcaggtcgagcaggagttgctggcggcactgcgcgaggatgatcggagtcagcggttgctggagattcccggcatcgggccgatcaccgccagcgccctggcggtcgaactgggcgatgcgcggcagtttgccaatgcgcgacagttctcggcatcgatcgggctggtgccgcgccagtacagtaccggcggcaagcccaccctgctgggtatcagtaaacgcggcgatcgcaacctgcgccggctgctggtgcaatgcgcgcgcgccgtgatgcaacacgccgatttgcgcaccgacgccttgggcgcatggatcagggcgctgtccgcccgccgtcactcgaacgtggtggcctgcgcgttggccaacaagctggcgcgcatcgcctgggcggtgctggcccgcggtacccattaccaaggacgtccgctggccgcctgagcggaccttaccgattcttcccacctgggtttgcgatgtagaccaagtgatgaaacaaacggctcaacggcctggcgaacaacctggcaaatagaacagcaccgtgatgctgcggggtttttgaggatcgccgggcgcggctctcatcgaggagcggggaattgcctccccatcatgactccggatagatttgcgcaagcctcccttgtttcaataccggactaccttgcaaagaccgggctgaccataga

SEQ ID NO: 1550 - DNA, 1380 bp, unidentified
  source 1..1380: mol_type = unassigned DNA; note = element_20322fc
  misc_feature 1..2: note = core
  misc_feature 3..78: note = LE
  misc_feature 79..1119: note = CDS
  misc_feature 1120..1380: note = RE
  misc_feature 1119..1367: note = bridgeRNA
tgatggtgtggacggccccctacggcatcagttgtgccagaatgaggttgttgcaaatctcagacaagggagccgtccgtgaaccagattatccgcattggaatggatacgtcgaagaatttttttcagctgcatggggttgatgcagccgagcggccggtgttgcgcaggaagctgcggcgcagcgaggtgttggggttttttgccaagctgccagccacggtcgtcgggatggaggcctgcgccgcatcgcatcactgggcgcgggagttgcgcaagctcggccacgaggtgaagctgatcgcgccgcagcacgtgaaggcctacatcaagcgcaacaagaacgacgggcgcgacgccgagggactgtgcgaggcgatgagccggccgacgatgcagttcgtcccggtgaagaccgaggaacagcaggcggcgctgatgctgatggcagttcgccagcagctgataacaaggcgcacccagctcaccaacgcgatccgcggccatgcggcggagttcggtctgatcgccgccaagggtctcgacaaggtcgagccgctcttggtgcgtatcgcgcaggacgagaacttgccggaactggccggcgagatgtttgtgatgctgggccgcgactacgcgcggctgcaggtcgaactgaaggcggtcaacgccaggctgatgacctggcaccgcgccaatcccaacagccggcgcttggcaaagattccgggggtcgggccgatcggcgccacggcgctggtcatgaaggcgcccgatcctcgcctgttcccatccggccggcacttcgcggcctggatcgggctgacaccgaaagatcattccaccgccggcaagacccggatcggcaagatcacccgcgccggagacgagatgctgcgcagcgtgctggtggcgggagccaccgccgtggtccagcaggccaagcatagtcgcggccgtccgtcgccctggctggttgcgctgctggcgcgcaagtcgccgaagctcgcggcagtggcgctcgccaacaagactgcccgcattgcctggaagctgttgacgacgggcgagagttatgacggcgcgcggatgcctgtggcatcggcgctcgccgcttaagagatcaaccggtcggccaagtcgccaaccggttgagccggagctgcaaaaggagacagatggcaggatcgatcgatccgaggtgcgagacactccgtgggatccattggcccgtaaaggtcgctggtttgtttggaactcgcgtcgcggaaaccatcttggccagcggtccaccaaaccgcatcaacaggccggacatatggatgcaagcgatccgatcagaccatcaaaaactcttgcggcacgggggccgtccacata

SEQ ID NO: 1551 - DNA, 1208 bp, unidentified
  source 1..1208: mol_type = unassigned DNA; note = element_2033f11
  misc_feature 1..2: note = core
  misc_feature 3..209: note = LE
  misc_feature 210..1193: note = CDS
  misc_feature 1194..1208: note = RE
  misc_feature 12..192: note = bridgeRNA
cttgtatcttgttccctgtggtggttagctactaccacacgaggcaaagtgagtttgggcccaaccttaaggcattgaccttctcttgtagatcaaacccttcgcctctcttctttcgccaaatcagacactgaacggtagccaagggcgctgaccctgtatgcacaaggcaagtgggcgaattaggcttttttacaggaagagttctcatgttttatcttggtatggatgtggctaaagctaaactcgattgttatttgctaacccagcttgacccgctcaaaggcaaagccaaagtcgttaccaataccgccaaaggtctcgccgatttactggcctggctgactaaaaatcacatccctcatgatcagttgcacgtcaccatggaagccactggcgtgtatcacgaattagccgctacgctgctacatgatgctggcgtgtgcgtctcgattgccaatcccgcacaggtcaaacattttggccaaggcctcgctgttcgcaccaaaaccgatggcgttgatagccaagtgctggcacgttactgcgccatgattaaccctgccgcgtggctgcctccgccgcccgaagcccgcattttgaaagggtttcttgcccgccgcgaagcgattctgcaagacttgctgcgcgaacaaaatcgccaagaaaaagcacagtcgactgttacaccagagctgattcatcagtcgattaacgacagcatcgcctttctaaacgcgcaactcaaaaagctgcaaagccaaatcgacgatcacatcgaccgccatccaggactgaaaaatgacctagatttactacaaagcatccctgcaattggaccgcaaagtgggacacaattgttggctgtgatgcacatgcatcagttcaatacagccgaacaactatcggcctatttgggcttggtgccggtcgagcgacaatcaggttcgtcactattaggtcgcgctaaactgtccaaagctggcccttcgcaaatacgtgcagtactttatatggccgctattgttgccacaaaatacaacccccacgtcaaagccttatttgaacgtttgcttgcccgaggcaagagcaaaatgtctgccttgggcgcttgcatgcgcaaactggtacacctgagcttcggcgtgctgaaaacacagaaaaagtatcaagctgagtatcaaaatgcttgaccggcaagacggtat

SEQ ID NO: 1552 - DNA, 1438 bp, unidentified
  source 1..1438: mol_type = unassigned DNA; note = element_203b277
  misc_feature 1..2: note = core
  misc_feature 3..85: note = LE
  misc_feature 86..1186: note = CDS
  misc_feature 1187..1438: note = RE
  misc_feature 1256..1376: note = bridgeRNA
taattgaatggactcgcccaagccgaggcgtctgtgcgccacggtggcattcttatagaaagccaacgacagcgagggcgagaccatgaaaaagcatacgacgatcaaccagtctttgtcagccgatgtatctacctgcatgaacgttgcggtagatcttgccaaaaaggtctttcaggtggccggtgaggatgcgctcggacaggtgatattcgaggatcggatcaagtcacgtgaagccttccaggcctttcttcagaagcttccagcaagcgtgacggtgctggtggaaaccgggccaggcgctcaagcatgggcgcggttgctgcaagcgcagggcaatcccgtgtgcatcctgcccgctcagcatgttgccaatcatcgcagcggcccgaaaaacgatcgcaatgatgcattggcgatcctgcgtgcaggccgcgattgcacgatatcagcggtaccggtcaagagcgcagcggcgatggcgatgcaagcactgcaccgggcccggcaggggtacattcggcgacgtacggcggtcggtaatcagatgcgtggcttgttgctggagcaaggggtctctatggcgcagggcgaaacagccatcagccaacgtgtccctcgaatactggaagatgctactcagccattacccgatttgctgcgtgaactgatcgccgagctgctaggagaatgggatcaattgggcgaacgcgtgaacgtgttgactggtcggctcgaaacagcggccaagcagaacgagaccgccaagcggctgatgacggtacgcggagtggggccgatcattgccacagcgctactggccaagcaaaccgagcctgaacgcttcgccaatgctcgacagttcgccgcctacttcgggttggtacccagccaacacagtagtggcgagaagatccggttgggcaagatgagcaaacagggtgatgcttacttgcgcagcttggcgatccaaggtgcccacgcagttctaagacaggtacgaccggattcagagcagccggacgaccagcgtctacagcgctggatatcccgtctgggacgcaaggaggcggcggtgcgtttggccaaccgcaacctgcgcatcctctggcggctccttcaaaatgaccagacttatcgtcgccaaccaggcaatagccaggaggctacgatgagtcactgatctacagcgttctgccaccggggcgttaagccgctccaacccatgctaaagaacattgacccctggtcagaccgtcgcgaactgatgcctgcgctcctaccggcccttgaggcctaactgtaatgggcatatcgcgagctgatccaatgttggccagaagctgcttgggcttcctcgaataggcctgatacatagatgcaaccgggtaacaatgtttgaaaagcgggttgaatgtgggggcgagtccataca

SEQ ID NO: 1553 - DNA, 1240 bp, unidentified
  source 1..1240: mol_type = unassigned DNA; note = element_203c970
  misc_feature 1..3: note = core
  misc_feature 4..237: note = LE
  misc_feature 238..1206: note = CDS
  misc_feature 1207..1240: note = RE
  misc_feature 8..199: note = bridgeRNA
tgccttaagtttgcattttcataaaactgttttaaatttccgataaggaagcgggtgaccttgaacgccccgtagaaagtttgttctcgtgccggcattagtcccgcttccattatcggtcttgcaagaactttttggaatgataggcataaaggcctatttaaagtgatagtcccgcaagatttttgtttaacagttaatctcaaagttatgaaaaattatttaaattcagtcggaatggacatttcaaaaaaatattttgatacggtcctgttcttttctggcgaacatgcaaggtttacaaatgagaaaaaaggattttcctgcttgatcaaatggctgaagaagcacaagctcgggcctgataacgtgctgatttgcttcgagaacacaggttattactcacttcaattatcattttatttatcagagaaaggatttgattatgtccaggagcatgctttacacataaaacgatcaatcgggtttcgccgaggaaaaagtgacaaagcagatgcagtggatattgccaggtattcctgggttaaccgtgaaagcattcatttatcaaaacctccgtcaagagtacttttaaaattacagcagatcaagactacacgggaattgctggtaaaacacatggttgcgataaagaatcaaatccatgcgttagcagtattaggagataagaatgtctctaggattgcaggcagatccttaaactgtgtgcttcgggcaattgagaaacagattttcaaactggaggctgagattgaggtgcttataagccaggatgatcaacttgcatcaacctttgaactctgtcggagtgtgaaaggagtaggattggtcctggccgttgaattgattctacacacacagaacttcacctgtttcaatgaatggagaaaatttgctgcttactgcggaacggtgccgtatccttatcaatcaggaaccagtgtcaagggcaaatcccatgttcatccggccagcgacaagcgaatgaagtgtctgttaacgatggcttcgatctcagcactgagggcagatcctgagcttaaaatctattataaaaggcgaattgaagaaggtaaacccaaaatgagcgtaataaatatggtcaggaataagatgctggcaaggattttcgcaacagtcaaccgtggtacaccgttcataacattatcaaaatttgcagcgtaaaaaaaaggagaaagatttggaatttaccttggaa

SEQ ID NO: 1554 - DNA, 1306 bp, unidentified
  source 1..1306: mol_type = unassigned DNA; note = element_203c99b
  misc_feature 1: note = core
  misc_feature 2..245: note = LE
  misc_feature 246..1295: note = CDS
  misc_feature 1296..1306: note = RE
  misc_feature 17..209: note = bridgeRNA
ctcagtgtcagggtggacacgcagggagatctcgagggtgacctcgggatagcctccgtccgacggcgggctggctcctagactgcgtgtctcccgcgagcgggatgacctgcatgcgttgtgccgcccgccgctggcgaaggcctgccggcgtgacttcataggagcttgcttcagccccactgaggcgtgtccgccggtggtcctcaccacccggtgtgtgcgtccaggaagggggaccagaggtgatcgtagtggggatcgacccgcacaaacagacccacaccgctgtcgcggtcgacgctgcgagcgggcgctcgcttggcgagctcacggtcaaggcacggacggctggattcgagcgcctggtggagtgggcgcgggagtttgaccaagagcggaccttcgccgtggaggacggccgtcacgtctccggccacctcgagcggcacctcatcgcccggggagagcggtccgtgcgggtgccgcctcggatgatgggcgaggcgcgtcgcatcgaccgggtctggggcaagtccgacccggtggacgcaacggccgtggcccgtgcagcgctcgctcaccccgatcttcccgaagcgaccctcgccggtcccgagcgggagattggactgcttgtggcgcaccgggagtcgctggtgcgtgagcgcgccgacaagatctgcaagctgcgctggctgctgcacgacatcgatccggacctggccccggtaccccgcagcctcaaccggttcgtgacgcttcgtcggctcgcgcaggtgctccaggcgatggatgcctccgtcgaggtcgagatctgcctggatctgatcgcccggtgcgcggagatcaccacgcgcgcgaacgagctcgagcgacggatcaccttacttatgcgcacccacgcctccgcgctgctgcagatcccggggtgcggggcgctcaccgccgccaagatcgtggccgaaaccgcccagatcgaccggttcccgaccgaggggcacttcgcccgttacgcgggcacggcccccatcccagcttcctccggggcgcggcaccgccaacggttcaacccccgcggtaaccggcagctgaacaccgcggttcaccggatcgccgtcacccagatccgtatgcacccctcggcaagggactacgtcgcgaagaagcgcgccgagggcaagaccaagaccgaggcgatccgagcgctgaagcggcacatcaccagagtggtgttcaagaccctgatctcgatggaacagccgaccgaccgcttgaccgcggcggcggcttgacataggagcaa

SEQ ID NO: 1555 - DNA, 1551 bp, unidentified
  source 1..1551: mol_type = unassigned DNA; note = element_2044d42
  misc_feature 1: note = core
  misc_feature 2..238: note = LE
  misc_feature 239..1438: note = CDS
  misc_feature 1439..1551: note = RE
  misc_feature 6..219: note = bridgeRNA
tcgtattattaggtcaaccagagattactggttggccttttttaataaccgttttacgatggaggcagccgggagaacgtgacagcccctggggataaaccccgtactaaaaacagttctcccaccgcccccttctaccatgtttgagctggttgaggccctgacctcgtatcacaagcgaagctgtggagtaggaaccattgtgggaataccggcgaattcgaatgaggaggagaagatgaaacctgttattggcatggatgtagccaaaggaaaatctgttgcccaagcatttgttaagcggaactatccttttggacgagtccaagaaattcttcatacccctaaagggtttgaaaagctaaaacaactcttggaggaattagagcagaagacgacccacaagccagccgttattttagaacccaccggacattatcatcgtatcctggtgttctatttgcaacaggctggatatgaagtcattctcgtcaatccgttgcaggcacagagagcaagaagaactggtttgcgtaaagtcaaaacggacgcatcagatgcctggcatttaggggagctgtactatcaggaagaaaactggtctacctatcctggacggaaagaagcgttggtggacttacagttcttaacccgagagcatgagtttatcacaagcttgtacgttcaagccaaactgaacatgcgtacacttgtagatcagatctttccgagttacgagggtgtgtttaaagacttatattccaaaacctccttgaacttgctagaagcttgtctcacttcagaaggggtgaaggctcagactccagaagcttggatgggcatggtgaaagcggctacccaggcttcacgctctgaaacttggatgaaccgcaaggtagaagcactacagaacgcaatcgcggataatcccgtgcagcgcgttccttatggtctggagatggcgctgcgaagcctgctggctcttgttcgtgaatttcaaaagcaacttacagaactcgaaaaagtgatccttgaactgtcacaaactctgaacgaagttcagcttctggaatccatccctggggtcggaacaaagttagccacggccattgtttcggaaatcggggatgcttcacagtttcgccatcccaaacaactggtggcctacgccggaatcgatccaagcgtcttcagttcagggaagtttgtggctacgcagaacaagatcacgaaacggggttccaagcgactacgacgagcgatgtatttggcggtaacatgcggattacgacgaggaataaaccctggtctcagggagtattacgacagaaaaaagagtgaaggaaagccccacaaagtagccgtgatcgcttgcgccaacaagttactacatcacgtgtacgctatgcttaagaaagggcaaccctacactctttaattgatttcatccataaacctccatttcgtggaggtttatttgatatgcttttttacagtatatcaaatgtacacgttcttcaaaagctcgacttgacataccattagctggtt

SEQ ID NO: 1556 - DNA, 1352 bp, unidentified
  source 1..1352: mol_type = unassigned DNA; note = element_2047757
  misc_feature 1..2: note = core
  misc_feature 3..68: note = LE
  misc_feature 69..1091: note = CDS
  misc_feature 1092..1352: note = RE
  misc_feature 1118..1339: note = bridgeRNA
tgatgacgtggacggctctccaccccttccgcaggatgagctgcggatgagccggaaggagagccacgatggggaacgtcacgacgataggtttggacctcgcgaagagcgtgttccaggtgcacggtgttgatgcggatggcgcggcggtgcttcgccagcgactgacgcgcgggcgcatgttgaagttctttgcgaagctgccgcggtgcctggttggcatcgaggcatgtgcatcgtcgcattactgggcgcgcgagttgatcgcgttggggcatgatgtgaagctgatgccggcgcagtatgtgaagccgtacgtcaagcgcggcaagaacgatgcggccgatgccgaggcgatctgcgaggcggtgacgcgaccgaccatgcgcttcgtcgggatcaagtcgcccgagcagcagagcgcgatgatgctgcaccgtgttcgcctgatcctcagccggcagcgaacgcagctgtcgaacgcgctgcgggcgcacctcgcggagttcggggtcgtcgcaccgatcggcaggaacgggatggatcagcttgtcagtatcatcgcagacacggcggatgatcgggtgccgaccgatgcgcggatatgcctgacgatgctggtggcccagctgcatatcgtgaagcagcagatccttgagaacgatcgccggatcatggcgagtgcacgcgagaccgaactcggccggcgactgatggagatacccggcgtcggcccgttgctcgccagtgccatcgttgccaccgttcccgatcccgcgatcttccgctcgggccgcaacctcgctgcctggatcgggctggtcccacgacagaactccagtggtggcaaggagctgctcggcagcatcaccaaggccgggcatcgctatctgcgccagatgctgatcgtcggtgccatggcggtcgtgcgctatgccgaacgcaacgggacgaagcggccatggctcgtgcaactgctcgcgcgccgcaaggccaaggttgcagcggtcgcgctcgcgaacaggaacgcccgaatgatctgggcgatgatggccagcggtgagcgttatcgcgagccgcaggtcgcataaggatcgacgcgggagaccgcgccaacgaggttggaaagggcagacggagctgatgcacaaagccggttgaaaccgccggatcgggataacccacaccgccccaagcacctcgagtgcgagcaattgatcgggagccgaaccgcgcgaatggcattacggccagcggctatatgtgccgcacaaataggtcggacacatggccgcaccaaccagcaatgcgatgctcaatatgccacttgccaacggagggccgtccacaca

SEQ ID NO: 1557 - DNA, 1358 bp, unidentified
  source 1..1358: mol_type = unassigned DNA; note = element_2049118
  misc_feature 1: note = core
  misc_feature 2..73: note = LE
  misc_feature 74..1099: note = CDS
  misc_feature 1100..1358: note = RE
  misc_feature 1121..1354: note = bridgeRNA
taatgagatggtcacccccacaccttgagagagctaggctttcccagggggttacgtttcggaggccatcatcatgagcgagttagcaatggtcgggattgatctcggcaaacacagctttcatctgcacggtcaggacaagacaggccggggggtgtttcgtaagaaactctcacgtcagcagatgatgcagttcttcagcaaccttccggtatgtaccgtagtgatggaggcctgtgctggagcgcatttcgttgctcgccagttgatggtcatggggcatgaagccaagctgatttcccctcagttcgttcgcccttacgtcaagggtaacaaaaacgattttgtcgatgccgaagccatctgcgaagcggcatcacgtccgtccatgcgtttcgtttcgcctaagaccgaagcccagcagacgctttcggttttgcatcgtctacgagagtcactggtgcgagaccgcaccaaaaccgtcaaccagatgcatggtttcctgttggagttcgggattagcctacccagagggttggctatcatgaagcgcctgccggtcatcctgactcagcatgagctgcccactcgtctcatgacactcttggatcgtttgcgcgaacacttcaactacctagacggccaaatcagggatttggataaggagctggcccgccaactggctgacgatgatcttggcagtcgtttactgagcattccatgtgtcggcccgatcaccgccagcctgttggctgtggaaatgggcgatggcaagcagtatgcgtgtagtcgtgacttcgctgcatctattggcttggtgccaaggcaatacagcaccgggggtaaggccactttgctgggaatcagcaagcgcggtgacaaaaatctcaggcgattattggttcagtgtgctcgagtttatcttcagcaattgaaaatccagcatggtgcgttggcagattgggttcgctcgctgctgatacgacggcactcgaacgtggtggcctgtgccttggccaacaaactggctcggatcgcttgggcgatctcagctggtcatggagtatttaatgcagggccagatgccgtggctatctgacccagctgttgttctagtgccacgaaccactttcaggttttgcgatagctgaacaatggatgacgtgaacggcccaccggcctggcgaagaacctgctttaaaaatcggctctgcaagaagccgttagccttttcaggatcgtcaggcgcgactctcatcatggcgcgggtgactcacccaatagacgccggatagatttaagcaagccaagcacttcgcccaataatcagcattgcaaaaacgggggtgaccatagat

SEQ ID NO: 1558 - DNA, 1460 bp, unidentified
  source 1..1460: mol_type = unassigned DNA; note = element_204d61d
  misc_feature 1..2: note = core
  misc_feature 3..233: note = LE
  misc_feature 234..1442: note = CDS
  misc_feature 1443..1460: note = RE
  misc_feature 1..230: note = bridgeRNA
ccgttaccttcttcatggcctcgttaatcgaggttctggtcgccaggaccggcatgactcaaagcccctgtcttacgcatgatccggggggtgttgtcaccggctctggtggcgttggctgaccgctgatagggacagggccaccttccggtaggtctcttcgtaacgtgggtgccggcttccttcgccagacttgcgaccagttggtttgcgagagcgggaaggaatgaacagtgcagcgaccccagtacgccgtgttccttggtctggacgtcggcaaggaagaacaccacgcctgtgggctgaaccccgatggggaccgtctccacgacaaggccctgccgcagtccgagtccaggattcgggagaccctggcgtcgcttgcccagcacggacgcgtgctcgtggtggtcgaccagccagcgtcgatcggcgcgttgccagtgacggtcgcgcggtcgttgggcatcgacgtggcctatctgcccgggctggcgatgcgacgcatcgcggacctgcatccgggcaatgcgaagaccgacgcgcgcgacgcctacgtcatcgccgaagccgctcgttcgatgccacacgccctgcgccgggtcgacaccggcgatgaagccctggccgatctggaggtcatcgttggtttcgacgacgatctcgccggcgaagtaacccggattgccaaccggatccgtggtctgctcacccagatccatcccgcgctggaacgcgtgttggggccaaaggttcagcacccggccgtgatcgagttgctgacccggttcggcgggccacagggtttgacgaaggccacccgacgtcaactcatcacagccaccaagactcgggcaccccgctcgtacgagaagctggtcgagcacatcaccaaggccttgggcgagcaaacggtgacggtgcctggcacacgtgctgccgagcttgtactgcctcagctggcgaccacgctgagcgggctgttggcccaacgggccgaagcagccaagcggatcgaggagatgctcgatccgcaccctctttcccgggtcctgacctcgatgccggggatcggcgtcaggaccggcgcacggatcctcctcgaagtcggcgacggcagctcattcccgaccagcggccacctggccgcctacgccggactggcccccgtcacccgacgctcgggcacctcgatccgaggagagcaccccagccgggccgggaacaagcaactcaaacgagccttgttcctcgccgcgttcgcgtcgctgtccgacccgaccagcagggcctactacgaccggaaacgagcagccggaaagaaacacaacgccgccctcatctgcctagcacgccgccgcgtcgacgtactccacgccatgctccgccacggcaccctctacgagacccgtgaacccaagaaaatgccagtcgccgcttgacgaaacccatagggacac

SEQ ID NO: 1559 - DNA, 1396 bp, unidentified
  source 1..1396: mol_type = unassigned DNA; note = element_2051b04
  misc_feature 1..3: note = core
  misc_feature 4..88: note = LE
  misc_feature 89..1120: note = CDS
  misc_feature 1121..1396: note = RE
  misc_feature 1091..1383: note = bridgeRNA
agatggggtggttgccgccctccccagacggcatcgcaatgtgccaaagaagtggtgttgagaccactgagcggaaaggacggcaaccgtgacaaaagatacgatgatcggggtggatttggcaaagaatgtctttcagctgcacggcgcgtcgatgacggggcagatgcagttccgtaagaagctatcacgacaaggttttttcaagttcatggccgagcagcctccagcggtggtcgtaatggaggcctgtggcagcgcgcattactgggcccgcgagatgacccggcttggccacgaggtgaagctgattgcgccgcattacgtgaagccgtttgtgaaacggcagaagaacgacgcggcagatgccgaggccatcgtgatcgcggcccaacggcctgaaatgcgcttcgtcgatccgaagtctgcagagcagcaaagccgggctattttgtttcgggctcgagaacggctcgtccaccagcgcaccgaactggtcaacgccctccgggcttgcctctatgaatatggccacgttgttcctcaggggatccatcagatcaggcggatcgcagagatcctggacgcaccgaacagcgacttgcccgatttgatgcgcgaggaatgccgagatttgcttgaacagattgccgaaaagacagtccgcatcgatgcccggactggcaagatcaaggcacagacggctgaaggcgacatggcgcggcgcttgcagacaatccccggtgttggacctttgacggccttggccgtcgaagccttcgctccgccgatggaaaacttccggtgtggccgcgacttcgctgcctggctcggtctcgttccccgccagttctcatccggcggcaaggagcggctcgggcgcatttcgaaggcaggacagcccgatatccgcaggctgctgattatcggggcgatgtcgcgcctgaactggctgggccgcaaatcaatcccggaaggttcgtggctggcgcgcatagctgcgcgaaagccaaggatgatcgtggcgatcgctttggccaacaagatggcgcggacgatctgggccatgctgacgaagaatgaggattatcgagttccggcgcaggtgccagcagcatgatcaacatgccgcaaaatcagcctgccgtcggataatggggggtgaaagaaggcgacgacccgaatgggcaaaatgatcgaacagatctggagcaggaaaaccagttgatttctatgagccgtggagctcgagaatcagatttggacctggtccgcagatcaccataccggccagcggcttctggaatgccgcattatacaggccttacagaagaccgcactcgatcactcgcgcatcggaccagaaacttcttgcaccgcgggcggcaaccacaga

SEQ ID NO: 1560 - DNA, 1370 bp, unidentified
  source 1..1370: mol_type = unassigned DNA; note = element_2054311
  misc_feature 1: note = core
  misc_feature 2..69: note = LE
  misc_feature 70..1110: note = CDS
  misc_feature 1111..1370: note = RE
  misc_feature 1113..1360: note = bridgeRNA
tatggaatggcccgccccaccccctcccggcgtagtaggctcgccggaggcagaacggagggtttggtcatgaagacaaaggtttctgtaatcggcatcgacatcggcaagaatgtttgcagtgtggttggccttgatgctgacggggtcgtcgtcttacgtcgccgcgccacgcgggaaacattgatcggcctggctgcgaagctgccggcctgcattatcgctatggaggcgtgctgtggcgctcatcatctgggacgtattttctcagctcatggtcaccaggttcggctgatgtcgcccgaatatattcgcccatatgtcaaggcgcagaaaaatgacgaacgagacgccgaaggaattgcggaggcgacgacgcggccaaccatgcgctttgtagagctgaagacgcaggatcaactcgacatccagacgttgcatcgagctcgcgaccggctggtcggcgaaaggacagcgctgatcaaccaactgcgggcgatccttctggagcgcggcatcgtcgttcccaaaggcaagcgtcatctcgcagattatctcgtcgtcctgctggatgagggagtcggacacgctttaggcgaccggatgtacagacttgtcgacgatgcgcgcacgcaatggttggaactggacaaacggattgcggcctttgatgcggagttcgcggccttcgccaaagaaaatgccgatgccagacgatcggcgacaataccgggtgtcggcgcacttatcgcttcggccttgctcgctgcgattggaaaggctgatagcgtcgagcacggtcgtgatcttgcggcctggctcggcctggttccacgtcaggcaacgacaggcggcaggccgaaattgctcgggatcagcaagagaggcaaccgatatttacgtagacaactcatccatggcgcgcgggcggcgcttccccatgtcgccaaacgcgatacgccacttgggagatggctgacggcgctactcgcccgcgtacatcagaatgtcgcggtcgtcgcttttgccaataagctggcgcgtatctcatgggcggtgctgcggcgcggagaaacacttaccgacaaggaagcaatcctgacggtatgagactggtcgttcggcgcttgtgttgctgaacgtccgacgaagtttgcgggtggtgggttgagagatggcctgaatgacagtcaaacggtgttccggaaacctggtattaaaaacggcgttcgacgccgaagcttttatgagaaccggaacgcgcgtatctccatcttggccgggggcctgccccgaggccggatacgttgacgcagaccaatcagacagcgctctcgaaaaaactgcttgcagacggagcgggccatacg

SEQ ID NO: 1561 - DNA, 1430 bp, unidentified
  source 1..1430: mol_type = unassigned DNA; note = element_2056796
  misc_feature 1: note = core
  misc_feature 2..455: note = LE
  misc_feature 456..1241: note = CDS
  misc_feature 1242..1430: note = RE
  misc_feature 15..234: note = bridgeRNA
ctgcttgagacttcctgcagacgttgtggttaatccctagcgtttagaggtccttgcgggatagctcacaaagtgcctgccgccggctccggtcggttggcttacgaacgaagagtctcccgcatggatttcgccacggagtggctcaaaagaggatcgagcacgatcagtccacaagcaggagtgcccccgtggtgtcccaccacaaccaaggaggtagtcatgaatgtgatgatcggtgtcgatccccataaggcatcgcacactgcggtggccatcgatggaggtgaagatcagctctcgagcgtcaaagtgagagcgacccatcgacaggtcgaccagttgatggattgggccgggcccttcgagaagcgcacctgggccatcgagtccgtgggtgggttgggctatctgctggcccagcaactggtcgctcgtggtgaagccgtgtcgatgtgccggccactctggcttcccgcatccgggtcctggccaccgatcgatcgaacaagaacgatcccaacgatgcccactcgatcgccatcgcggcgctgcgggcaccgaggctccgggccgtcgaggcagccaatcacgtcgaggtgctgcgcctcttggccaaacgcaacatggacattgggagccagcgccaacgggtcatctgtcgcctgcactcgctctttgccgagctcgcaccagggggaattgccaaggaactctacgtttcagacgccgataccctcatggccacgctgaagccagagaccccagcacagcagatgcgcttcgatctggtccaagaactcctcgacgatgtgcgccgcctggacgcccagaccaaggcatcgcaccgacggatccgcgtggccatcaaggcctctgacacttcgctcaccgagatctatggggtgggtccaatccatgccgccacgctgatcggctactcgggcgacgtcactcgattcgccaaccgagatgcctacgcctcctacaacggcacggcaccaattgagtggtcctctggcggtcgagtggtgcaccgggtctctcgccggggcaaccgcaaactcaaccatgccctgcacatggccgccatcacccagctccgcaatccgggcacccaaggacggatctacttcgagcgcaagctggccgagggcaggaccaagaaggaagccatccggtcgctcacgcgtcagatctccaactcggtgtaccgccagctgctccttgacgcccaatagggggtccgggaggacactagggaacgactcgtagccagcgtgaccggctctacaccctgaacggccggctcttcggcgaagtcactcccggacccatacgaactctatgcagccgcgtcgatcgatgacggcccggatggtcgcgcccaagatgcagtcaaaaaaaggggacttgacacaaagaggatt

SEQ ID NO: 1562 - DNA, 1510 bp, unidentified
  source 1..1510: mol_type = unassigned DNA; note = element_20576b5
  misc_feature 1..2: note = core
  misc_feature 3..233: note = LE
  misc_feature 234..1457: note = CDS
  misc_feature 1458..1510: note = RE
  misc_feature 57..232: note = bridgeRNA
tgtagttgaccacccgctgcgcggacccgcggcggatgaaatgaggtagattcgccgcaaggcgtcggcaccgaggtcggccccgcattggtgcgcagagcccgtattgtagttggacccggagccccgcgagcaccccggactgccgccaccggtcctggaccggagagcgcgccttctagacttcgctgacgcgggctccacgccgacgccatcgtaccgaggaggtcgcgatggacgtccttcatcccaagtgcgccggtctggacgtgcaccagcagacggtcgtcgcgtgcgcgcgcacgggcgccggtaaagcagtcacctacgacgtacgtaccttcggtacaacgacggccgagttgctcgcgctcagcgactggctcacggcccacggctgtacgcacgtcgccatggagtcgagcggggtgtactggaagccggtctggcatgtgctcgagggccacttcgagctggtcctcgccaacgccaggcacatccgcaacattcccggccgcaagagcgacgtgaatgacgccccgtggatcgccgacgtgctggcccacggcctcatccggggcagcttcgtccccccggagcccatccaggagctgcgggacctcacccggacccgtcaacaactcgtccgcgagatcgcccagcacaccctgcgcatccagaagaccctcgagaacgccaatatcaacctgacggcggtcctcgccgatgtcttggggagcagtggccgcgccatcctgcgggccttggcccgcggcgagcgcgatccggagcgcctcgcggagctcgccagcgaccgggtcaaggcgtcgcgagccgagctggtcgccgccctgcacggacgggtgcccccccatcaccgcttcatgctcacgctgcacctgacccagatcgaggcgctggaagccgccgtgcgcgaggtggaggcgcgcctgggcgacgccctcgccccctttcgcgccgccctcgaccgcctgatcaccatgcccggagtcagcgagaccgtggcgcgcgtcatcgtggccgagatcggcttcgatatgacccgctttcccagcgcgggccatctcgtctcctgggcgggcctctgcccccggctccacgagagcgccggcaagcgcctctcgaatcggacgcggtcgagtaatccgtggctgaagaccactctcgtgcaggccgcgtgggcagccgcccggaaaaaggacagctactgtcgggcccagttcctgcggatcaagagtcgccggggcccgaagaaagccgtcctcgccgtcgccgcctcgatgctcacggccgcctactacatgctcaaacacggcgtcgactatcgcgacctcggcgccgaccacttcgatcgccgagacaaggccaagctcgcgaagcgcttgatcgcacgccttcacgatctcggcctcacggtcgaggtgcgcgcagcttgactcacggggcatttctttctagcggggtccgcgagcccggcgcaatcagtggg

SEQ ID NO: 1563 - DNA, 1517 bp, unidentified
  source 1..1517: mol_type = unassigned DNA; note = element_206067d
  misc_feature 1..2: note = core
  misc_feature 3..208: note = LE
  misc_feature 209..1495: note = CDS
  misc_feature 1496..1517: note = RE
  misc_feature 6..203: note = bridgeRNA
ctgatggcattaccttcgttcatcagaggtccccttccgggaacgctttcgatgcttgtccctcgaggactgacgtgagacggcgtcccgggagggcggccttgaaggcccgacgcccacaagggtgtcgtcccgcgaggactggtccatcagcacggcgccgcgccttcaccgaacacacacagtcacgacgtgaaggagtgatgcgatgctgggggttggtatcgactgggcggaggacttccacctggtcgccgtgggccgtccgggtgagggcgtggtcgaggtggcccgggtggaacacaccccggccgcggtggaggcgctggtcgcccgcatcgcagggttggagccggacccggccgaggtgcgggtggtcatcgagacccgccacgggctgctggtcgaggccctgatcgacgccgggtacacggtgttgccggtcaacccggacctggtggcccgccgccgtgggccggcgaagaagaaggacgacgccgaggacgcgcgtatcgcctgcctgcttgctctggaccagtacaccgagctgcgggccctggtcccgcacggacagctggccggggagctgcgggcgatcgcccgtgacgacgtgcgcgcctgccgtgacgaacgcaggctgctcaaccggctgcgcgccgacctggccgccacgttccccgccgccgcgaccatcgccggcgacgacctgggcagcccggtgatgctcaagctgctgcaccgctggcccaccgccggcgagttggccgcagccggccgcgcggaggtcgaggccctggcccggcaggccaggcacggctggccgcaccgcctcgccgaccgcgtcgaccaggccctggccggcgagcatttccagccccgcgactacctcgtccgcgccaaggccgacaccatccggctgacctgcgcccagttgctgctgctgcgcgagcaacgccgcagctggcaacggcgcatgggtgaactgctgctgggtgatcggcgccgaggacgcgccaaacagcccggagaccagcgggggccggcggtccctggcggcgagatctacctcagctttccagggctcggagatcgactcgccgccaggatcgccggtgagatcggcgacgcgatcggacagttcgacacgccgaacgcgctgcaatgctacgccggcaaggccccggtcacccgacgctccggcaagagcgaactggtcgtcgcgtcccggctggcctgcaaccgctacctcgccgacgccgtgcagcagtgggccttcaccagcctgagcacctccggctgggcacgggagttctacgacacgcaacgtagtcgcggaaagaagcatcacgccgccctgcgagccctcggtaaccgctggctggaggtcctctggcactgcctgaccaggaacaccccctacgacgagagcgtccacgtcgccaaccgcaaccgcgccctcggccgggtcaaccagcccaccaaactcgccgcttgacccgggggttgacaaagggtgt

SEQ ID NO: 1564 - DNA, 1413 bp, unidentified
  source 1..1413: mol_type = unassigned DNA; note = element_206cb48
  misc_feature 1..2: note = core
  misc_feature 3..140: note = LE
  misc_feature 141..1139: note = CDS
  misc_feature 1140..1413: note = RE
  misc_feature 1177..1413: note = bridgeRNA
gaatgaaatgaacgcgtcccacccctgacggtgggacagatgcatagccggttacgaaatggcaccgtcgatgtgtccacgcgcaaaattggacgttttccagacaagcggaggtccaaataaactcggtcgcagtgggtgtggatatcgcgaagacggtctttcaggtgcattacattgaccgtgagagtggcgagatcgtgaacaagccaatccggcgtgcgaagttccttgagcatttcgccaaccgacctgcctgccaaatcggaatggaagcatgtggtggcgcacatcactgggcaaggcaactcacgaagatggggcatcaggtaaagctgatgcccgccgaatttgtgaaggcattcaacatccgtaacaagaacgatgcagcagatgcccgagcaatctggctcgcggtgcagcagcctggcaagtccgtcgccgtgaaaaccgaaatgcaacaggcgatgctggccctgcatcgcatgcgagagcaactggtgaagttccggaccatgcagatcaatagtctgagaggtctactgaccgagtatggcgaagtgatgggcaaagggcgagcggcgcttgacaaggcaatgcctgaggtactcggccgcgtggccgaacgcttacccgccgtactgattgacacgctgcgtgaacagtggagcggcctaacgaggttagatgagcaggttgccgaaattgagcgacggatgcgcgagtgggtaaaggaggatcaggccgtgaaagcgattagcgagatccccggcgtggggttactgacggcgaccgccgccgtcgcgatgatgggcgacgcgaaggccttccgatccgggcgagagtttgctgcatgggctggtctcgtaccgaagcagaccggatcgggcggcaaggtagatctgcacgggatcagcaaacgcggcgactcctacctacgggtgctattgatccacggcgcacgcagcgtattgacgcacgcgaaggagcccggcccgtgggtcgagcagctcagaaagcgccgcccattcaatgtcgcgctcgtggcacaggccaacaagaccgcgcgaatgatctgggcaatactggctcacgaccgaccgtatcgaaaggattacgtgagcgtcaaaccagcttgaacgtctggtgtgacgctggacggcaatgttcatgcgtctgaacgtcgaaaggttgcgcaggcaacgtatgcgatgacaaaacaggtcggaccgggacccgcaaaacctggagtgaatcaagagcttcgagctcgttggctgaatgaggtgcgggtcagcggatttcatagtgggccgcagccagtcgggttgcaacaagcccggatatagagcagcaaccaatctgtatgtcagagcacacgagaaactagcgcaaaagggacgcgttcatata

SEQ ID NO: 1565 - DNA, 1391 bp, unidentified
  source 1..1391: mol_type = unassigned DNA; note = element_2072438
  misc_feature 1..2: note = core
  misc_feature 3..161: note = LE
  misc_feature 162..1121: note = CDS
  misc_feature 1122..1391: note = RE
  misc_feature 1092..1379: note = bridgeRNA
tgatggaatggacgccccctcccggcagcctcacaattcaccgatgatggtcggttcgtacataccgaccatctgagggaggaggcatccaatggagacggccaacgtcatcggaatcgatctggcaaagaacacctttcaggtccacggcgcgaaggccgatggatcggtggcgtaccgcaaagctgagcagggcgaggcttctggggtttctcgccgcccgcccgcgctgtgtggtggcgatggatgcgtgcgccagcgcccactactggggccgtgagatcacggcgctggggcacgaggtgaagctggttccgccggtctacgtcaagccgttcgtcaagcggcacaagaacgacgccgcggacgcggaggcgatcacggaagcggcgcagcggccgaccatgcacctcgtggaagtcaagacggaagggcagcaagcacgggcgatgctctttcggacccgcgacctgctggtgcgccagcgcacgcagctcatcaacgcactgcggggccacctggccgagttcggcgtcgtggctccccaaggccctgcccggatcggacagctggccggggctctcgaagatggagactccggcctgccgaaagccgtcgtcgaactgggcgggctgctgctcgaacggatcgacgagctcgacgagaggatcgatggactgagcatcgagctgcgggacagcgctcgggaagacgaggaggcggcgcggctgatgacgaccccgggaatcgggccggtcaccgcgctggccatccaagccttcgcgccaccgatggagagcttccggcgcgggcgcgacttctcggcgtggctcggcctcgtgcccaagcagcacacgaccgggggcaagccgaggctgggcaagatatcgaagatgggtcagcgcgacctcaggcgactgctggtctcgggagcgatggccgtcatccagagcgcggtccgacgtggcggtacggcggatccgtggctggccagcatgttggagcgcaagcccaggaagctggttgcggtggccctcgccaacaagacggcacgaatcgcatgggcactctcgacgaagaaggaggtctaccgggttcacaccgtagctgccgccgcctgaacggagcggcaaatggaagcagctgtcggggacgtgggaaggacggacgaaacaggtacgggcaaacggtcaacgagacggggtcgggaaaaccaggcaaaaacacaaagcaccaagcttgcagatgtgatttgcactcgatccgcgtatctccatacaggccagtcgcttatgaaaaatgccgcgcgaacaggccggatagatgacagcacctgaccgcccgctcgaaccggttctccagaacgctggcgtcacgggggcgtccataga

SEQ ID NO: 1566 - DNA, 1786 bp, unidentified
  source 1..1786: mol_type = unassigned DNA; note = element_2078869
  misc_feature 1..2: note = core
  misc_feature 3..277: note = LE
  misc_feature 278..1480: note = CDS
  misc_feature 1481..1786: note = RE
  misc_feature 16..297: note = bridgeRNA
ctactataataatacttggtcgtataaatccatgacaagccagccatggtttacacgcacttgttacttaagctataatgaaagcagtgattggactaacgtgcatcacctggggacaccacgcccgtgcaggagacagttatccatgctttcgttatagcgttcgtttttgcaggtagagccaaccatatgcgctcgcatcactcagtaggcagaatatgtaacgagaaaagtgtggatttatcgatcacaaattcaaccagtaggagagatgtttatgaacgcagtcggaattgacgtatccaaagggaaaagtactgtagcagtgatccaacccttcggagttgtcatagctgaaccttttgatgtgttccacacagacagcggtttgaaagaactggtgaacttcatcaaatcactgcccggtgaaacaaaagttgtcatggagtacaccggcacatactatgagccagttgccaatgcgctccataatgcgggtatatttgtatccgtagtcaatccattgctgatagatgactacgacacaaaccgtgtcagaaaagtcaagacagatcgaattgatgcactgaaaatcgcatcatatgtgcttgacaagtggatgaatctgcgtaaatacgaaccagccgaaactgttcgtaaaaccttgcagatcatgaaccggcaatgcatcaaactgaacaaaattcttgtgatgcaaaagaacagtctgattgcattattggattgcagtttcccgaatgcaaatacgctgttcacctcgccgcaccgagagtcagacggtcatgagaaatgggtggattttgtagtgaaattccctcatgtggattctgttgcaaagctctcattatctgcattcaagacaaagtatcaaagctggtgcaaaaaggagcattacaactacagcgaatccaaggcagaacaaattcatgcatatgcaagaacaattgtcaacactttgccgatgacagatgcagtcaagaagatggtctctgatgctgcaaaacacctcaattctacgctcgaagcgttggggactcttcattccgaaatggatgctcttgcatctcagcttccggaatacgagacagttatgaatctgtttgccgtcggaaaagtaaccggttcacagctcatagctgaaattggagatgtcacgaaactgaaaagcggtaaatctctggtagctctggctggcattgatccgccgccaaaccaatccggtaaagatgatccaaaatccagacgcatctcaaagcgcggctcttctgcattacgcaaaacactgttcctgattatgacgatctatctccagcaacagcctgctgaggaaccggtataccaattccttgacaagaaacgcacagaaggaaagccttacaaagtatacatgattgctgctgctcgcaaatttctccgcatttattatgcgagagtcaaagaagtaatgccgaaggagtagcatctattcatagattctgaaccgaaggcaaaacccaggcacggcgcagccgcttgaccttgacaggttatcataaaaatgctacaatgactgccgagacggtgactgacttcatctattcatgagttcctcaccgtcggcacgacacccacagcatttttatgatgttctgtcaaggttgccggtcggattgaactgcatttcgatttttcagaccgcttcggcagtcttattgtcgtacctgttttttcttctgtgaaagttgtgtgaaactttcattttacctcttgacttttatttgcaggt

SEQ ID NO: 1567 - DNA, 1360 bp, unidentified
  source 1..1360: mol_type = unassigned DNA; note = element_208930d
  misc_feature 1..2: note = core
  misc_feature 3..211: note = LE
  misc_feature 212..1168: note = CDS
  misc_feature 1169..1360: note = RE
  misc_feature 41..217: note = bridgeRNA
cttgtattagcgcatcggtataggattggcccgttccgtgaggaatgacccagcccgggtggccacccgagctgggtcgccgatcgatcggatcgatgcccaccgaagcctttagggctgcgtttcgtagcgagatcgcggtcggcacttcatcgggacccgcatggttgaacgaacttcaggttcgcataacaagggagggtcgaggaagatgggcaagcgtaacacgatctgtgccgggatcgataccggcaaacacaagctcgacgtggcgctcgatggcaactccgagcagttgcaggtcgaccacacggtggaaggccaccaggtgctggtggagtggctgaagtgccggaaggtgaagagagtcgggatcgaggcaagtggaggctacgagcaggcggtcgtcgccgagctgcggcgcaagcggttcgtcgtcgtcctgtttcagccgaagcaggtccgtgcttatggcacgttccacctgctgctggccaagaacgacaagatcgacgcgaagctgattgcgatgtgcaccgctgcggtcaggacgatacattccgctccggatccgcgcctgcagccctttgccgatcacctgacgatgatcgaccagatcacggaagacatcgcaaggctcaagaaccggctcgagagttgccgagacacgcggattcaaggggtttggaaggcgcagatcgcgctcctggccaagtccaaacgagccgagttcaaggcactgctggcggcgatccgcacacactccgatctcgccgcacggcttgatctgatctactgcggcctgccgaccgcggctgccgtcctgatcaggatgcccgagatcggcaccatcacgcgcgagcgagcctcggctctcagcggactggcgccttacgacgacgatagcggcaaacgctccggtgcccgtcacatcaaaggtggccgtgagcgcctgcgttgggcgctctacaacgcggctcttccggcatcctcccgctggaatccgcagatcagggctctctatggtcgactgatcgccgccggaaaaccacataaatgtgcgctggtcgcttgcgccagaaagctgctcgtcacgatcaacgctgtcgtcgcccgcggaattccctgggagcccgagatgcctcaactcgccaagctcaccacctgatcgcgtttctttgttcgatcaggcggccgtttcttcgtcccgacctgccccctcaccgacgccgcgcgcggcggccgtcaaggctggccgtcgctccgctctcccatcacacccgctgccgccaggccacgccttgacggccgcaagcgcggcgtcatgctcaagggcaatcgggcgctgctttaatggttg

SEQ ID NO: 1568 - DNA, 1462 bp, unidentified
  source 1..1462: mol_type = unassigned DNA; note = element_208c55a
  misc_feature 1: note = core
  misc_feature 2..119: note = LE
  misc_feature 120..1139: note = CDS
  misc_feature 1140..1462: note = RE
  misc_feature 1144..1428: note = bridgeRNA
gaatgaaagggacttccccgtcccgagtggaccgcacagttgcggaatacggcatccaggtgccacgatgggaagttcgatatctcatcaactcactcgtttgttggaaggggaagtccatgactgacattgtcaccatcggaatcgatctggcaaagaatgtgtttgctgtccatggcgttgatgccacaggcaagccaagacttttgcgacccagtgtgccgcgcgccaagctgctcgaactcatcgccgcactgccgccatgtctcatcggcatggaagcgtgctctggcgcccaccactgggctcgagaattccagaagttcggccacactgtgcgcctgatggcacccaagttcgtcgccccctaccgcctgtcaggcaaacgcggcaagaacgatgcggcggatgcagcggctatctgtgaagccgtgacccggcccaatatgcgctttgtgcccatcaagagtttggagcaacaaggccagctcatggtgcaccgcgcccgccaggggtttgtcgagcagcgcaccgcaacgctcaaccgaattcgcggcctgctctcggagctgggcatcgtgctgccgctcaaggcagccgtcgtgcgccgcgaagccttggccagcctggaagatctgccaggctgggccaacacagtgatcggtgatctgctcagtgaagtcacccggttggatgagcgcattgcccaatacgaccagcacatcaccacgctggcacggcacaacactgaggtcaaacaattgatgcaattgcccggggtgggacccacaacggctacagcgctgttgagcaccatcggccatggtcatgatttccaatgcggtcgtcaactcagcgcctggctgggactgactccagggcaatacagctcgggcggtaaatcgcgcctggggcatatcaccaaggcgggagatccgtacttgcgctctttgctggtgctgggagcgcgttcggtcttgcaaacagccaagaaccgctcagaccccatcagtcgctgggcttgtgccttggctgagcgcagaggttactggcgtgcggtggttgcgattgccgccaagaatgcccgcatgtgctgggcagtattgaaccgaggcgaggcgtttcgcttgcctgcatgagacaagttccaccgcgtgaaagctagcgttgatgagcaaagggtaggacctgcgcgaggggttaccgaatacatcgcggaggcaaggagtcctcggctaacgaatgggtacctcgcgtgcgtctttcatcagggtccgcaggctaaagcccgcttgcatcaatgaccgtttgtagtttcgctgtccgcattctttgcactcagacacagcgccatgttgagtgcggtggtggcaaagtgaagtgaattcaaattccgcaatcaatcgctgcgcgattcattgcgggggagtattcgtttgactttttgggggaagcccttgta

SEQ ID NO: 1569 - DNA, 1536 bp, unidentified
  source 1..1536: mol_type = unassigned DNA; note = element_208d0da
  misc_feature 1..2: note = core
  misc_feature 3..242: note = LE
  misc_feature 243..1418: note = CDS
  misc_feature 1419..1536: note = RE
  misc_feature 3..220: note = bridgeRNA
cttgtattataaagtagtagttattaaagcccctctccaagggctatatgctacactgtaagagatgctgtggattggttaatcactcctaccacaagatggttcctgaaaggttccaaccacagccctttgcagtattgttaatcagttaaataccgcccgacggtttatgtggaacaaggttacaagagcaaagtgtcctgtggatacagcatcaaaatttaaccgggggaggtatttatatggtttctgttggaatcgatgtcgccaaggacaagcatgactgcttcatcctcaactcggagggtgaaattctttcggacgtgttcaccattcctaataatttggggggtttctccgttctgttgagaaaaatccgagattgtatctcgtctcaagacaaaatcaaagtaggacttgaggcgaccggacattacagctacaatatcctcgggtttcttcttgacaacggtctacccacctatgtcctgaatcccttgcgcactactctttaccggaagagtcttagtctcagaaaaaccaagaccgatcgtgtcgatgcgcgcaccattgcaaccatgcttctgtctgatttggacctcaagccctacttagatacagcataccacaacgaggaattaaagtcattgacaagataccgttttgacaaggtaaaggagcgagccaagctgaaaagctcggtttcaaggctggtttgcattttgtttcctgaactggaaacattggtgccctcactacacatggtttccatctacaccctactagaggagttcccgggtgccaagcaagtcgcccaggctcatctaacccggttgaaaacgcttctggaaggtgcctcaaagggccgatatggcagagagatggccgtgttaatccgagatgctgccagaaactctattggatctaggatgcctgctaaatctttggaattgcaacataccatccggctcatccgtgagttggacgccgagattgaagatattgaagcgcctattcagaccatcatggatgaaacacattctccaattacaacgatcccaggcattggctaccgaatgggggctatgattcttgcagaagcgggagacttgtctagatttgattctccagacaagctattggcttacgccgggatgtctccatctacttaccaatcaggacaactcaagaactgctacccacatatggaaaaacgaggctccagatacctgcgttatgcactctacaccgctaccaagtatgtctgcctttgggaaccgacattcgctacttacctcgccaaaaaacgagcggagggcaagcattataatgtcgctctttcccatgcttccaagaagctggtaaggcttatttttgcattggagaaatccagaaagccttactgcctagcaaggtaatttactaatgatagtcagcaccggggtccctacggacctctactttgctataccctttttgaaccatctgtctttttaccttaaccatccattttggggttgacttttaatagttaat

SEQ ID NO: 1570 - DNA, 1634 bp, unidentified
  source 1..1634: mol_type = unassigned DNA; note = element_208d841
  misc_feature 1: note = core
  misc_feature 2..241: note = LE
  misc_feature 242..1462: note = CDS
  misc_feature 1463..1634: note = RE
tcgtataatacatttatcgttcaattagttaaaataagaacgagttcattaaaactcatagctctcacaaaggttaataataaacaagtttttttcctttctagataaatatactagcacaataaacgtcttgtgttaacctttaaaaatcatctataggatgctaaggagaaagtaatttctaccttttataatacgaagctatgagaagttagaactaacacaaattaggagattaaaaatgtattatgttggaattgatgttgcaaaagagaaacactatgttagtgttatcaatgaagaaggtgacttcgttacaaaaccattttggatatattcagatggtgttggtctaaatgaattagttaaaaaattaaatgacatatcatggacatatgatgattttattttagcacttgaatcaacgggagcttatagtgaaaatatctatgaatattttactgagcttggattcaaaattattttattaaactcttatcaaactgcaaaatttagagatttaacaactatgaaaaaagttaaaaatgatgcaattgattctttggttattgctggactgattaagtctaatcaatacaaagagagctatgttagcaatgaagagtatcaatcattaaaagtattggtcagattaaaaagttcattatctgataaaataaaatccattaaaagagaaatatcaactgttatggctattattaatcctgaaataaataaagtatttccaaatatctttacaaaatcagcattagcaatcattaaagagtatccaactgcaattgatttacaatcagttacagtaaaaaagttaactaaaatatttagacatattaaaggtaacaattttaatgaggacaaagctaaatacttaatagatctcgcaaatcttactatttactctggtcgtgccaaagatgctcgctctttaatgattacctacaatattagaacattagagcttttatgtcaagaaaaagatgaagttgaaatagcaatacaaaatattttagatattgatattgacaacaaacctaattcaccaatagataatcttaaaacaattcctggagtatccgtcaaaacaattgctgctattcttggagagtgtggaaaactcagtagatttgaatctgttaaagcttttataggttatcttggtctttatccaacactttatcaatctggaaacagttctgttactggtaggctcgcaatgagaggtatacctattgctaaacatgctttatatatgtctgccgtttcatctgtaagacataatatagagatgttaaaactatttagagataaagtgtcatctggaaaatctaaaaaagaagctttaatcattattgcaaaaaaattagcaacaattatgtattcaatttttaaatataatacaccatacaatcccaatagagtttttattccatataggaaataaaactgttagttttagcacttgtgaaaacaatgagtttttaaataacttgacctaaaatgtattaaatttttatttgatcatttgaatattcaaaaaaatactcaaaaaatgaaacaataaagtaatgcctataaagaatagctattcgtttaagctattctttataggatgg

SEQ ID NO: 1571 - DNA, 1279 bp, unidentified
  source 1..1279: mol_type = unassigned DNA; note = element_2090fa9
  misc_feature 1..2: note = core
  misc_feature 3..268: note = LE
  misc_feature 269..1264: note = CDS
  misc_feature 1265..1279: note = RE
  misc_feature 44..216: note = bridgeRNA
cttgtatgttctcaccacacccttgcgagagccgttatgctcgtggggttgtcaccaaagagatgtgttctgggggagaccgaccactcctgaaggcaggatttgctcctgaccttgtttgtagagaggtccccccgcctcattgcccaccacgaagagtatcgagaagccgacaagtcggacttcgcattacaaggttgcagcggcatgaagttcgaggtcaggggaaccggagccatcttcactcagtttctctggagatgaaagcatgtctgttcacgtcggcttggatgttggttcccgcaccactgtaatggcatggcgcgataaaactcgtccagcaggctcctgggatattgctcagacgcccaaggggcgcaaggctgctgtcaagaagctgagtgcgctcaagccgctgagcatcgttatggaagctaccgggatttactacctggacctggccatggagttgagtgccgccggtttacccgtttcggtgatcaaccccaaaagctcgcgcaactttgcaaggttgatgctccagcacagtaagaccgatgctatcgatgctcagttgctggctgagtatggcgagcgcatgtcgcctcgcctgtggaccccaccaacccctgcgcagcttgagttgcgtgccattggacgtcatatcaatcgtctaaccggacaccgcacccgggcgaagaacgagctgcatgccctgagggcaaccgaaacctcctcaacgctgatgatcgaggatgaagaggaagccatagtcatgctggacaagcgtatcgagcgcttcaggcacgctgggcgagagatcattgccagctgcccgacgttacaagcgcagttcgatcatatggtagtagcgcccggcatgggtgaggtctcgacgcttgcagcgttagcggagcttacaaccttgcccgtgacgctcaagtcatcacaggtcagtcggcacgccgggctcgacgtacggctaactcagtctggcacaagcatcgacaagccaggacgactgagcaagtgtggtaacgcctacctacgctcgtcgatgttcatgccggccttgtcggcaatccgctgcgatccttacgtgaaggctttttacagctcactggtgggtcgtgggaaaagaaagatgcaggccatttgtgctgtgatgcgtaaatacctgacgggattgtgggcatgcatgcagtcgggagaggactttgacacggccaagctttttagcgagaaacacctgctaaaagcttgaccgggaacagagtat

SEQ ID NO: 1572 - DNA, 1646 bp, unidentified
  source 1..1646: mol_type = unassigned DNA; note = element_2091438
  misc_feature 1: note = core
  misc_feature 2..269: note = LE
  misc_feature 270..1520: note = CDS
  misc_feature 1521..1646: note = RE
  misc_feature 13..289: note = bridgeRNA
cctgttactatatacttgccccggatatgtggtagccagctacgagccgggacatctcgttgcctaagctgttagaatggagaggtaatggtctgaccttgtcctccaagggttttcacgcccgtattaaagtccgtcagccatcctcccgttcgcagcgttcgatttgtgcaggtagagcctaagcgttcgtgtcaccaaacagatggaatcgacaatgggaaaagatggcgttgtccattgcaaaattctctttgggagtgatgaacatgaacgcagcaggcattgatgtttccagcagaaaaagcacggtagctgtactccgtcccttcggggaggtggtgaagttaccctttgatgtgcgccacagcgcagaggatctgacaactctggcagaacagctcaaggccatcgaaggtgaaacacgggttgttatggaacacacaggacgctactatgagggtatcgccaaggttctccatgaagcgggactctacgttacagcggtcaatcctctgctgatcaaggagtacggcaacaactctctccgcaaagtcaagacagacaaagcggatgccgtgaagattgccagatacgcccttgacaactgggcagaattgcgggattatactcccatggatacgattcgctatgatttgaaaaccttaaaccgtcagttccagttggctaccaaacagaaaaccgctgtggcaaacaacctgattgcgcttcaggaacagtccttccctggtatccgtaagctctttgacagccctgtacgcagcgatggaacacagaaatgggtgaattttacccatgacttctggcacgctgactgtgtccgccgcagcagccagaacgcttttactgagcgttaccgtaagtggtgcaagcgcaaccattacctgttcagcgtggcgaaagccaccgagatatacgcactggcgaagtctgccgttgtactggttcagaagacatctatcacaaaaacgcttgttcaagaagcagccaaccaactcacagccatctctcacgctgcagaaacctaccgcaatgagatgaacaaactggccgctcaactacccgagtaccctgttgtcatggagatgtacggcgtcggagaatctctcggacctcagcttatggcagagattggtgatgtgcgccggttcgaccggaaacaatccctggtggcctttgccggggtcgaccccatgcccaaccagtccggggagaaaaacgtccgcagcaacaaggcctctaagcgtggctcaccttatttgcgcaaagcgttgttcaatgtgatgacctgctacttacagaaggcgccagcagacgagcctgtattccagttcctgaaccgcaaacgcgcggaaggtaaaccttactacgtttacatgaccgccggggccaacaagttcctccgccgctactacggcaaggtcatagagtatctctccacgctggaggatctgcctccagtggatatggactctaccgggttgccgaaacgtcaataatctcttcctgacttctttggccggcgctgggcggcggcctttttgtgttgctcatttttaccagcttcctctctacaaattttcttctgtcaagtcctcttgggggcttgattttttatttgcagg

SEQ ID NO: 1573 - DNA, 1572 bp, unidentified
  source 1..1572: mol_type = unassigned DNA; note = element_209d6c4
  misc_feature 1..2: note = core
  misc_feature 3..245: note = LE
  misc_feature 246..1412: note = CDS
  misc_feature 1413..1572: note = RE
  misc_feature 7..223: note = bridgeRNA
ttcgtattatgaggtcagccagttattgctggttgacctcattttactttagaggtttactgcggtagccgggtcggacgtccgcccccgtgggtccatgaacccgtgcgctaaactgtccgccccctacttgcacaagcatgattgaggctggttgggacatcgatctcgtatcacaagcgaagctatggtaatgcaagatggataggggttttccggcaagtatatgtgaagggagtaaatcaatgaatcctgtagttggtctggatgttgccaagggagaaacagaaggtcaggtattcctggataaagagaaaccgcatggcaggcacttcagcatcgtccatacgaccgacggttttgagaagtttcgtgaagtgttggagggcgttgaagccctgacaggtgcgaaaccaaccgtgatcttggaatcaaccggacactatcatgtcccggtggtgcagttccttgaagaatacagctacgtgtacattgtggtgaatccgctcatctcacaccaggcgaagaagtccagtcttcgaaaggtgaaaaccgatgccattgacgcctatcgtctctttgagctcttttacaaggaagagtttgagccactgcgtaagcgtgggatgcacctcttggatttgcggagtttaaccggacagcgtgatgcggtcacgagtctgtttattcaaaccaagctgcagttccacgccgtgttagaccttgtcttccttgagtatcgtggtattttcggggatctgttctctcaggtgtctttgaagacacttctcgcttttccaactccagaggcagtttttcaagtgtcagaagctgagctagccgaaaagataaaaacgctatgtaaaagccgttcggagagctgggcagcaaggatggcgcaggacattatccaagccgcaaaccgcagcccgtttcgtacggtgttgctgtccagccatttgtttagcttgaaaatgtacatccagatgattctggaatacaaagagcacctatccgacctcgaaaaccagatagatgccctcgctgaacagattgaagaatgtcaaattgtccaatctatccccggaatcggcgatacaatcgcagccacgattattgctgaaatcggagagatagaacggttcaatcacccaaagaagcttgtggcatttgccggtgtggacccgagtgtccattcgtcaggaaagtttaccgccaccattaaccgaatcaccaagcgtggctcaagccggctacgtcatgcattgtacttggcggtcctagcctacggaaaaccggaagcaagagacgacagacgttctacaaagccaagcgagaagatggcaaagctcacaaggtcgcccttgtcgcctgcattaacaagctactgcactggatttatgcagtgctgaagagccataaaccgtttgtagacttggtataactgccacaattgctgtgctaaagaaaaaccttcgatgatcacatggacggttctttgtcatgttcgttttcaatttaacactgcgcagcaactaatttcactggaaatgttgacaagctattagctgg

SEQ ID NO: 1574 - DNA, 1689 bp, unidentified
  source 1..1689: mol_type = unassigned DNA; note = element_209ecee
  misc_feature 1..2: note = core
  misc_feature 3..129: note = LE
  misc_feature 130..1164: note = CDS
  misc_feature 1165..1689: note = RE
  misc_feature 1354..1585: note = bridgeRNA
agatgccgtaatgggcccggcccagacttaagggaaaggtggctgtctcccggtaagtgatggtgaacggggtccctggatgtttgagcaccgggccccaagcatcgcaaacccattgggagacagcccgtgaactactatgccggaatcgacgtttctttggaatcctcaagcgtgtgcattgtcgacgcaaccggggagatcgtgaaggaagtgaaggtggagagccaccccgacgcactcgtgaagttcttcaaagcctttggccttcccttggctgtaatcggccttgaggcgggtccactgtcgcaatggctttatgcgggcctcaccaaggcggggtttgtgaccagcctcatggagacccgccacgtcaacgccgcgttgtccgctacaaccgtgaagactgatcggcgagatgcacgcggcatctctcagctcttacgcatggggtggttccggccggttcacgccaaatctgcgggatcgcaagagatgcgtgccctgctggttgcgcgcaagcagttgcagcacaagctcagggacatcgaactcagcctgcgcggcattctcagaggtttcggcctaaaggttggcaaggtcaccgataagacctttgaagcgcgcatccgcgagctcgttaccggccatcccatgcttgagcagatcgccgaggccatgctggccgcgagagccatgttgctcgagcaattcaacaagctgcacaaggccgtgctcaagattgcccgacgagacgaagcctgtcggcgcttcatgaccacgccgagtgtcggcgcgatcgtggccatcacctacaagtcggcactcgatgaccccagtcggatcaagaagtccaggaatgccggaccgctctttggattgaccccgaagcgatatcaatcgggtgaaactgacattaccggcggaatctcgcgcgttggcgacgagatggttcgcacagccctttatgaggcggcgaacgtcttgctctcacgggtcacacgcttctcggcactcaagcgctgggggttagaggtcgctaagcggcgcggtctcaagcgcgccaaggtcgctgtggcgcgcaagctcgcggtgatcctgcatcggatgtggatcaatggatccacgttccgatggaccaagaccgaggcggcccacgcatgatctcaacctatcatggcaacaccgatggttccgcggccgaggtcctcgccgtcaacccctttgcgcctacagcgcaaaccgctgtgcggcttcgggggtatgaccgctcggctcggtcgcgcaaaagatgccgccatgctccttcaatacaaatctctataggcttcgataatggaggaataacgaatcgctgagcgggggcaaaggagtccttgctccccgaggtcccgtcgccgggacggtggacgtggtgaagacgtaagcttcgcagttggtcgtcatctgacgaaccacgcattcatagattgtctcaccgctcctttctaaccgcatcatgctggcagcctttgcgctgaccacggagagaagcaagtaaccggctggcgagacttgggagcaaatgttgcaaccgctgcccattggacaagatctctctcgcaaagggaacgagctatgaccgtcgacacttgctgaaccgggagtctgccgcaccggaagacttgacatcaccgggcccattagaga

SEQ ID NO: 1575 - DNA, 1340 bp, unidentified
  source 1..1340: mol_type = unassigned DNA; note = element_20a1c66
  misc_feature 1: note = core
  misc_feature 2..82: note = LE
  misc_feature 83..1099: note = CDS
  misc_feature 1100..1340: note = RE
  misc_feature 1104..1334: note = bridgeRNA
gaatgatatggactccccactcaattggcatttttgtgccatattgaaattgaacagtttcaaaactaagcggagagtccatatgaatattaaagtccttggcattgatttagccaaatatagttttagtatccacggtgttaacgagcatgacaagcctgtctttcggaaaaccgtcaaacgtcacaaactactagagacactcagccacatatcaccatgcaccatcggtattgaagcatgctctggtgcccatcattgggctagaaaaatgtcttcactcggtcatacagtgaaaatcatggcaccgaagttcgtcgtaccctatcgccataatgaaaaaaacgatgcgaatgatgcacgagcaatatgcgaagccgtgacgcggcccaacacacgatttgtatctcataaaaatcaagaacagcaagctgttttgtgtatccaccgaatacgacaaggcttaatcaaagatagaacagcacggctcaatcgcatccgaggcctacttgaagagttcggtttcgctacgccaaaaggtcgatatcctggccaaaaagttatccaaaccattcttgaagatgcagaaaatgatttgcctaacctggcacgtgagctcattgatgaaacgtggcagtctgtacttgagctaaataaggacattcttcattacgataggaaattgtatcgactcgcgaaccagtctaatcaagccaaacgcatcatgaccataccggggattggtgaactcagtgcaacggccattgtagccagcgtgaatgatgccaaacagttcgacaatgccagacaatttagcgcatggcttgggctggtcccaaaacaatacacaacaggtggtcatattcgattgggtaggattacaaaacgcggtgataaataccttcgaacactactgattcacggcgcccgctccgtcatcgcagcgtgcaagcacaaaaccgataaaaccagtctatggataaaagacctcattgaacgacggggattcggccgagcctgtgtcgcacttgcttctaagaatgcgcgtctagtctgggctttattaacatcaaagcaagagtatcgaatcaacttttaataagagtttcctaccaagtctgagcaaaggcacacgatgacaatacggtcaaaccgaggatattaagaatctgattagctttttggtaagaaataccggctaacgaatgagatcaatgtccatgcgaacatcatcagggcgatagtcacataaaaagactaatcaaacgccgaatgtagagctgctgttcgatccaatgttgttaattgtgcaattgcttgacaaagggggagtccatgta

SEQ ID NO: 1576 - DNA, 1428 bp, unidentified
  source 1..1428: mol_type = unassigned DNA; note = element_20a23d6
  misc_feature 1: note = core
  misc_feature 2..70: note = LE
  misc_feature 71..1135: note = CDS
  misc_feature 1136..1428: note = RE
  misc_feature 1208..1422: note = bridgeRNA
taattggatggtccgccgctttcagcccgcttcagctgggatataagaggtggacggaggaggtgttcccatgcaaatacgcacgattggcattgatctcggcaagacggtgttccacctggttggcctgaacctgcgtggcgaagctgtagttcgcaagaagtgctctcgtacgcaactgctgcagtttaccgcgaatatccaggtcgatctgatcggcatggaggcctgtgccggagctcacttcctcagccgtgccctccgggagcaggggcacgaggtgcgaatcattccggcccagtacgtcaagccatacgtgaagacgaacaagagcgactatatcgatgccgaggcgatcgccgaagccgtcggtaggccgaccatgcgcttcgtcccgatcaagaccgacgaccagctcgatatgcaatcgctgcatcgggtgcgggagcgctgggtcattcggcgcacagcggtggtcaaccagatccgggggctgctgctcgagcgcggcatcaccctacgtcagggtcgtcgccatttagaagcagcgttgccggggattctggaagatgccacggccaagctttccggggcgctgcgtatgctgatctcgcaactgaagcacgaactggaggagctcgccaatttcatcggagaagcggatggcagcatggaacgcgcctcccgtgagaacgagtcctgccggcgactgctttccgttcccggtatcggtccagtcaccgcgactgcgctgatcgcggcgattggaaacggagctgccttccgaaaaggccgagagttctctgcctgggtcggcatggtgccaagagaatcctccacgggaggaaagcaaaagctgctgggcatcagcaaacgaggtaatccctatttgcgcaaattgttcatccagggagctcgcgccgtaatgttgcgcggtaccaagcaatctccgggcctaagaacatggatcgagggggtcgctctgcgtaagcaccataacgtcgccgcagtagctcttgcgaacaaaatggcccgaatcgcctgggccgttctggcaaaagaacaagcctatcgaccctccttacttgccgaggctgggcctgatctatctagcctgcagatgacgccctcctgaagtcaggcttggagatcgcatagagattcccacatctacagcccaacgacgacgatctaacaaagtttcctgccaggtctgctggcgaacaatgagatggcacaacggtcgaacccgacgctctcctagcctgatgcgccaagcagtctgtgaagactgaacagttaaataggaagagagcgtagcgcattccatcctggccaggagtaatacactccaccaaaggtcgaatacatttgcgcagaccacctgtctcctcacttttcgcttgcgacaaggcggcggaccataca

SEQ ID NO: 1577 - DNA, 1455 bp, unidentified
  source 1..1455: mol_type = unassigned DNA; note = element_20b8662
  misc_feature 1: note = core
  misc_feature 2..240: note = LE
  misc_feature 241..1440: note = CDS
  misc_feature 1441..1455: note = RE
  misc_feature 9..244: note = bridgeRNA
cgttaccttgttcgtagccctttccagcatcacactggaagggcggcggccagtcagacccggcatggttattgcccccagtcatccatgatccggggggtgttgccaccgggtctgaccggtattgagtgatcgctaataggggctcggccaggaactcgttccagggccgtccgtaacgtggatgccgggactcaataccaggagctgaccgccgaaatctcaacggacggagcagtcatgatcgagaactacgacaacgtcgacgtgttcgtcggcatcgacgtcggcaaaggcgaacaccacgccgtcgccctcaaccgagccggtaaaagtctctacgacaaaccgctccctaacgatgaagccaaaatgcgtgacgtcctgcagcacctcaaacaccatggcaacgtgctcgtcgtcgtggaccagccagccaccatcggagcactcccgatcgcggtcgctcaagccgaaggggtgctcgtcggctacctgccgggattagcgatgcgtcgcatcgcagacctccaccccggcgaagcaaaaaccgatgcccgagacgccgcaatcattgcgcaagccgccagaactctgccccacgcgctgcgatccatccaggtcgctgacgaatccgttgctgagctctcgatgctgtgcgggtttgatgatgacgtcctcgggcagatcactgcgacgagtaaccgggtacgggggctcctcactcagatccatcccgcactcgaacgcgtgatcggcccacacctggaccatcctgcggtccttgatctattgcagcgctacccatcgcccgcagtgatgcagcaggccggccctcaacggttagctacacgcctcagaaggcttgctccgcgtatgggacatcgtcttgcgtccgagatcatggacgcgctggctgctcaaacggtcgtggtggttggcacgaatgccgcagctgtcgtccttccgcgcctcgcggaacaactcgcagcgctgcggcggcaacgggctgagatagcggtcctggttgaagagatcgttgaggcgcaccctctttcgatcgtcctgatgagcatgccgggagtcggcgttaggacggccgccaggctcctcaccgaagtggcgggcaaacacttcgagtccgctggccacttggcttcctacgccggtctagctcccgtgacccgaagatccgggtcatcgatccgcggcgaacattcgtctaggcgcggaaaccgggtgttgaaacgagccctgttcctctcggccttcgccgcgctcagagatcccgtctcacgcgcctattacgaccggaagatcgcgcagggcaaacggcacaaccaggctctcatcgccctggccagacgacgctgtgatgtcctcttcgcgatgctccgagacgggtcgctatatcaagctgatcatgcgcttgcggcttgacaaaagtaatagggg

SEQ ID NO: 1578 - DNA, 1496 bp, unidentified
  source 1..1496: mol_type = unassigned DNA; note = element_20bc353
  misc_feature 1..2: note = core
  misc_feature 3..273: note = LE
  misc_feature 274..1374: note = CDS
  misc_feature 1375..1496: note = RE
  misc_feature 14..293: note = bridgeRNA
ctcctacaataataaataaggtttaaggcgcggctgccagccgcgtctttttccatctcaaagccgaagctgttagaataagagagcaatggcctgacccttttcaccttgggccagcacgcccgtcttggagtccgtcagccgcctctcttattcgcagcattcgatttacgcaggtagagccactgtatcgtgcgctcgtgtcacccaggagattgaacaggcaatgagtaaacggcggaacgccatattcaatcacacaggaggagcaaaatgaacgcagtcggaattgatgtttccaaaggaaagagcatgatggcagccctgcggccaatgggtgaagtggcattactgccacaggaatttcttcataccgcacccggcttagaccagatggcacatgccattctcgcattaggcgaagatacccgcgttgtcatggaggcaaccggacgctatcacgaacccgttgcagcagcgctgagtgcatatggtatttacgtctgtattttgaatccgctgtacatcaagcagagcggcgccggttcgatccgcaaggtcaaaaccgacaaagccgattccttgaaaattgccaagtatggtcttgacaactgggtcgatctgcgagaacatactgctatggatacaattagacaacaactgaagctatgcagccgccagtacaacatctacatgaaaaccgaggtatcgctgcaaaacaatctcatctcgctgacagataaaacatttcccggcgtaaatgagctgttttccagtccggctcgtgcagatgggcatcagaaatggattgactttgtcatgactttctggcattgcgactgtgttttccgcatcagcgagaaagcatttaccgctcgatacgagaaatggtgcaagcgcaagggatatcattttagagccgaaaaagccgctgagatttacgctcaaagctgcgaattgtttgtcacgcttccgaaggacgacaatacgaaactgctcattaccactgccgctcagcttatggccgagattggtgatgtgcgccgctttcctcgccgcagttcgattgtggcgttcgccggtgttgatccggctattacccagtccggcaagcacgaggtgcaaagtaccgctacgacgaaacgcggctcaccacatctgagaaaaacactgtaccagatcgtctgcacctatctgagaaaatcgccggaagatgagccggtatatcaatttctcgataaaaagcgcggcgaaggcaaaccgtattttgtctatatgacggcggcacaaaacaagtttctgcgcatctattatgcacgcgtgaaggagtgtcttgaggcattcgatacacagcagaatacagttcaagactaagttgatttacattttatcctcggctggcaatttttctccagtctgctttgttataccctttttcagtctcacaaattttgtgggacttttttcgtttcagctattgacttttgtttgcagga

SEQ ID NO: 1579 - DNA, 1548 bp, unidentified
  source 1..1548: mol_type = unassigned DNA; note = element_20beca2
  misc_feature 1..2: note = core
  misc_feature 3..245: note = LE
  misc_feature 246..1418: note = CDS
  misc_feature 1419..1548: note = RE
  misc_feature 3..223: note = bridgeRNA
ctcgtataataaagtagtagtttttagagttcctctccaagaactatgatatactgtttaagatgctgtggattggttgtgcgctcctaccgcttgacggttcacgaaaggctccagtcacagactctttgcagtttgttaatcagttagataccgcatgacggtttatttagaacgaggctacaattgctaagagcccctgtgggtctaaacagtatcaaaatatttttaaggagtattgttttatgattttagttggtattgatgtcgcaaaggacaagcatgattgctttatctgcaattctgacggcgaagtgctgtttaaagcattcactatttcaaattcaatggaaggctttaatgacctttatgcaaagattaaatctgtttcagatgatttgagtaaattaaaagtagggcttgaagccaccggacattactcatacaatcttcttgggtttctccttgataaaggtttgccgacctacgttatcaatccactacacaccaacctattcagaaagagtcaaactctacgaaagaccaaaaccgataaggttgacgcccatacaatcgctaagatgttgttgtctgatgagaacttaaagccctactcagacacattatatcataacgaagagttgaagtcattaactagatacagatttgataaggttcgcgaacgtgctgcgctaaaaaactcaatcgctcgccttgttaatatcctgtttcctgagattgaaaagctcgttccaactttgcatatgaagtctatatatgctttacttttagagtttccatcagctcgtcacatcgccaaagctcatttgacaagacttacaaatcttttgaatgaagcctcaaaaggtcattacaacagagatactgccatacgtttcagagacacagcaagaaactctattggttcatttatgccagccaaagctatggaactgaaacataccatagaattgatacagataatatcatctgagattgacgagatagaatttgaaattaagcgtattatgaatgacatcaattcgcccatactctcaatccccggcataagttatcatatgggagctatgataattgctgaaatcggagacttcagcaatttttcatcccccgataaaatacttgcctattcaggaatgtcaccatctacatatcaatcaggacatcttactaactgttatgcccatatggagaaacgtggctctcgttacctcagatatgctctttacaatgctacacagcatgtctgtcgatgggacaagacgtttgctgattaccttgccaaaaagcgttctgaaggcaagcattacaatgttgccatatctcatgctacaaagaaactcttaagagtcctttaccatttagagaaaacaggcgaactatatcaaattgcttaaactttttcctaatatttcaatacttgagcaacattagttgctctatttgtcatgcaattgtcaatgtacaatattgaactgattatttttttacttttttcattttttgacttgacttttaatagttagt

SEQ ID NO: 1580 - DNA, 1544 bp, unidentified
  source 1..1544: mol_type = unassigned DNA; note = element_20c3430
  misc_feature 1..4: note = core
  misc_feature 5..268: note = LE
  misc_feature 269..1534: note = CDS
  misc_feature 1535..1544: note = RE
ctcactggtctaccttccttgtatcagcgttctccgatagggcgttgatgcacccgaggtgccaccaggccatcgcccagctcgctcgatgcgttggatgtccacgatgagatctgcgaggtctggtggttacccgggacgtgcagaccgtcgacagggctgagcgcctccgagcgccgatcagtgagcgaaccggcagctgcgtcccggcaccagcggcaccacatgagggtgcctccccactgggactagcagcgaggaggctgacatgcagtctgccaccagcaccaccctgcccgaaaccccactcaacgacgtcacggccggcatcgattgggccgtggatgaccacgccgcgtgcatcgtcgacggccgcggccgcgaaatagcgcgcgtcatggtcgaacacaccacgaccggcctgcgcgacctggtcatcttcctggccaagcacggcgtcgatgaggtcgccatcgaacgacccgacgggccgatcatcgacgtcctcctcgaggccgaactgacggtggtggtgatcagccccaaccaggtcaagaacctgcgcggccggtacggctcggccggcaacaaggacgaccgcttcgacgcgttcgtgctcgccgacaccctgcgcaccgaccgggcccggctgcgccgactggagccggacacccaggccaccacggcgctgcgccgcgcctgccgcacccgcaaggacctcgtggcccaccgggtcgccgccgccaaccagctgcgcgcccacctgagcatcgtcttccccggcgcggtgggcctgttcgccgacctcgactccgagatcagcctggccttcatcgcccgcttcgatacccaagagcgcgccgactggctctctcccgcccggctgggcaagtggctggcctcggtcggctacagcggccgcaccgaccctgccatgctccacgcccacctgacccaggcacccaggggcctgaccggcccggcggccaccgccgaggccggcagcacccacgcgatgatcgcgctgctgacgaccctggtcgagcagatcaagatcctgggccgccagatcggcgaccagctcgacgcccacgccgacgggcacatcttcaccagcctgccccgctccggacgcgtacgcgccgcccggctgctggccgagatcggcgactgccgcgccaagtaccccacccccgaatccctggcctgcctggccggcgtcgcgccctcgacccgacaatccggcaagatgcgcgtcgtcggcttccgctgggcctgcgacaagcaactgcgcgacgccgtcaccgacttcgccggcggcagccgacacgccaacctctgggccgccgacctctacgaccggtcccgagcccgcggacacgatcacgcccacgccgtgcgcatcctcgcccgcgcctggctctacgtcatctggcactgctggcaagacaacgctgcctacgaccccgacaagcaccacgcgctccaacgcgtcctgaccatccgacgagccacccaaaaccaggcggcttgacacagggctt

SEQ ID NO: 1581 - DNA, 1380 bp, unidentified
  source 1..1380: mol_type = unassigned DNA; note = element_20cbf21
  misc_feature 1..2: note = core
  misc_feature 3..85: note = LE
  misc_feature 86..1117: note = CDS
  misc_feature 1118..1380: note = RE
  misc_feature 1142..1366: note = bridgeRNA
gatgatgtggatggctcccgctgccggcatctgagtgccaaagtgtggaggctgtcaaagcaaccacgagccaagggagccatccatgatggagattagcacaatcggcctagatctggccaaaagcgtttttcagcttcacggtgttgataccgcgggcaatggcgtgttccgcaaggcgctgcggcgcaggcagatcctgccctttttcgccgagctgtcgccctgccttgtcggcatcgaagcatgcgggacatcgcattactgggcgcgtgagctgatcagactgggccatgaggtgcggctgatgccgcctgcctacgtcaagccttatgtgaagcgcggcaagaccgatgcggctgacgccgaggcgatctgcgaagcggtgtcgcggccaacgatgcggtttgtgccggtgaagtcggccgagcagcaagcggcgctggcgctgcaccggacgcgcgatctactggtcaagcagcgtacgcagttggtgaacatgatccgcggactgctcgccgagttcgggatcgagatggcgcgcgggttgcaccacgcgcttgcgcttgccaagcggcttgctgccggcgaggcacccgaagtgcctctcttggcagagcgcatcgtggctggcctcgcgcgccagattggcgatctgcaggtccggctgacagcactcgagaaagagcttctcgcctggcatcgctcaagcgaattgtcgcaacggctcgcgacgatccccggggtcggcgtcatctcggccaccgcgctggcggcttcggtgatcgaacccgagcgcttccgctcgggccggcagtttgccgcgtcgttgggcctgacgccgcttgccaattgcagcggtggcaaggagcggttgggcaagatctcgcgcatgggcgatcgctatctgcgccggctgctggtgatcggcatgacctcgctcgtgcggcgggcaaaggccaagccagactcggtcgatccgcgcctcgccgcgatgctccagcgccggcccccacgcgtcgtaacggtcgccgccgccaaccgaaccgcgcgggtcgcctgggcaatcatgaccaaaggcggaacctatcggacaccgataatggttgcggcatagacccaagcaaaggagaaccacttcacgagtttgcgaggacgatgcgatgtgatggcgaaccggtcagaccgggaacagggacaccccgccaaatgtcaaaggcgtcatagcctgctaagcagagtgggacccagttcgcggataccataggggccagcggtcacaatgtccgaccgcatcaacaggccggacagaagactgcacccgaccaccccgccagaaatcatcaaattgcccttgcaatgcgggagccatccacagaa

SEQ ID NO: 1582 - DNA, 1308 bp, unidentified
  source 1..1308: mol_type = unassigned DNA; note = element_20ceee8
  misc_feature 1..2: note = core
  misc_feature 3..191: note = LE
  misc_feature 192..1151: note = CDS
  misc_feature 1152..1308: note = RE
  misc_feature 28..201: note = bridgeRNA
cttgtgtccaaaaaatttggcagaatgagcgaacgggcggttgcggaccaaccgcccgttgctggaactgagcccgtacgccccaaaggcgacagagcctgtaccagagcgagggacagctccggcgtcttcctcaacccgaacagttgcaagggcttcgagcccgtaccgagcaaggaagggagtggatgatggcacaaaacggtctcatcgtcgtgggcatcgatgtcgccaaggacaagattgatgcatgcattcgcgtgctggcactgcggcaaccgtacccgagcagcgcgcaggggcatcgccggttggttgcctggctgcgcaagcacaaggtgaacaaggccgtcatggaggccagtggcggctatgagcgggactgggccaagctactgcgccaggccggtgtcgaggtgcggatcgtcgaccccaaacgcgtccgcagcttcgcgctatcggccggccggctggcaaagaacgatgtgatcgacgcggagatgatcgcctggttcgccgagatatttaccgaggcgccgagccagacccacgatgccgcacgcgaggagttgctggcgctggtgaaagcgcgcatcggtctgggtgatctcaagacgcgcttgcagagccagaatgagcatgctgcaccaggattggttcagaaagcccatgcccgcatcttgaagaacctggcccgcgaaattgctgggctagaggccgccattgcggccaagatcaaggccacgccacaccttgccgagcgtgccgagatcatcgcgagcgtgcctggcttcgccgcgacgagcgccgcgaacctcgtcgcgggcatgcaggagcttgggcaggttagcaacgaggtcgccgccgcattattgggtgcggctccttacgatgacgatagtggccaacggcgcggcgagcgtcatatcaagggtggccgccgctggattcgcactgcgatctacatgccctgtctcggggccgtcacgcagaacaacccggcgctcaaggccttctatcgacgcctgatcgccaagggcaagaagccgaaagtcgcgctcattgcctgcatgcgcaagctgatcgtcatctgcaacacgctgatcgcccgacggcagaaatgggaccccagccgttacgcgctgagttgagcgagtgcatcctctcgcgctcggtcatcgaccgagcgcatgccaagccaacagaccggagagcggacggggtcaaggccgtaagccgccgaaggcggggcgcgccccgcgccagccttgaggcccggccgatcgccggtttacttcagcacagttg

SEQ ID NO: 1583 - DNA, 1209 bp, unidentified
  source 1..1209: mol_type = unassigned DNA; note = element_20d7f37
  misc_feature 1..2: note = core
  misc_feature 3..195: note = LE
  misc_feature 196..1182: note = CDS
  misc_feature 1183..1209: note = RE
  misc_feature 15..199: note = bridgeRNA
cttgtatctctcaatctgatatatttgattagctgtcagtatatcaaggagcatgagaacttgtattcgtccttaggtgaaaaatctgtgacgcagataaagtccatgctcctctttctctggtactgaatggtatcaaagtcctttccactgaggaaagaaggctgtatttacaagggtagtaaggagaatattatgaacattattggtattgatgtcagtaagggtaaattggactgtgctttaattgataatttaactcatagaaaattaaagtttaaggtagtctctaattctgaagaaggttttgttactttaattgattggcttgctaaacgcacaaaatcgagtatttcagcgtatcattttattatggaggctactggcgtatatcatgaaaagtgcgcttattggctatttgattcaggtgcaagagtgtccgttgttaatccagcccgagttaaatattatggtcagagtttaggggttcgctctaaaaatgataaaaaagatagtgttgtattagcacgttatggtttgacgcaaacccccatggtttggcagcctgaagcccttgaaatcagaatacttaaggctttggcttcgcgtcttgatgcgatagaaaaagatatattacgggagaaaaatcgtcatgaaaaatccagtataaatccttcttcacagacaatattaaacgctattgaaacgatcttgtttactctaaataaagaaaagttgcatttggaaaagctaattcatagccacattaatcagtacgaatacttgaagaataataacgctcttttacagacaattcctggcgtagggccggttctttcaaggtatatgctcattgtactaggtggtcgaacttttcagtcggcatcgcagtgtgctgcttatcttggtttagttcctatacaaaatgaatctggatcaagtcttcgcgggagaagtcgaatatcaaaagctggcagccccgttattagagccaagctctatatggctacgatttcagctctacaacataatcctgatattaaaatacaaaatcagcgattattaaaaaatggcaaatctaaaatgagtgcattgtgcgctgcaatgcgaaaattggtgcaaatatgttttggtgtcataaaacatcaacaaccttatcacgttcaagccaaatttttatgacttgaacatggtgctgagagatggtat

SEQ ID NO: 1584 - DNA, 1400 bp, unidentified
  source 1..1400: mol_type = unassigned DNA; note = element_20e54c3
  misc_feature 1: note = core
  misc_feature 2..89: note = LE
  misc_feature 90..1124: note = CDS
  misc_feature 1125..1400: note = RE
  misc_feature 1173..1392: note = bridgeRNA
caatgggatgaacgcccccacccgtaacggcatcgacgtgccaaagtggagatgttgatcaaccacttgaaccgagaggggcgtccaccatgaagcttacgactgttggcatcgacctggcgaagaacgtgttccaggtccacggaattgacgagcacggcaaggtactcgtgaagaagcaactgcgccgggaccagatggcgacgttcttcgtcaacctgccgccgtgtttgctgggcatggaggcttgcggcagcgctcaccactgggcacgcaagctccaggcaatgggacacaccgtgcgcctgatggcaccccagttcgtcaaaccatacgtcaagaccaacaagaatgatgcagccgacgccgaggccatctgcgaggctgtcggtcggccgaacatgcgcttcgtgccgatcaagaatgttgagcagcaggcggtgttggcattgcaccgggtgcgccagggcttcgtgaaggcgcgcacggcgcaggccaatcagatccgtggcctcctcggcgagttcggtctcgtcgttccccaaggcatcggctatatcgcctcgcgggtcccggaactgatcgaagacgccgacaacgagctcccgggctcctttcgcgtgctcgtccagcgactgctcgaccacctcaaggaacttgagcgccaggttgaagagctcgaagcacagatccaggcatggcatcgaagcagcgacctcagcagccggctcgctcaggtgcccggcatcggccccatcacggcgagcgcgctggtcgcctccatcggggatgcgaagaacttcgacggcggccgacaattggcggcttggctgggtctggtgccccggcagcactcgtcgggagggaagtcgaacctgctgggcatgagcaagcgcggcgacagctacttgcgcacgctgctgatacacggtgcgcgatcggtcatctatcgcgctggacagaaggcagatccgtgcagctgggtcaacgcagtggtccaacgccgcaacaagaacgttgcggcggttgcgctggccaacaagaatgcccgaatcgtttgggcgttactggcgcacgaccggcgctacgagacgggttacaggaaggcggccaaggtcgcgtgatcgaaggccaaccgcagaagaggaaaaacaacgtcagggagaaataccaccgattgctcaggtgatcatgaagtgatggcaagacaggtaagaccgtggttggcaaagcccgcgccgcgcgaggcacccagagtgcgtgtaagcgatcgaggcgtcaaccagcagatcccatcagggaccgcagccaaaagctgcattgaagtccgaatgtacgggagcaatcttcaccttcgcgctgtcacgaattgagaggctggcatagggggcgttcatgta

SEQ ID NO: 1585 - DNA, 1202 bp, unidentified
  source 1..1202: mol_type = unassigned DNA; note = element_20e81b5
  misc_feature 1: note = core
  misc_feature 2..210: note = LE
  misc_feature 211..1176: note = CDS
  misc_feature 1177..1202: note = RE
  misc_feature 36..202: note = bridgeRNA
tcttaagtttacaatccattaaatttagagtataaatcagaaagaacaaaagagagaaataaggttagtatacacggtgaagccttgacttcgacaacaatgataaccctctctctttttctactaagatttcgttcagttctgtgagacctagatctcgattttaagttgttgaaatgtaagtagaatgtcctttccaaatcagttcttatggataaagatagaaaaatttatggtatagacattagtaagtcagtgtttgatgtttacagtgaatctgggggtcatattcagttttccaacattgtaaaaggctttaggttatttgtaaagtctttaccaagaaccgctttagtggttatggaagcgacgggctattaccattaccgattagctcaatttttagataaagagggcgtttatgtctccgtagtaaatcccttgtctataaaacgttttattcagatgaaattagctaaggtaaagaccgataagagtgatgcaaaagcgatatgtgcgtatggtaaacagaatgaagttccgttgtacaatgccttgacctcggtacatgccgaatgtttacagctctttaggttgttggatagttaccagaaaaagcgtactgcgacaaagaacaagattcatggagaaaaggcattaggagttccctcagcagtcgtttaccaatcattgcagagagatttaaatcatttaaacaaagagatggctgtattggaagctcgcttgctagaacttgtaaaagaggatcaacaacatcaactaaccttgttgcaaagcataccaggaataggtatgaagacagccttatttttaatagtggtgaccgatggttttaagaaatttgaaacagcctcacaactatgtagttatgttggtatcaccccgaccattagagtgtctgggagtagtgtaagagggcgcagtaggattagtaaagtaggcaacaagaaattgcgtaaccttttgtttttagcagccttttcggcttgtaaatacaataaggcatgtaagatgctttttgatcgattggtagccaagggcaagagtaaaaagctagcgcttattgcagtagcaaataagctactcaaacaagcctttgctgttgcgaaaagtggattaccctatgatgagaattttgtttctaaattaaactaaaattgtttggtttttaactcagttct

SEQ ID NO: 1586 - DNA, 1360 bp, unidentified
  source 1..1360: mol_type = unassigned DNA; note = element_20faa72
  misc_feature 1..2: note = core
  misc_feature 3..77: note = LE
  misc_feature 78..1091: note = CDS
  misc_feature 1092..1360: note = RE
  misc_feature 1101..1347: note = bridgeRNA
tgatgaggtggatggcctccgctctcggcatcatgatgcagggcggtcgaggcgatcgctcacaaggagggccatccatggaagaggtcaccacgatcgggcttgatctggcgaagcgagtatttcaagtccacggggcggatgcgaagggtcgcccggttcttcaaaagaggctgcggcgggaagatgtgctgagctttttcgcgaagctcccgccttgcatcgttggcatggaggcctgcgcctcgtcgcattattgggcacgcgagatccgtaatttaggtcacgatgcgaggatgatcccagcctcatacgtgaaaccctacgttgccaggcagaagaacgatgctgccgacgcagcggccatttgcgaagccgtgacgcgaccggcggttcgggctgcccccatcaagacgctcgcgcagcaggccgcgcgggtcgtgcatcgcacgcatgagatactatcgcgtcagcgtgtttcactgatcaacgcgatccggagccacatggcggagttcggggtgatcgcggcggccggccctcagcatgttgggtcgcttgtcgagcggatctccaattcgacgacgccgctgcctgatatggttcgagctgccttgagcattcttgcggatcagctcatcgcccttgccaagcagatcaatgaactagaggcccagatgcggaagcattgtcgaaaggagccggaggcagcgagactgctcaccattcccggcatcggtccgatcaccacgagcgccatactggcgggcgttcccgacattcgaggcttcaagtctggacgtgattttgcggcttggcttggattggtgccgcgtcagaactcaagcggcggcaaggaacgattgggcaggatcacgaagatgggtgatcgaacaatccgacgtttgctggtcatcggggccatgtccaccatccgatggtcacgcagcaaggagaactttgccgaaagctggctcggaaggattatcgcccgcaaaccggtcaaactcgccgcggtcgccttggcgaacaagatggccagaatcatctgggctgtgatgacgcgacaggagacgtaccgggccgcataggaatcgacagtcaggaaaagccgagtcctggccgtcgtggtgcaacggcgctgaatgggaagatgacgcgatagttgaaagacgagatcgggatatccagcagacctgtaggcgcttcgagcgcgagagcttgttatggacccgatccgcggatctcatctgggccggcggccgagtgtgccgccttatgtaggccggacacatgcaagccgccgacgtatcgctcatcgcccaaaccaaacccttgcaccgcggaggccatccacaca

SEQ ID NO: 1587 - DNA, 1490 bp, unidentified
  source 1..1490: mol_type = unassigned DNA; note = element_20ff04a
  misc_feature 1..2: note = core
  misc_feature 3..205: note = LE
  misc_feature 206..1474: note = CDS
  misc_feature 1475..1490: note = RE
  misc_feature 9..203: note = bridgeRNA
ctgatggcagtaccttccttcgtcatcggagacccccggggaacgctccacacgcttgtcccgagaggactgacatgagacggcgtcctcgggggtcgccggcgcaggcctgacgcctacgagggtgttgtcccgtgaggactggtccatcagcacggcgccgtgcctgcaccgaccgtgatcgtcggcgggaaggaggcgaaggttgctgggagtcggtctggactgggccgaggactaccacgacgtggcgttgggtgtaccgggtaagggggtgatcgaacagttccgcatcgaccacggcccggccggggtgcagcggctggtagctcggtgcctggcgctggagccggacccggctgaggtgcgggtggtcctcgaaacccggcatgggctgctggtcgaggccctggttgatgccgggttcaccgtgctgccggtcaacccggatctggtcgcgcggcggcgtggaccggccaagaagaaagacgacgccgaagacgcccggatctgctgcctgctggccttggatcagtacgccgagctgcgccggctggtcccgcacggcgcgctgggcgctgagctgcgggccatcgcccgcgatgacgagcgggccgcccgcgacgagcggcggctgtccaatcggttgcgcgccgacctgctcgcagtgttcccggccgcgatcgacatcgccgacggcgacctcggctctgcggtgttcctgcgcctgctggaacgctggccctcggcgaccgaactggccgccgccggctacgacgacatcgaggccctggcccgcgccaaccggcacggctggcccgaccgattcgccgaccgggtggccgctgccctggccgaaccccggctggcggtgcgccccgagctggcccgcgccaaggccggcagcatccgcctggccgcggcccagttgctgctgctgcgcgcccaacgccgcgtctggcagcaccggatgggcgagatcctgctcggcggcgcccgctacggccgggccaagcaacccaaggatccccagccggagaacgcgttccctggcggcgagatctacctgagcatgcctggcctgggtgatcgtctcgccgccagggtcgccggtgaaatcggcgaacacgtcgagcagttcgccacgcccaacgccctgcaatgctatgccggccgagccccggtcacccgccgctccgggcgcagcgagtacatcgtggcccgccgcttggcctacaaccgctacctcggcaacgccgtccagcagtgggccttctgcagcctgcgacagtcggcctgggcccgccagttctacgacgcgaagatcgccaccggcaagagccacaacgccgccctgcgcgctctcggcaaccgctggctggaaatcctgtggcactgcctgcgcctcggggtcctctacgacgaagcgacccatacagcgaaccgacagcgacaccatgccctcgcggcatgaggttgacggaggatgt

SEQ ID NO: 1588 - DNA, 1412 bp, unidentified
  source 1..1412: mol_type = unassigned DNA; note = element_21072e4
  misc_feature 1: note = core
  misc_feature 2..90: note = LE
  misc_feature 91..1128: note = CDS
  misc_feature 1129..1412: note = RE
  misc_feature 1175..1410: note = bridgeRNA
taatggaatggtccgccccgctcctaaatcggcttcaaatgagccatgatgagttgtgcgaacaacatcattaaaaaaacggagcgaaccatgaacaatcatagcaacaaaggtcagatatgcactctcggaattgatctgagtaaaatgagctttcagcttcacggagttgacagcagtggtaaaacggttaccagaaagaagctcagccgtcagaaactattgccctatatggctaatctttcaccctgcgttattggcattgaggcctgtggaggcgctcattattggtttcgtcaattcacagctttggggcattcagttcgtattattgcgcctcaatttgttaagccgtatatcaagtcaaataagaatgatgcggcagatgcagaggctatttgcgaagccgtacagcgtccaaatatgcgctttgttccaactaaaagtatagagcaacaggatatccagagtattcacagaatgcgtagccaaacagtttcccggaggacggctcaagctaaccagatcagagggcttctgatggagtatggcattattatccccaaaggaattttttatattcggaaatatattccatcgatactagaagatgccgaaaatggtttaaccgtattatttcgtgaactcctcagcatgctctacgatgagatggttcacctggatgagcgtatacagcagctggaactgaaactggaaactattgcaagtatcaatcagaactgtcagcggttgctcacaattccaggtgttggcctgctcagcgccacggcattgatagcggccattggcgatgtatcggtatttaaaagtggccgagaactggctgcctggcttgggttggtacccagacagcactccacaggtggtacaccgaccttgcttggcatcagtaaacggggtgatacctacctgagaactttacttattcatggaggtagaacggttgtcagggtagccgacaaatatgatgatcgtcgtaatcagtggattagtgagctggaaaaacgtcgaggtaagaatatttcagccgtagctgtagccaataaaaatgcgcgtatcgcatgggcagttttaagcaaaaaagagtcttaccagactgtggcatgatgattaatgtgccgcagtgattaagtaaagcagttaagcaagataaataagcaacgagttgcgtgggtaaagttcaagtgatggcaaacaggtaagacctgtgcttctgagaacctgttggggtctagggcccatagaggccgaagacctgatgaggtaggagcacgcgaattccatcagggccagaggcactaagagacctcatcccaaggccggatatatggaagcaacatctttctgtctaacgaagtaactttaccttgcatcgcgaggaggaccatata

SEQ ID NO: 1589 - DNA, 1593 bp, unidentified
  source 1..1593: mol_type = unassigned DNA; note = element_210d265
  misc_feature 1: note = core
  misc_feature 2..287: note = LE
  misc_feature 288..1451: note = CDS
  misc_feature 1452..1593: note = RE
acgtataatagaaaccatcctgaaaggggtggtttttattatgtctcctttcttcaagaatagttatacaaacaggagtagctacctgttgtataataaagacaagcactgcggatttgtacatgttctctacagctcagactgttacggaggtgactcaaaccgcagtcgtttgtctcaaaaagttaattagttagttagcgcttgacgcttgtatttacgtgaatactcggacaaacgctctgtggtaaaacagcggtgcgaacttgaaaataaggaggcagcaaatgtactacatcagaattgacatttccaaattcaaacacgactgtgccgtcatcgacggcgatggtgtaacggtaacgccttcgtggtcgttttactgcgaccgcgagggcttcgaccaattaaagcgtcttttggactcgcttgaaggcgaaaaaaggatagggtttgaagccaccggtcattacggagaaacgctgaaactctacctcgaatcaaacagcttcacgttcatggaattcaatcctctgctggtcaaacgctttgttgcaggcaaatcgcttaggagaaccaaatcagatccgattgacgcgctgtatatcgcgcagtaccttatgtcggtggaatacaaaccctatcccgtttcattctaccacataaaggcgctaaagtcactaacaagatttcgcagcagcctgatcaagcagagaagccgtcaattggtcgccatgactacggttcttgatgtgatgtttccggagtttaaaccattctttggtggcaagttcagcgaaacagctctgtatattctggataattacaccacgccacagcgtattgccaacatgaatgcgaaatcatttgatattctccgcagaaggtcacgcggtcatttcactgccgacaaatttgcgaggctgaaagagcttgcaaaaaagactatcggacattcctctgaataccttgaaagcgaattgaaaatcactttggatatctacactcagatggatgcaagagttgagcagatcgaggaggaaatcgaaaagctcgtttcggatatgaatccgatgtcgctctctgtgcctgggataggtgtgatgacgattgccgaaattatcggcgaatgcggtgatttcaagaaatttgaaaacccttccaagatactcgcctttgccggcatggaacccggctaccatcaatccggtaccgttgaacattccggcaagatggttaagcacggctcgccgtatctgcggaacgcgctcatgtgctgtgtgatgcctgtcattcacaacaaccttgtttttgccgaatattacgacaagaagatcaaggaaggcaaatcccacaacacagccctttctcattgcgccaagaagctgctgagagttatctacgctcttgaaaccaagcaaattccttttgacgcgagcaaactcagataactgactctacaatcttattctcaacattatcagccggcgaaaaatttttcattattctccggttagctttgctatacccatttttgtctgcaaaaaagttggaattatttttcattttcctcttgactttttatagttagtc

SEQ ID NO: 1590 - DNA, 1202 bp, unidentified
  source 1..1202: mol_type = unassigned DNA; note = element_211274e
  misc_feature 1..2: note = core
  misc_feature 3..208: note = LE
  misc_feature 209..1180: note = CDS
  misc_feature 1181..1202: note = RE
  misc_feature 12..192: note = bridgeRNA
cttgtatcttgatcatattggtggttagctaccgccaatagaggtgaagaccagcttgagcccaccctgaaggcgttgaccttgtggtgtagatgaagcccttcacctcgttcccacaccattgccaaacactggacggtagccaagggcgttgaccctgcatgcacaaggtgagtgggtgtgatgatcaaggacacaaggagaatcgatgttttacctaggcgttgacgttgctaaagccaagctcgattgcatgttgctcgatacctcgagcgggaagcggaaatcaaaagtcattccaaatacgccggccggctttgcccagttgctggattggctggacaagcacaaggcccagcagacccatgtcgtgatggaaccgaccggggtgtaccacgaagcggcagccctggcgctcacggacgccggcatgacgctgtcactggttaatccagctcagcttcgtcagtttgcccaaggcctgggcgtcaagactaagaccgacaaagccgacagcaccgtgctggcccgctatggcgaaacccaaaagcctgacgcttggcaaccgccatcacagtccgcccggcgcttgaaagcgctgctgacccggcgtgacgccatcgctgacgatctgttgcgtgagcaaaatcgacaggaggctagcgagtttgggcaggcgcctgaggcggtcaaggagtcgattgcacaatcgatcgccttcctcaaagcagagttgaagcgactggaaaaaatgatccaggagcatatcgacaacgatccagacctgcgtaataaaaaagatctgctcgaatcgatccctggtgtcggcgagcgtgtttcgactcacatgactgcgttgtttgctgccagaacatttgaccgtgccgagcagctggctgcatacctgggcttggtgccagtgcaatgggaatccggctcttcggtacgtggccggcctcgtatgtccaaggcggggcccgctcacctgcgcaagctcctgtatatgccagccgtaagcgcacgtcgctggaatcctcacatcaaagccatgagcgaacggttacttgccaaaggtaaggccaagatggccgtcattggtgcttgcatgcgcaagctggcccacctgtgcttcggtgtcgtccactcaggcaggccttatgagccgaattacgccatgtaaggcttgacgcgcaagacggtat

SEQ ID NO: 1591 - DNA, 1536 bp, unidentified
  source 1..1536: mol_type = unassigned DNA; note = element_21184a8
  misc_feature 1..3: note = core
  misc_feature 4..242: note = LE
  misc_feature 243..1421: note = CDS
  misc_feature 1422..1536: note = RE
  misc_feature 8..223: note = bridgeRNA
tttcgtattattaggtcagccagaaacttctggttggcctgtttttgtgggtgttttaagatggcgatagccgggagaacgcgggctgctttggggacgttaccccgtcaaaaaaactgttctcctactattcccaatgaccatgtttgagctggtaggggcaatggaccccgtatcacatgcgaagctatgggtttggaaccatcgtaggattgccggcaaatacgaatcgggaggttgttatggaacctgttataggagtagatgtggccaagggattcagtgtcatacaagcttttttaaagcggaacgagccttgggggaaggcgataagcatctcgcatgagcaaagcggatttgagcaattgggggagattctgacggaactgcaggcacagacagggatttctccagctgtcgttctggaagcgaccggtcattatcatcgtggacttgtcacctatctggaacgtagtggatggacgtattttatcgttaatccgctgcaggccaagcgggcgaaaggcactcagttaagaaaggtaaagacggatgcaacagatgcttggcatttggctgagatgtattaccggggagatgtgactgcgcaccggacttgggaggaggattatctagagctccagcatgtgacgcggcagcatgagtttataaccggaatgtttgtgcaagcgaagttaaacatgagggccttgctggatcaagtgttcccgggatacgagaaggtgtttcgcaatctattctcggtaacctctctgtacgtgctggctcgctgtctggaaggtcaaactgaggatttgcatgtggtcatccgaaaaagtgcagggaaatcacattctgagaagtgggtagaagctaaggcggaaacccttagagaagtgatgtcccgctggggtgaacaaccaagaagtcgcgctcaaacctccgttctccgcagtatggtggacttagttctagtgtttacagatcaattaagcgaactggagaagcagatgaatgagatggcaaggggtcttccggaggttgagctcgtgaagagtatacctggaatcggagataagctcgcagccgcaattgtcgcagagatcggagatgtacggcagtttaaagaagccaaacaactggtagcttttgcaggtttagaccctggaatattcagctccggcaaattcatagcgaccagctccagaattacaaaacgcggctccaagaggcttcgtcgggcgttatatctagccgtacagtgcggtattcgaggaagaacaaacccaaggatacgggagtattacgacaaaaaaagaaaagagggcaagccctacaaggtggtcgtgatcgcttgcgccaacaagctactccatcacgtgtacgccatcctctgtaagcagcagcccttccaaacttaaaacccataattatccagaaccttcacgccaatgaaggttctttgtcatgataaaaaatagtataccaagaagaacacgaatcaccaatacaaaattcttgacaagtattagctgg

SEQ ID NO: 1592 - DNA, 1341 bp, unidentified
  source 1..1341: mol_type = unassigned DNA; note = element_2120405
  misc_feature 1: note = core
  misc_feature 2..67: note = LE
  misc_feature 68..1102: note = CDS
  misc_feature 1103..1341: note = RE
  misc_feature 1090..1331: note = bridgeRNA
tatggaatggcccgcccctccttccggcgtcgtaggctcgccggtggtccagaaggaggaacaggaaatggatattgcggtccttggggtcgatctcggcaagaacgtctgcagcgtcgtcgggctggatgcggccggcgtggtcgtgatgcggcgtaaaatgaggcgcgagaccttgatcaggctggcggagaagcttcctgcgtgcgtcgtcggaatggaagcctgctgcggcgctcaccacctcggccgggcgttcgccgaccacggtcacgaggtccgtctgatgtcgcccgaatatgttcgaccctacgtcaaggcgcagaagaacgacgatcgcgacgcggaggggatcgcggaagcggcgatgcgtccgacgatgcggtttgtcgaactgaagacccaagaccagttggacatgcagacgctgcaccgatcgcgcgaccgcctggtcagcgagcggacggctttgatcaaccagttgcgcgccatcctgcttgagcggggcatggtcgcgccgaagggcaaacggaagctggcggagttcctcgtcgtcttgatggacgaacaaggcggagagggattgagcccgcggatgagtcttctggtcgccgacgcccggacgcaatgggccgagctcgatcgccgcatcgcggcctttgacgccgagttcgtccgctgtgtgaaagacaacgaagacgcccggcgtttgaccgcgatccctgggttcggcgcgatcctcgcatccgcgctcgtcgccgccgtcgggcgggcggagagctttgatcggggccgggatctttcagcgtggctcggcatcgtcccgcgccaattcacgaccggcggcaagccgaagctgctcggcatcagcaaacggggcaacagctatcttcgtcgacagctgatccacggcgcgcgcgccgcgctgccctatgtcgctgagcgcgacacaccgctcgggcgatgggcgaaagctcttttgcagcgcgcccatcacaacgtcgctgtggtcgccttcgccaacaagctggctcggatcgcctgggcggtgctgcggcgtgaagagcggtttgccgcgtccggaacgcctatggcggcgtaagagcctcggcaggccgccgcggatgtttgcgagagggtgacgacgagatggcctgacagtcgaacggcgtcctggaagcctggtttaaaaaacggcgttcgacgccggaagttttatgaggaccagggcgcgcgtatctccatcatggccggaggcagcgcctcgaggccggatacgttgaagcagactgatcagccggcaatctcgaaaaaccccttgcagacggggcgggccatacg

SEQ ID NO: 1593 - DNA, 1495 bp, unidentified
  source 1..1495: mol_type = unassigned DNA; note = element_2128407
  misc_feature 1..2: note = core
  misc_feature 3..519: note = LE
  misc_feature 520..1314: note = CDS
  misc_feature 1315..1495: note = RE
  misc_feature 14..311: note = bridgeRNA
ctactacaatgtatttatggttatagtacctcataaccagttaggtctttatccatcttgttgcttaagctgttagaatgtaagagcaataggtatatcgtcttcctttcttggacttcgcgtccgtaaataagactgataaccagctcctcattcgcagcgttcgttttatgcaggttgaactgctgtcctacagtacgttcgtgtcacaccacagtagattgaataggcaatgagtaaaactggtatttatccattgcaataatcttaaggagtgacaaatttatgaacatgaacgcagtaggtattgatgtttccaagggcaaaagcatgtttgctattatccgcccatatggcgaaattatttctttaccttttgagattcaacacacttctgatgaaatcagatgcctcatcgatcagatcaaatccattgaaggcgaatcccgcatcgttatggagcacacgggtcgttaatatgaaccactagctcgcgagctttctcaggcacatctttttgtgagtgccgtaaatcctaagctcattaaagatttcggtgaaaattctctacgtaaagtcaaatctgataaagcagatgctttaaaaatagcgcgttatgctcttgacagttggaatgatttgaaacaatatagccttatggatgaaatacgtaatcagttaaaaacaatgaaccgtcagtttggtttttacatgaagcacaaaacggctatgaaaaataactttatcgcgatactcgatcaaacctatccgggtgttaatacttacttcaacagccctgctcgtgatgatggcagccagaaatgggttgatttcgctgctgcatactggcatgtagactgtgttcgtaaaatgtctcttcatgctttcaccgaccattatcagaaatggtgtaagcgaaataagtacaacttcagtcaattaaaagctgaagaaatctatggagcagcaaaggaacttgttcctgtacttcctaaagatgctttgaccaaactcattgtcaaacaagcagtcgatcaattaaacattgcttccaaaacggtagaacaacttcgtattctgatgaatgcaaccgcatccaagctgcctgagtattctattgtcatggctatgaaaggtgtcggtgcatcacttggtcctcagttgatggctgaaatcggtgatgttagacgcttcacacataagggtgcgattactgcctttgcaggcgttgatccaggtgttaaacaatctggaacctatgatcaaaaaagtgtccgtacttccaaactacgtctacatgactgcaggtgctaataagtttctgcgtatctactatggaagagtaaaagaatacctgctttctctttcataacaatcacatacatatccttattttcagaccaacgatagttgctggtctttttgtcgtgcttcatttcttgaatatattttttttacaaaatcatcaatttcctattgactttttatttgtagg

SEQ ID NO: 1594 - DNA, 1426 bp, unidentified
  source 1..1426: mol_type = unassigned DNA; note = element_212dfd4
  misc_feature 1: note = core
  misc_feature 2..69: note = LE
  misc_feature 70..1023: note = CDS
  misc_feature 1024..1426: note = RE
  misc_feature 1205..1420: note = bridgeRNA
taatgggatggtccgccgcctcacccagctgtcagctgggatataagaggcctacggaggaggcatcctatggagatacacacgctcggcattgatctagggaagacagtatttcacttggttgggcttaacgtacgcggcgaggttgtgctgcgcaagaagtgctcgcgtacgcagttgctgcgctttacggcgagccgacatgtccagttgattggcatggaggcctgcgggggagctcactttcttggacgggcactgcgagagcaggggcacgaagtgcggctgattccggcccagtatgtaaaaccttacgttaagacgaacaagagtgattacatcgatgcggaagcgatcgctgaggccgtggcgcggcctacaatgcgtttcgtgcccatcaagagcgatgaccagttggatctgcagtccttgcatcgagtgcgcgaccgctgggtgatgcgccggacagcagtggtcaaccagattcgtggcctgttgctggaacgcggcatcactctgcggaagggacggtgccatttggaggcagcgttgccggagattctggaagacgccacgacgaagctgtcaggcgcattgcgcttgctgctagcgcaactgaagctggaactcgatcagttggccctacggcttgaagagacggatgggctgatgcaaacgatcgcgcaagagagcgaagtctgtcgccggctggatgcaatttctggcattgcacccgttactgcaacggcactcatcgcggccatcgggaatggagcggccttccataggggccgggagttcgcagcctgggttggactggttccacgcgaacactccaccggaggcaagcagaagttgctcggtataagcaagcgcggtaattcctacttgcgacgactgttcgtgcagggagcacgcggcgtcttgcaatttagagagaagcagtcttctggtctgagtgcgtgtggcacaactaacatcgcgggtacatcacaatgttgccggcgtagccctggccaataaattggctcgcatggcttgggctgtgctcgccaagggggaagtctatcgacctcctatgctggtcagtagcgctgcagcttgactggccagcagatgacgcccggctgaggctaggcttggaaatcgctagcgcgatttccacatctacagcccagcgactactgcagatgatgatttcctgccaggtccgctggcgaactatgagatgacacaacggtcgaacccggcgctctctgagcctgtaaccggaagaagtcttcgaagactgtctaactacatgggaacagagcgcagcacatttcatcatggccaggagcaggtgctccaacgaaggccgtatacatttgcgcagaccaacttgtcactttcacttttcgcttgcgacaaggcggcggaccataca

SEQ ID NO: 1595 - DNA, 1457 bp, unidentified
  source 1..1457: mol_type = unassigned DNA; note = element_2144f1a
  misc_feature 1..2: note = core
  misc_feature 3..237: note = LE
  misc_feature 238..1440: note = CDS
  misc_feature 1441..1457: note = RE
  misc_feature 10..235: note = bridgeRNA
ccattaccttttggttgtccccgcaacggggttcccggcctgtgggctcggcaggacttgtcccccctgtcatgcatgatccggggggtggtgtcaccgggtctgcaggcaccgcatgaccgctgatagaggcacgagcactgctctgatcagggcggaaggttctgtgtaatgtggatgccggcttgagcggtgccgcctggcaggccgggaggacctgcaacggacaggagtatcgtggccgagtcagacgagatcggcgccttcgtgggtctagatgtcggcaagggcgaacaccatgcccgcgccctcaccccgaacggcaagaaggtactggacaaacggctgcccaacagtgaaccgaaactgcgggccatcatcgacaaactgcaggccaaacacggcaccgtgctcgtcgtggtcgaccagcccgcctccatcggggcactgccgttggcactcgcccgtgacgcaggatgtcgggtggcctacttgcccggactgaccatgcgacgactggccgatctctatcccggtgaggccaaaaccgatgcccgcgacgcagccgtgatcgctgatgccgcccgcaccatgccccacaccttgcgagatctggctcccgacgatgacaccgtggccgccctgtcgatgctgtgcggccacgacgacgacctggccaccgaggccacccgcgtccgtaaccgcctgcggggattgttgacccagatccatccggctctggaacgcgtgctcggcccacgcctggaccaccccgccgtgctgaagctgctgtctgaccacggcaccccggcctcgctacgacacaccggttacgacggcctggtcgaactgttgcggccacacgccccacgcatggccgaccgcttagccagcgacatcctcaccgccctggaagaacagtccgtcgtcgtggcaggcaccgaggcagcaggagtggtcattcccaacctcgcggccagcctgcgaacagtgatcgagcaacgccgcaccctggaaaccgagatcgaaaccttgctggaggcccaccctctttccacagtcctgacctcgatgcccggtatcggtgtcaggaccgcctcccgcatcctcatcgacgtcggcgacgccagccaattccccaccgccgcccacctggccgcctacgccgggctcgcccccgccacccgcagctcgggtagcagcatccgcggcgaacaaccagcccgacgcggcaacaaacagctcaaacgcgccttcttcctcgccgcgttcgcctccctgaaccacccaccctcacgcgcctactaccgcaagaaaaccgcccaaggcaagcaccacaaccaagccctcctctgcctcgcacgacgccgctgcgacgtcctctactccatgctcaaaaacggcaccctctaccaacacccaccacccacacccccttgaccaaacccatagaggca

SEQ ID NO: 1596 - DNA, 1317 bp, unidentified
  source 1..1317: mol_type = unassigned DNA; note = element_21496fe
  misc_feature 1: note = core
  misc_feature 2..227: note = LE
  misc_feature 228..1301: note = CDS
  misc_feature 1302..1317: note = RE
  misc_feature 4..229: note = bridgeRNA
cagtgaggatgtgggcgagccccgcagcggtcgttcctgactcaccacctgactgacccagggtcttcaaagggatctgtcggttcagtccgctgcggggctcgctgcattcaccggtcgagggtccgtgacctcataggagcttgtgccagcaagcacccgtcactgtcttgtccgctcgctcggcggtgcgtgccgccctgaccgatcgagtgaagaggacggcgatgaccacgatcgcagacccgtcgactgctgcccagccggtgttcggcggggtggacacccatgccgacacccacaccgccgcggtcatcgacgccgccgggcggctgctggcccaccggcagttccccgccaccccggccggctacggccagttggccgactggctggccgcgcacggccgggtccagcgggtcggcgtggagggcaccggcgtctacggcgccggcctcgcccgctccctgaccgccgcagacatcgagctggtcgaggtcgaccgccccgatcgcaagacccgccgcttcgccggcaagtccgacccgatcgacgccgaggccgccgcccgcgccgcgttgaccggtcgagcgaccggcacccccaagacccgcaccggcccggtcgaggccctccgcgcgctgcgggtggcccggcgcagcgcgattgccgctcgtgccgaggcccagacccagctgcgatcgctggtgatcaccgcacccgagccgctgcgcggccagctgcggacgctcaccacccgtcgactgctgaccacctgcgcggcgctgcgcccggacctgacagcgatcaccgatccccttcaggccaccaagaccgccctgcgcgcccttgcccaccgccatgcgcagctcagcaccgagatcgacgagctcgacacgctgctcgcaccgctggtcgcacagatcaaccccgccctcaccgcagcgaacggggtcggcaccgacgtcgccggtcaactgctggccaccgccggggacaacccggaccggctgcgctcggaggcggccttcgccgccctctgcggcgtctccccgatcccggcctcctccggacgcacccaccgccaccggctcaaccgaggcggtgaccggcaggccaacgccgccatctaccgcgtcgtgctctgccggatgcgctgggacccccggacccaggcctacgtccagcgacgcaccaccgaaggcctttccaagaaggacatcatccgctgcctcaagcgcctgatcgcccgcgagctctactacctgctcacctcaccagcaccggcccggaccacttgacgatccataggagcat

SEQ ID NO: 1597 - DNA, 1257 bp, unidentified
  source 1..1257: mol_type = unassigned DNA; note = element_215b3d9
  misc_feature 1..2: note = core
  misc_feature 3..79: note = LE
  misc_feature 80..1096: note = CDS
  misc_feature 1097..1257: note = RE
agatgtaatgaaaaccaaaaaagcgtgcctccaagggtagagtacgtgctcgaagcacaagccctgaaggaggcacatgatgatccacgttggcgtagatcttcaccagagattctgttacatgacggcgttagaaacaagagggaagttattgcaatcgggggccgtaaacaacgagcggttagcactgaagcgctactttcggcagtttcgcggccaagcggtggaggtagcggtcgaggcctgcggtttctggccggcgtttcgcgaagtggtggaaccggaagtgaagcgcctggtgctggtgcatccgcagcgagtaaaggcgattgcttcggccaagttgaagaacgaccgggtagattcggcgacgctggcgcatttgctgcgttgcgatttattgccggaatcatggaaggcggaccgggacacgcaggcgcggcggcagcaagtgcgtttgcgggcgaccctggtgcggcagcggacacggttgaaaaaccaggtgcatgcggtgctgcatcagcaggggcagcgctcgccggtgaccgatgggttcggcaagcggggacggcaatggctggggcaggtgaagctgccggagaaggcacggcagacgctagcggtgtgcttgcgcatgatcgactactatacgcaggagatcgaagagcaaaaccgtcaactaagtgtcgaggctctgaaagatgcgcgggcgcggtggctgatgacgattccgggaatcggggtctattcggccatgctgctgctggccgagattggaaacatcgagcgctttgccgacaaagcggggttgtgcagttacgctggactggtgccgcgagtgcgggagtcggcgggcaaggcggcgcgcggcggaatcacgcggcagggctcaccctacttgcgctggatcatggtggaagcagcccaggtggcaacgcgctgttcgccggcggccaaggcttacttcgaacgactgcgcaagaagaagcacgcgcatgtggcgcgagtggcgctggcacgaaagttattgagcgcggtccatgccctgttgcgcgatggcgtggggtttgaagaatcagagtttgcggcggtgtaaggggaatccgtcagctcgttgtcatccttgtgccacgagcacgaccctcagatggagcggcggagatccggacataccttatgtgcctttgagcacgaatagaagcctgtccgcaacgccgcaaacaaatacctatggactcgtacgcctgttttcataga

SEQ ID NO: 1598 - DNA, 1152 bp, unidentified
  source 1..1152: mol_type = unassigned DNA; note = element_215da85
  misc_feature 1..2: note = core
  misc_feature 3..215: note = LE
  misc_feature 216..1145: note = CDS
  misc_feature 1146..1152: note = RE
  misc_feature 16..196: note = bridgeRNA
cttgtgtctaacgcgggtatatcgttgaggtgagagcggagtgcggcaggccgctaagtcgcagtgcctcacgagcacgagtaggagtcagggccgccgcactccgattctcctgccccaaagcccgaacagttgcctgagctgcgagctcgaacctacaagcatgggcatcggcaggagatctctcgtccctgagtctactgcggagaacgtctatgtccatgcagcgctttgtcgggatcgatgtcgccaaggccgaactggccatgcatgtcttgccggacgggctggcctggacccaggccaatacgcccaaggagcacgcctgcctggccgaacgcctggcccagatgggatgcgagcggatcgtgctggaagccagcggcggctacgaacaggccgtgctgcaaacgctgcggcaggccggcctgcccgcggtccggatgcctgcccatcgcccccgtgcgctggcgcaggcgttgggactcaaggccaagaccgatgcgctggatgcgcgcttgctggccatcgcggcccaatgcatccacgctcagcccaccgcggtgctccctgcaccgctgcaggcgctgcgcgaactgcttcacctgcgcagcaccctggtcgctcagcgcgatgcgcagcgtcggtgcctggagcacgtgacctgcgaggcagtgcgcgaccagtggcgccaggtgatcgcgctgctgcagcagcgcatcggtgagctgtcccgacagatcgcgcaggcgggagcggcctgctctgatctgcccaaactgccagggcttggcccgatcctgcgcgccaccctggccgcgcggcttcccgaactgggcaccgtgcctgcgcgcaagatcgtcgccttggtcgggctggcgccgttcaatcgcgatagcggccgctggcgcggcctgcgccgcatccagggcggacgcgccgacgtgcggcgggtgctgtacatggccacctgggcctcgatccgcaccggctccccgctggcacacacctacgcccgcctgaccgccgcaggcaaacccgccaaggtcgccatcgtggcgtgcatgcacaagtacctgcgctggctcaatgccatcgcccgcgatcgagcaccgtacgcacctcctgccattgctgctgcatgacagttga

SEQ ID NO: 1599 - DNA, 1454 bp, unidentified
  source 1..1454: mol_type = unassigned DNA; note = element_216d2ad
  misc_feature 1: note = core
  misc_feature 2..225: note = LE
  misc_feature 226..1257: note = CDS
  misc_feature 1258..1454: note = RE
  misc_feature 13..234: note = bridgeRNA
ctgattgatgatggaggggcgttgcggcggttgtcgtagcgttcggaacgccggtcggcatgactccattttgggcctgtgacccttcgggttgacctcactacgaatggtctgtcggccggtgttctgtgccgaggtgtggctcgaaagaggcgcgagcccgacaaccacgaatcaggagtgcccgcctcggtttccaccaaccgagacaaggagctactccagatgaaagtgatgatcggcatcgatccgcacaaggcgtcacacaccgccgtcgcaatcgacaacaacgagatgatgctcgacgaactgcgtgtgcgagcgtgttcgaaacagaccgaccagctgcgtgcgtgggcggcaccgttcccggatcgggtgtgggcaatcgagtccgcccgcgggctcggctatctgcttgcccagcaactcgtcgccgcgggtgaggtcgtggtcgacgtcccacctgtgttgtcgacacgcacccgcctgttgggttctggcaaggcgcagaagaacgacccgaacgacgcccgatcggtcgcgatcgccgcgttgcgtcacgacgcgctgggccgggtggttcttgatgaccacgcccgagtgttgaagttgttggtgaagcgtcatcgtgatctcggccgctccaagagcaaagcggcgtgccgcctgcatgcgttgttgatggaactcgagccgggcgggatggccaaagagatgaccgtgaccagggcaaacgagatcctcaaccgcatcgaaccagccacccagatgatcgagcatcgcctcgcggtcgcccgtgagactctcgccgacatcgatcactacgagacacagatgaaagcctcactgaagcgactccgcgctgcggtcgccgcgtcagggacctcgctggtcgacatccgcggtgttggtgtcgtggtcgctgcgatgatcatcggccagaccggtgacgtctcgcggttcgcgtcagctgcgcacttcgcgagctacaacgccaccgccccgatcgaagcatcgtcgggtgagaacaagcggcaccgactgaaccagcgcggcaaccgacagctgaactgggcgatccacacggtcgcggtgacccagcttcgctacccgtgcgagggacgcgactattacgaccgcaaacgcgccgagggcaagaacaccaaagaagccatccgcgccctcaagcggcaactgtccaacgtgatctaccgaaccctcgtcgctgacgcccgacgcccgaccatccggtgaagtgggcccgggaggacaatcaggcacgacacaaaatccagcgtgaccggctcaacatcctgaacggccggctcttcggataggtcactcccggacccgacaccaaccctacgacgcccgcctccagccgcgccaggggcgttcctcaaacgcgcccacgaacccgtccgaaatcaccccttgacacaaagaggctt

SEQ ID NO: 1600 - DNA, 1353 bp, unidentified
  source 1..1353: mol_type = unassigned DNA; note = element_216e140
  misc_feature 1: note = core
  misc_feature 2..75: note = LE
  misc_feature 76..1101: note = CDS
  misc_feature 1102..1353: note = RE
  misc_feature 1104..1343: note = bridgeRNA
tatggatggcccgcccctcaaccgaaccgctaagatctcgcgacagcgggatggtttgagaaaggagcgacggtcatggacgtatcggttcttggaatagatctcggcaagaacagctgcagcgtggttggtctggatgcaaccgggaaggtcgttgtccgccggagactgcggcgcgagacggtgatcgcttacgcaggcgctttgtcgccctgtatcgtggcaatggaggcctgctgtggtgcacatcacatgggccgcgcacttgagcggcaaggccataccattcgcctgatgtcacccgagtatgtccggccctacgtcaaggcccagaagaatgacgaccgcgatgccgaggcgatcgcggaagccgcaacccggccgacgatgcgatttgtcgagctgaagtccgaagagcagctcgacatgcagacgctgcatcgcattcgtgaccaactcgtcggtgatcgcacgtcgctgatgaaccagatccggagcctgcttctggaacgcggccacatcgttccccaaggccgcgcaaagctggccgtccggcttgccgagttgcttgacggagacgagccagtgcttggctgccgcatccatcggttcgtcagtgatatgcggcagcgctggactgcgctcgaccagcggattgccaatctcgatgccgagttcacgcaagcggcgcaggcggacgagcggacgaggcgcttactgacgatacccggcatcggggcgcttaatgcaaccgcgcttgtagcagcggtgggcgatgcccgtacttttgggcgtggccgtgatcttgccgcatggctgggcttggtgccgcgacaagcgacgacggggggtaagccgcgactgctcggaattaccaagcgcggcagccgctatctgcgcaagatcctcatccagggagcccgttcgtcgttacccacgatgagcaagagtgacacgcgccttggcgcttggctgcggggcttgcttgcgcgctcccacgccaacactgtcgtggtggcactggccgccaagatggcgcgcatcgtttgggcgctgttgcgtcatgagcgcacctacgccccagtcgcgcaagcggcttgaacgagatcagtcgatgcaccgcgcaccgactggatgatgtctgcgggaggtgagtgacagatggcctgacagtcgaccggtgtcctggaaccctacggcgaaaaatggcacttgatgccggcccctttatgaggaccagaacgcgcggatctccatcttggccaacgatctcatatcgaaaggccggatacgttttcgcagactgctcagatcatccgacacaaaccgcttgccgacggggcgggccatacg

SEQ ID NO: 1601 - DNA, 1372 bp, unidentified
  source 1..1372: mol_type = unassigned DNA; note = element_217694a
  misc_feature 1: note = core
  misc_feature 2..64: note = LE
  misc_feature 65..1114: note = CDS
  misc_feature 1115..1372: note = RE
  misc_feature 1116..1362: note = bridgeRNA
tatggaatggcccgcccctcaccgtcctgccttatcctggggaggcaaacgagggagagcgatgatgacgaagcctaccgttgcggttctgggtatcgatctgggcaagaacagttgcagtgtcgccggtctcgatgacacgggtcgtgtcgttctgcgacgtcgtctgagccgggaaggcgttgttcggctcacggccagcatgccgacctgcgtcatggcgatggaagcgtgctgcggcgctcatcatcttgggcgcgtgttgcgcgagcaggggcacgagatcaggttgatgtcgccggaatatatccagccctacgtcaaggcacagaagaacgacgagcgggatgccgaagcgatcgccgaagccgcaacccgtccgacgatgcgttttgtagagctgaagagcgaggcccagctcgagatgcagatcctgcatcgggcacggacacgtctggtgacggagaggacggcgttgatcaatcaattacgcgcgttgttgctggagcgcggcatcatcgtcgccaaggggcgctctcgcctggagcagcatcttgcctcaatgctggacgagggggcgccggcgccgatggccctgagtccgcgcaccctgctgctgatcgaggacatgcgcctggaatggcgcgacctcgatcgtcgcattgccgcgctctcggcagagttccaggtgcgggcacgtgaagatcagctggcaagccgacttgcgacgattcccggcttcggagcgctcaacgccacggccctcgtcgcggcgatcggctctgccgagacgttccatcgcggcagagacctcgcggcctggctcggtctcgtgccgcgacaggtgacgactggcggcaagccccgccttctcggcatcaccaagcgggggaatgtctatcttcgtaccttgctgatccacggcgcgcgagctgccttgccgtcgcttgtagatagccccaccacgatgggagagtggctacgcgggctgtcagcacgggcgcataaaaacaaggtcatcgtcgccctggccggcaagctggcacggatcgcctgggcggttctgcggtcggggcaaggctaccggaagggcgacatgcccgtaatagcctaatgtgatcgaccggccgcgcaacgcccccgcgccccggtcaagcatgtctgctggtggtggatgcgagatggcctgacggttgatccggcgctttgaaatcctggttcaaaaaatggcgcatcaacgccgggacttttatgaggaccagagcgcgcggaactccatcttggccgaggcccgacctcgagaccggatacgttggcgcagaccggtcagattgcctagcaaaaaccgcttgccgacggggcgggccatacg

SEQ ID NO: 1602 - DNA, 1605 bp, unidentified
  source 1..1605: mol_type = unassigned DNA; note = element_217c9cc
  misc_feature 1..2: note = core
  misc_feature 3..277: note = LE
  misc_feature 278..1474: note = CDS
  misc_feature 1475..1605: note = RE
  misc_feature 12..297: note = bridgeRNA
ctactataatatatttagacgttaaatccatgacaaaccagccatggtttacacgtacttgttacataagctataatgaaagcagtgactggactaacgaagtcctccatgggacaccacgcccgtataacagacagttatccatgctttcattatggcattcgtttttgcaggtagagccaacctctgtgcactcgtatcactcagtagacagaataggtaatgagtaaagtgtggatttgtcgtcactaaatctattttatcaggagagatatttatgaacgcagtaggtatcgacgtttccaaaggcaaaagcactgttacagttatacagcccttcggagttgtcatagctgaaccatttgatgtgtttcacacagacagtgacctcaaaaagcttgccgacttcatcaaatcactgtcaggtgaaacaaaggttgtcatggagtacacaggtgcatattatgaaccaattgcaaatgcacttcataacgagggtatatttgtatccgtagtcaatcctttgctgattgatgattacggcacaaaccgtgtcagaaaggtcaagaccgataaaaaggatgctcttaaaatagctttatttgctattgacaagtggcttaaccttcgtgaatacatacctgctgacgatattcgaaaaacgcttaaagtcctcaacaggcagtatattcagtacaataaaattcttgttatgcagaagaataatctgattgctctgcttgactcctgctttccaaatgtcaatacattattcacatcacctcgcagagagtctgacggacacgaaaaatgggttgatttcgtgttgaagtttccgcatatcaattctgtttcaaaactgtcattatccgcctttaaaagcaaatatcaaagctggtgcagaaagcataattacaattacagcgaaaccaaagctgctgaaattcacgcttattccaaaacacaggtaagcgtgctgcctatgaccgattccgttgtcaaaatcattaccgaggctgctttattgattaattccactcttgaaacgctgtgtgcatttcgtgatgagatggacaggctttcatcaatgcttcctgaatacgaagttgttatggaactttacggcgtaggaaaagtactcggctcacagcttattgctgaaatcggtgatgtcagacggcttgacagctctaaatcacttgtggcaatggcaggtattgacccaccgcccaatcaatcgggacaagttgaccagaagtcgagaagcatttccaaacgtggctcttcggcacttcgtaaaacgctttttcagattatgacaatcattatacagaacaagcctgttgatgagcctgtttatcaattccttgacaagaaacgctcagagggcaagccttatcgggtttacatgattgctgcagctcacaaatttcttcgtatttactacgctcgagttatggaaactgtaacttaattatctatctgcatatatttttcagactgctttaaaatttctttttattgcggtctttttgtcatgccaattttagcatgaaaatttttttgaatttttttcgttttacctattgacttttatttgcaggt

SEQ ID NO: 1603 - DNA, 1609 bp, unidentified
  source 1..1609: mol_type = unassigned DNA; note = element_2184a43
  misc_feature 1..3: note = core
  misc_feature 4..274: note = LE
  misc_feature 275..1477: note = CDS
  misc_feature 1478..1609: note = RE
  misc_feature 8..218: note = bridgeRNA
gttcgtattataaggtcaactagaaatgaaaatatttctggttgaccttatatgataaccgtagccggggtagaacgtaagcacccgtgggacttgatcccgtcaactaaaccgttcgccccctacttgtagaaacatgattgaggctggttgggacgttgatctcgtataacaagcgaagctatgatactgcaagaaggattagggggaccggcaaatatgatttaggaggagaagccaatgaatccagtggttggactggatgtagccaaaggtgaaagccagatacaagctttcctggataagaaaaaaccttatcaaaaaagctttaaaggttgaacacactcttgaaggtctggaaaaactgcattcctttctctcagatgttgagggaataactggggtaaaacctccattagtcatggagtcaaccggtcactatcatactccggtagtccattattttgaggaaagaggatacttgatcattattgttaaccctttagtctcatatcgggcaaagagttcaagtttaagaaaggtaaagacagatataatcgatgccaatcatctctgcgagatgtattacaaagaggatttggaaccttataaaaaacgcggtatccagctcttgaaccttcgaaacctgactagacagcacgaaaatattacggggatttatgtgcaaacaaaactgcaatttcaagccgtcttggatcaggtgtttccagtatatagaggagtgtttggggacttatattctgttgtctctctactcaccttacttgaatttcctacatctcaaagtatcttagaagcaggcgaagagacagttactaacacaataaaaaagttatgtccaaggcgctccatcaattgggctaagacaaaagcaatagcccttttagctgccgcaagccaaaatccctttagggaaaatctctaccaaagccacattttaagcgtggaaatgtatataaaaatgcttctggaataccaaaagcaactatccaaattcgaagaagagatagatgccttggcaaaagatattgaagaatataaaatcatccaatcaatccctgggatcggagaaaagatcgctgcaacgatcattttcgaaattggcgagattgaacggtttgatcaccctaaaaagcttgtcgcattcgccggtattgatccgagtatctttgaatcaggtaaattcagaggaaccgtaaacaggattaccaaaagaggttcaagccgacttaggcatacactgtatatggccgttaggtgtgctattcgggattctaggaaaagcaaaacgacggaggaactaatccctcgcaatgaaaggttgagagaattctatgataaaaaacgggaagaaggaaaaccctttaaagtagccataatagcctgtgccaataagcttttacagtggatttatgcccttttgaaaagcagaacgactttccaagatctagcttagttacccaaatggactaataaatgcaaaaccttccaaacatccaggttaggaaggttatttggcatgcttatttttagcataccataatataaaattcaatttcattgaaaaatgttgacaaactattagctg

SEQ ID NO: 1604 - DNA, 1541 bp, unidentified
  source 1..1541: mol_type = unassigned DNA; note = element_2188b9a
  misc_feature 1..2: note = core
  misc_feature 3..247: note = LE
  misc_feature 248..1423: note = CDS
  misc_feature 1424..1541: note = RE
  misc_feature 19..220: note = bridgeRNA
ctcgtattatagagtagtagttattaaagtccctctccaaggactatgtgctacactgtaagggatactgtggattggtttgatcttcctaccacacgatggtttcagaaaggctccaaccacagtctctttgtaagtttgttaatcagttagataccgcacgacggtttatgtggaacgaggttacaagcgcaaggagctctgtggtcccaagcagtatcgaatccatttacgaaggggtttcgctatgattcatgtgggaatcgatgttgcaaaggacaagcatgactgtttcatcgttagctcggagggcgaagtgctgcaagatgtattcaccgttccgaacactatgaccggctttgatgacctgttccaaagaattcgcgctgtgtccggaaatttagacaaagtaaaagtagggcttgaggccaccggacactacagctacaacatcctgggatttcttctcgacaaaggtctgcacacctttgtcatcaaccctctccataccaatctctaccggaagagtctcagccttagaaaaactaagaccgataaggttgatgcccgaacaattgcatctatgcttatgtctgatgtaaacctcaagtcctacacagacacagcataccacaacgaggagctaaagtcactgacccgttaccgtttcgacaaggtaaaggaacgggcacagctcaaacagtccattgcgcgattggttacgattttgttcccagaacttgaaaaactggttcctacactccacatggtctccgtttacgcaattttaagagaatatcccggcgccaggcaggtcgctgctgcaaatttaactcacttaaagacactcctgagcgacgcctccaaggggcattacggtcgtgagaaagccattgaaatccgtgatgttgccagatgttccattggctctcggatgccggccaagtcgcttgaactgcgccacaccattaagctcattcaagagctggatgcagagattgttgaaatcgaggtggaaatcaaatctatcatggacgagcttcaatccccaattctgactatacctggcattagctaccgcatgggagccatgattctcgctgaaattggcgacttctcacggttcgattccccagacaagattttggcctatgcggggctttctccctctacataccagtctggacaactaacatcttcctactctcacatggagaaacgaggttctcggtatctgcgttacgcaattttcaacgcaaccaagttcgtttgccactgggatccaacctttgctgcctatcttgccaagaaacgctccgaaggtaagcactacaacgttgccatctctcatgcagcgaagaaacttgtgcggctcatatatgccttggagaaatccggacaggcttactgctcagttacctgatctatctctcataccgttttcttgagcgccgcaagacgctctgtttgtcatacctttctttatcgttatccaatttacaacattttttcgctttggagcttgacttttaatagttagt

SEQ ID NO: 1605 - DNA, 1793 bp, unidentified
  source 1..1793: mol_type = unassigned DNA; note = element_2190e62
  misc_feature 1..2: note = core
  misc_feature 3..107: note = LE
  misc_feature 108..1382: note = CDS
  misc_feature 1383..1793: note = RE
  misc_feature 1460..1711: note = bridgeRNA
agcattcctgtagtgcgttaatttcgactttgaaaaaaatagaacccctcagtaagataagagtatagacaccactctaaaactcaaatctaaggaggagctcttatatgaagtttaaaatgcaagacaaacaaaatcaactaattgaaagaatttctgataaacatcttgtggttggtatagatattgcccaattaacacatgtagcacgagctgtaaactatcgtggtatagtggtcggtgatcctctatcttttgaaaataacgaagatggttttgcaaagttactagattggattaacaagttgaaaaatgtgaaaggtcttgatactgcaatcgttggtatggaacctacagggcattattggttaaacctgtcccaatggctttacgatcgaaacattgatgtggtaactgttaatccccaccttgttaaaaagatcaaagaaaacagagataatacacagtccaaaagtgacaaaaaagacgctctagttatcgctgatatggtgaagaatggatattattcctttattcgtccaactacagaggctttcgaaaaactaagagtattgatgtctaaccgagatgtcatagttaaacgacatgtcagtacttcgaaccaaatccatcgctgggttgatattattttccctgaacttagacaagtttttaaagacgttacatgtaaaggggcaatcgttactctccgtttattccctacaccgaaagaattacgttcaatggaagctatagatatcgttacagggtggagaacagagatgaagcgtcaacctggtattaaaaaagcagaagcactcattaaactagctaagaattctgttggtaatgataaagcacatgatgcatataaattacacctaaaacaattacttgaagaattcgacctcgccacaagccaattagaaatagtcgataaagaagtatctgaagctcttggaagtattacatttacagaaaaactacttagtataaaaggattaacaatcgtaatgttaggtggcattttaggtgaaaatggtgacctaagtcagttcgcacatggcaattctctattacgtcacgcgggtttacatctagtcgaggcaagctctggtaaatggaaaggacaaattgtcatttctaagagaggaaggtctcgtctaaggcgattcttatacctagcaacaatgtgtcttgtgatgaacaatcctgagttcagagaaattcatgcccataatgtcaaagtgaagaagatgaaaaaaatgaaatccattatgaaactgattggtaaatttgcaagaatgatagtaggaattgcccgacataatgaaccctattgtgcagaaaaagtccaccctttggcacctttagcagcataagttaattaccttataactgaacatacgaaatagtataagttgctttattgaatgttggcttattcgtaggatctcaaagaaagcacggagtactggaatacttaaacataagggcacagacccatacctttagcaataccggcctccaccccttggataggcatgacgaaggaatgaaagggcaaaagacccgttgagacatgggagggaaagcctccagggacggcgtggagaatgcgtgcagtatatcatggaaataaatggagtaataatttactcctctattcccgcatgccttcatgtagccttgtctctaatactcattccatatatccgtcattgatcttacatgtggatttgaaatcctgcgaataagcgagtatttaagagtaaattgaattaaactgaggg

SEQ ID NO: 1606 - DNA, 1393 bp, unidentified
  source 1..1393: mol_type = unassigned DNA; note = element_219df7d
  misc_feature 1..3: note = core
  misc_feature 4..89: note = LE
  misc_feature 90..1121: note = CDS
  misc_feature 1122..1393: note = RE
  misc_feature 1092..1380: note = bridgeRNA
agatggagtggttgccgccctccccagatggcatcgcaatgtgccaggatagtggtgtttacagccactgagcggaaaggacggcaaccgtgacgaaagatacaatgatcggggtggatttggcaaagacggtttttcagcaccacggggcgtcgatgacgggagagctgaagttccggaagaaattgtcacgggggagttttgccaaatttatggccgatcagccgccagcggtgatcgtgatggaagcctgtggcagcgcgcattattgggcccgcgagatgagcaggtatggccatgaggtgaagttgatcgccccgcattacgtgaagccttttgtaaagcgtcagaagaacgatgcggcagatgccgaagcgatcgtaatcgcggctcagagacctgaaatgcgcttcgtagatccaaggactgccgagcaacaaagcagggcaattttgtttcgcgctcgagagcgccttgtgcatcagcgcaccgaactggccaacgcactcaggggctgcctctatgaatatggccatgttattccgaagggaatgcatcagttgaaacgcattgatgagatcctcaataacccaaatagcgacttgccagatttgatgcgcgaggagtgccgcgacctgatggaccagattgccgagaagacggtccgcatcgatgcgcgaacagtgaagatcaaggcgctggcggctgaagccgacacggcgcggcgactacaaacaattccaggtgtcggcccgttgaccgccctggctgttgaggcctttgccccgcccatagagagctttcggtgcgggcgcgactttgccgcatggctagggcttgttccgcgccaattctcctccggtggaaaagagcggctcggacgcatttctaaggcgggccaagctgatatccgccgactgctaatcattggcgcgatgtcgcgcctgacctggctgacccgcaaatcgatcaccgaaggctcatggctcgcgcgtatggccgcgcgaaagccaagaatgcttgtagcgatagcattggccaacaaaatggcgcgtacgatttgggccgtgcttacaaaaaatgaggattatcgagttccgacacgggcagccgtagcatgatcgatatgccactgccacttggcgtcggatagcgagggagtaagaaggcgacgacccgaatgggcaaaatgatcgaacagatctggatcaggaaaaccagtgcagtctcttgagcatctgagctcgtttgaaagatttggacctgatccgcagatcaccataccggccagcggcttttgacatgccgcatttaaaggcctgacagaagaccgcactcgatcactcgcatatttgggttagaaacttcttgcgccacgggcggcaaccacaga

(The sequence listing continues in the following parts.)

What is claimed is:

1. A recombinant nucleic acid editing system comprising:
a) an IS110 family transposase, or a nucleic acid comprising a sequence encoding the IS110 family transposase; and
b) a nucleic acid comprising a sequence encoding a bridgeRNA.

2. The recombinant nucleic acid editing system of claim 1, wherein the nucleic acid comprising a sequence encoding a bridgeRNA comprises a left end (LE) sequence of a transposon that encodes the IS110 family transposase.

3. The recombinant nucleic acid editing system of claim 1, wherein the nucleic acid comprising a sequence encoding a bridgeRNA comprises a right end (RE) sequence of a transposon that encodes the IS110 family transposase.

4. The recombinant nucleic acid editing system of claims 1-3, further comprising a nucleic acid comprising a RE sequence and a LE sequence or a RE sequence, a core sequence, and a LE sequence of the IS110 element that encodes the IS110 family transposase.

5. The recombinant nucleic acid editing system of claims 1-3, further comprising a nucleic acid comprising a right flank (RF) sequence and a left flank (LF) sequence or a RF sequence, a core sequence, and a LF sequence of the target site sequence for the IS110 family transposase.

6. The recombinant nucleic acid editing system of claim 4, wherein the nucleic acid comprising the RE sequence and the LE sequence or the RE sequence, the core sequence, and the LE sequence further comprises a nucleic acid sequence for insertion into a target site sequence.

7. The recombinant nucleic acid editing system of claim 6, wherein the target site sequence comprises a RF sequence and a LF sequence or a RF sequence, a core sequence, and a LF sequence for the IS110 family transposase.

8. The recombinant nucleic acid editing system of claim 5, wherein the nucleic acid comprising the RF sequence and the LF sequence or the RF sequence, the core sequence, and the LF sequence further comprises a nucleic acid sequence for insertion into a donor site sequence.

9. The recombinant nucleic acid editing system of claim 8, wherein the donor site sequence comprises a RE sequence and a LE sequence or a RE sequence, a core sequence, and a LE sequence of the IS110 element that encodes the IS110 family transposase.

10. The recombinant nucleic acid editing system of claims 1-9, wherein the bridgeRNA comprises a nucleotide sequence at least 50% identical to a bridgeRNA sequence of SEQ ID NOS: 1-348 or SEQ ID NOS: 349-10175.

11. The recombinant nucleic acid editing system of claims 1-9, wherein said RE sequence, comprises a RE sequence of SEQ ID NOS: 1-348, 30354-30529, 349-10175 or 30530-40356, said LE sequence comprises a LE sequence of SEQ ID NOS: 1-348, 30354-30529, 349-10175 or 30530-40356, and/or said core sequence comprises a core sequence of SEQ ID NOS: 1-348, 30354-30529, 349-10175 or 30530-40356.

12. A recombinant nucleic acid editing system comprising:
a) an IS110 family transposase, or a nucleic acid comprising a sequence encoding the IS110 family transposase; and
b) a bridgeRNA, or a nucleic acid comprising a sequence encoding the bridgeRNA, the bridgeRNA comprising at least one stem-loop structure and further comprising at least one internal loop comprising a first nucleotide sequence that is complementary to a first target site sequence of a target DNA, a second nucleotide sequence that is complementary to a second target site sequence which is on the opposite strand of the target DNA to the first target site sequence and wherein the bridgeRNA is capable of forming a complex with the IS110 family transposase.

13. The recombinant nucleic acid editing system of claim 12, wherein the bridgeRNA further comprises a third nucleotide sequence that is complementary to a first donor site sequence of a donor DNA, and a fourth nucleotide sequence that is complementary to a second donor site sequence which is on the opposite strand of the donor DNA to the first donor site sequence.

14. The recombinant nucleic acid editing system of claim 13, wherein the third nucleotide sequence and the fourth nucleotide sequence are on a second internal loop.

15. The recombinant nucleic acid editing system of claims 1-14, wherein the IS110 family transposase comprises a RuvC-like DEDD catalytic domain and a transposase domain.

16. The recombinant nucleic acid editing system of claim 15, wherein the IS110 family transposase further comprises a linker domain between the RuvC-like DEDD catalytic domain and transposase domain.

17. The recombinant nucleic acid editing system of claim 16, wherein the linker domain comprises a coiled-coil linker domain.

18. The recombinant nucleic acid editing system of claims 15-17, wherein the RuvC-like DEDD catalytic domain comprises an amino acid sequence at least 50% identical to a RuvC-like DEDD catalytic domain sequence of SEQ ID NOs: 10176-10523, 10524-20350, or 40357-516430.

19. The recombinant nucleic acid editing system of claims 15-17, wherein the IS110 family transposase comprises a RuvC-like DEDD catalytic domain that forms a similar tertiary structure to the RuvC-like DEDD catalytic domain of IS621.

20. The recombinant nucleic acid editing system of claim 19, wherein the IS110 family transposase RuvC-like DEDD catalytic domain comprises a tertiary structure similar to a tertiary structure of the RuvC-like DEDD catalytic domain of IS621 if the template modeling score (TM-score) for the RuvC-like DEDD catalytic domain of the IS110 family transposase is 0.5 or higher.

21. The recombinant nucleic acid editing system of claim 20, wherein the RuvC-like DEDD catalytic domain comprises an amino acid sequence at least 15% identical to a RuvC-like DEDD catalytic domain sequence of SEQ ID NOs: 10176-10523, 10524-20350, or 40357-516430.

22. The recombinant nucleic acid editing system of claims 15-17, wherein the transposase domain comprises an amino acid sequence at least 50% identical to a transposase domain sequence of SEQ ID NOs: 10176-10523, 10524-20350, or 40357-516430.

23. The recombinant nucleic acid editing system of claims 15-17, wherein the IS110 family transposase comprises a transposase domain that forms a similar tertiary structure to the transposase domain of IS621.

24. The recombinant nucleic acid editing system of claim 23, wherein the IS110 family transposase transposase domain comprises a tertiary structure similar to a tertiary structure of the transposase domain of IS621 if the template modeling score (TM-score) for the transposase domain of the IS110 family transposase is 0.5 or higher.

25. The recombinant nucleic acid editing system of claim 24, wherein the transposase domain comprises an amino acid sequence at least 15% identical to a transposase domain sequence of SEQ ID NOs: 10176-10523, 10524-20350, or 40357-516430.

26. The recombinant nucleic acid editing system of claims 15-17, wherein the IS110 family transposase comprises an amino acid sequence at least 50% identical to SEQ ID NOs: 10176-10523, 10524-20350, or 40357-516430.

27. The recombinant nucleic acid editing system of claims 15-17, wherein the IS110 family transposase further comprises a tertiary structure similar to a tertiary structure of IS621.

28. The recombinant nucleic acid editing system of claim 27, wherein the IS110 family transposase comprises a tertiary structure similar to a tertiary structure of IS621 if the template modeling score (TM-score) for the transposase is 0.5 or higher.

29. The recombinant nucleic acid editing system of claim 28, wherein the transposase domain comprises an amino acid sequence at least 15% identical to a transposase domain sequence of SEQ ID NOs: 10176-10523, 10524-20350, or 40357-516430.

30. The recombinant nucleic acid editing system of claims 1-29, wherein the IS110 family transposase is an IS110 group transposase.

31. The recombinant nucleic acid editing system of claims 1-29, wherein the IS110 family transposase is an IS1111 group transposase.

32. The recombinant nucleic acid editing system of claim 31, wherein the IS1111 group transposase is IS111IA or IS1111_229727.

33. The recombinant nucleic acid editing system of claim 30, wherein the IS110 group transposase is IS621, ISPa11, IsPa29, ISMmg1, ISPfl1, ISMae40, ISStma6, ISAzs32, ISMex9, ISCARN28, ISAarl6, ISCps7, ISPpu9, ISRel9, ISEsa2, ISMma5, IS900, or ISHne5.

34. The recombinant nucleic acid editing system of claim 30, wherein the IS110 group transposase comprises an amino acid sequence at least 50% identical to IS621 (SEQ ID NO: 10176).

35. The recombinant nucleic acid editing system of claims 12-34, wherein the bridgeRNA comprises at least two stem-loop structures comprising a first stem-loop and a second stem-loop where the first stem-loop is 5′ to the second stem-loop and wherein the first stem-loop comprises a target binding loop and the second stem-loop comprises a donor binding loop.

36. The recombinant nucleic acid editing system of claim 35, wherein the bridgeRNA further comprises a third stem-loop structure 5′ of the first stem-loop.

37. The recombinant nucleic acid editing system of claims 35-36, wherein the stem of the first stem-loop is 5 to 35 nucleotides long and the loop is 3-10 nucleotides long, the target binding loop is 5 to 20 nucleotides long, the stem of the second stem-loop is 5 to 35 nucleotides long and the loop is 3-10 nucleotides long, and the donor binding loop is 5 to 20 nucleotides long.

38. The recombinant nucleic acid editing system of claim 37, wherein the stem of the second stem-loop structure comprises 1 to 4 loops or bubbles that are each 1 to 10 nucleotides long.

39. The recombinant nucleic acid editing system of claims 12-34, wherein the bridgeRNA comprises a nucleotide sequence comprising any of the 5′ to 3′ sequences provided in FIG. 19, wherein “n” represents any nucleotide, “R” represents an A or G nucleotide, and “Y” represents a C or U nucleotide.

40. The recombinant nucleic acid editing system of claim 39, wherein the bridgeRNA comprises a 5′ to 3′ secondary structure provided in the first row, second row, third row, or fourth row of secondary structure for said sequence provided in FIG. 19, wherein matching parentheses “(“and”)” indicate base-paired nucleotides, and “.” indicate unpaired bases.

41. The recombinant nucleic acid editing system of claims 12-34, wherein the bridgeRNA comprises a stem-loop structure as depicted in FIG. 2D, FIG. 11B, or FIG. 13.

42. The recombinant nucleic acid editing system of claims 12-41, wherein the target binding loop of the bridgeRNA comprises:
a left-target guide (LTG) comprising, in the 5′ to 3′ direction, a nucleotide sequence complementary to first strand of a target site sequence wherein the 3′ end of the LTG is complementary to at least one of the nucleotides of a core sequence on the first strand of the target site sequence; and
a right-target guide (RTG) comprising, in the 5′ to 3′ direction, a nucleotide sequence that is a reverse complement to an opposite strand of the first strand of the target site sequence wherein the 3′ end of the RTG is reverse complementary to at least one of the nucleotides of the core sequence on the opposite strand of the first strand of the target site sequence;
wherein the target site sequence is a polynucleotide sequence; and/or
wherein the donor binding loop of the bridgeRNA comprises:
a left-donor guide (LDG) comprising, in the 5′ to 3′ direction, a nucleotide sequence complementary to a first strand of a donor site sequence wherein the 3′ end of the LDG complementary to at least one of the nucleotides of a core sequence on the first strand of the donor site sequence; and
a right-donor guide (RDG) comprising, in the 5′ to 3′ direction, a nucleotide sequence that is a reverse complement to an opposite strand of the first strand of the donor site sequence wherein the 3′ end of the RDG is reverse complementary to at least one of the nucleotides of the core sequence on the opposite strand to the first strand of the donor site sequence;
wherein the donor site sequence is a polynucleotide sequence, and the core sequence of the donor site sequence is the same as the core sequence of the target site sequence.

43. The recombinant nucleic acid editing system of claims 12-41, wherein the target binding loop of the bridgeRNA comprises:
a left-target guide (LTG) comprising, in the 5′ to 3′ direction, a nucleotide sequence is reverse complementary to an opposite strand to a first strand of a target site sequence wherein the 3′ end of the LTG is complementary to at least one of the nucleotides of a core sequence on the opposite strand to the first strand of the target site sequence; and
a right-target guide (RTG) comprising, in the 5′ to 3′ direction, a nucleotide sequence that is a complementary to the first strand of the target site sequence wherein the 3′ end of the RTG is complementary to at least one of the nucleotides of the core sequence on the first strand of the target site sequence;
wherein the target site sequence is a polynucleotide sequence; and/or
wherein the donor binding loop of the bridgeRNA comprises:
a left-donor guide (LDG) comprising, in the 5′ to 3′ direction, a nucleotide sequence complementary to a first strand of a donor site sequence wherein the 3′ end of the LDG complementary to at least one of the nucleotides of a core sequence on the first strand of the donor site sequence; and
a right-donor guide (RDG) comprising, in the 5′ to 3′ direction, a nucleotide sequence that is a reverse complement to an opposite strand of the first strand of the donor site sequence wherein the 3′ end of the RDG is reverse complementary to at least one of the nucleotides of the core sequence on the opposite strand to the first strand of the donor site sequence;
wherein the donor site sequence is a polynucleotide sequence, and the core sequence of the donor site sequence is the same as the core sequence of the target site sequence.

44. The recombinant nucleic acid editing system of claim 42 or 43, wherein the target site sequence comprises sequence X₁X₂X₃X₄X₅X₆X₇X₈X₉X₁₀X₁₁X₁₂X₁₃X₁₄ where X is any nucleotide, and X₈X₉ are the core and one or more of X₁₂, X₁₃, and X₁₄ are optionally part of the target site sequence.

45. The recombinant nucleic acid editing system of claim 44, wherein the bridgeRNA encodes an LTG in the 5′ to 3′ direction X₁X₂X₃X₄X₅X₆X₇X₈ and an RTG in the 5′ to 3′ direction Y₁₄Y₁₃Y₁₂Y₁₁Y₁₀Y₉Y₈ where Y is the complementary nucleotide to X and one or more of Y₁₄, Y₁₃, and Y₁₂ are optionally part of RTG or wherein the bridgeRNA encodes an LTG in the 5′ to 3′ direction X₁X₂X₃X₄X₅X₆X₇X₈X₉ and an RTG in the 5′ to 3′ direction Y₁₄Y₁₃Y₁₂Y₁₁Y₁₀Y₉ where Y is the complementary nucleotide to X and one or more of Y₁₄, Y₁₃, and Y₁₂ are optionally part of RTG.

46. The recombinant nucleic acid editing system of claim 42 or 43, wherein the donor site sequence comprises sequence STIR-Xₙ₁—X₁X₂X₃X₄X₅X₆X₇X₈X₉X₁₀X₁₁X₁₂X₁₃X₁₄—X₁₂-STIR where X is any nucleotide, one or more of X₁₂, X₁₃, and X₁₄ are optionally part of the donor site sequence, STIR is optional, but if present is a sub-terminal inverted repeat comprising 2 to 20 nucleotides, and X₈X₉ are the core, and n1 and n2 can independently be zero to 10.

47. The recombinant nucleic acid editing system of claim 46, wherein the bridgeRNA encodes an LDG in the 5′ to 3′ direction X₁X₂X₃X₄X₅X₆X₇X₈ and an RDG in the 5′ to 3′ direction Y₁₄Y₁₃Y₁₂Y₁₁Y₁₀Y₉Y₈ where Y is the complementary nucleotide to X and one or more of Y₁₄, Y₁₃, and Y₁₂ are optionally part of RDG or wherein the bridgeRNA encodes an LDG in the 5′ to 3′ direction X₁X₂X₃X₄X₅X₆X₇X₈X₉ and an RDG in the 5′ to 3′ direction Y₁₄Y₁₃Y₁₂Y₁₁Y₁₀Y₉ where Y is the complementary nucleotide to X and one or more of Y₁₄, Y₁₃, and Y₁₂ are optionally part of RDG.

48. The recombinant nucleic acid editing system of claims 12-47, wherein the target site sequence is located on genomic DNA, a linear dsDNA, a dsDNA plasmid, ssDNA or RNA.

49. The recombinant nucleic acid editing system of claims 13-47, wherein the donor site sequence is located on genomic DNA, a linear dsDNA, a dsDNA plasmid, ssDNA or RNA.

50. The recombinant nucleic acid editing system of claims 48-49, wherein the dsDNA plasmid further comprises a polynucleotide sequence for insertion into the donor site sequence.

51. The recombinant nucleic acid editing system of claims 48-49, wherein the dsDNA plasmid further comprises a polynucleotide sequence for insertion into the target site sequence.

52. The recombinant nucleic acid editing system of claims 48-49, wherein the target site sequence and donor site sequence on the genomic DNA are located on the same DNA strand.

53. The recombinant nucleic acid editing system of claims 48-49, wherein the target site sequence and donor site sequence on the genomic DNA are located on different chromosomes.

54. The recombinant nucleic acid editing system of claims 12-53, wherein the bridgeRNA is a split bridgeRNA.

55. The recombinant nucleic acid editing system of claim 54, wherein the bridgeRNA comprises a first RNA molecule that comprises a first portion of the bridgeRNA and a second RNA molecule that comprises a second portion of the bridgeRNA.

56. The recombinant nucleic acid editing system of claim 55, wherein the first portion of the bridgeRNA comprises the internal loop comprising the first nucleotide sequence that is complementary to the first target site sequence of the target DNA and the second portion of the bridgeRNA comprises the second internal loop comprising the third nucleotide sequence that is complementary to the first donor site sequence of a donor DNA, and the fourth nucleotide sequence that is complementary to the second donor site sequence.

57. The recombinant nucleic acid editing system of claim 55-56, wherein the first portion of the bridgeRNA is encoded on a nucleic acid and is operably linked to a first promoter and the second portion of the bridgeRNA is encoded on the same or a different nucleic acid and is operably linked to a second promoter.

58. The recombinant nucleic acid editing system of claim 55-56, wherein the first portion of the bridgeRNA and second portion are encoded on a nucleic acid and further comprise one or more ribozyme cites which results in cleavage of the expressed bridgeRNA into the first and second RNA molecules.

59. The recombinant nucleic acid editing system of claims 42-58, wherein any of the LTG, RTG, LDG, and/or RDG of the bridgeRNA are complementary to more nucleotides their respective target site sequence or donor site sequence than the number of complementary nucleotides in its corresponding naturally occurring bridgeRNA.

60. The recombinant nucleic acid editing system of claim 59, wherein the total number of nucleotides comprising the target binding loop and/or donor binding loop of the bridgeRNA is the same as its corresponding naturally occurring bridgeRNA.

61. The recombinant nucleic acid editing system of claim 59, wherein the total number of nucleotides comprising the target binding loop and/or donor binding loop of the bridgeRNA is the increased as compared to its corresponding naturally occurring bridgeRNA.

62. The recombinant nucleic acid editing system of claims 42-58, wherein any of the LTG, RTG, LDG, and/or RDG of the bridgeRNA are not complementary to a nucleotide of the core sequence in their respective target site sequence or donor site sequence but are complementary to the same number of nucleotides in the respective target site sequence or donor site sequence as its corresponding naturally occurring bridgeRNA.

63. The recombinant nucleic acid editing system of claim 42 or 43, wherein the target site sequence comprises sequence X₋₁X₁X₂X₃X₄X₅X₆X₇X₈X₉X₁₀X₁₁X₁₂X₁₃X₁₄ where X is any nucleotide, and X₈X₉ are the core and one or more of X₁₂, X₁₃, and X₁₄ are optionally part of the target site sequence and wherein the bridgeRNA encodes an LTG in the 5′ to 3′ direction X₋₁X₁X₂X₃X₄X₅X₆X₇ and an RTG in the 5′ to 3′ direction Y₁₄Y₁₃Y₁₂Y₁₁Y₁₀Y₉Y₈ where Y is the complementary nucleotide to X and one or more of Y₁₄, Y₁₃, and Y₁₂ are optionally part of RTG.

64. The recombinant nucleic acid editing system of claim 42 or 43, wherein the donor site sequence comprises sequence STIR-X₋₁X₁X₂X₃X₄X₅X₆X₇X₈X₉X₁₀X₁₁X₁₂X₁₃X₁₄Xₙ₂-STIR where X is any nucleotide, one or more of X₁₂,X₁₃,and X₁₄ are optionally part of the donor site sequence, STIR is optional, but if present is a sub-terminal inverted repeat comprising 2 to 20 nucleotides, and X₈X₉ are the core, and n1 and n2 can independently be 1 to 10, and wherein the bridgeRNA encodes an LDG in the 5′ to 3′ direction X₋₁X₁X₂X₃X₄X₅X₆X₇ and an RDG in the 5′ to 3′ direction Y₁₄Y₁₃Y₁₂Y₁₁Y₁₀Y₉Y₈ where Y is the complementary nucleotide to X and one or more of Y₁₄, Y₁₃, and Y₁₂ are optionally part of RDG.

65. The recombinant nucleic acid editing system of claims 42-58, wherein one or more of the nucleotides of the LTG, RTG, LDG, and/or RDG of the bridgeRNA base pair to a nucleotide of their respective target site sequence or donor site sequence vis non-canonical base pairing.

66. A vector comprising any of the nucleic acids of the nucleic acid editing system of claims 1-65.

67. A host cell comprising any of the vector(s) of claim 66.

68. The recombinant nucleic acid editing system of claims 1-65, wherein any of the nucleic acids of the nucleic acid editing system further comprise an inducible promoter.

69. A method of integrating a DNA molecule of interest into a sequence specific site of a DNA of interest of a cell, the method comprising introducing into the cell: a nucleic acid editing system according to claims 1-65.

70. The method of claim 69, wherein the cell is a mammalian cell.

71. The method of claim 69, where the cell is a human cell.

72. The method of claims 69-71, wherein the DNA of interest of the cell comprises a donor site sequence and the DNA molecule of interest is part of a nucleic acid of the nucleic acid editing system comprising a target site sequence.

73. The method of claims 69-71, wherein the DNA of interest of the cell comprises a target site sequence and the DNA molecule of interest is part of a nucleic acid of the nucleic acid editing system comprising a donor site sequence.

74. The method of claim 72, wherein the DNA of interest of the cell further comprises a second donor site sequence and the DNA molecule of interest further comprises a second target site sequence and the nucleic acid editing system comprises a second bridgeRNA that targets the second donor site sequence and second target site sequence.

75. The method of claim 73, wherein the DNA of interest of the cell comprises a second target site sequence and the DNA molecule of interest further comprises a second donor site sequence and the nucleic acid editing system comprises a second bridgeRNA that targets the second donor site sequence and second target site sequence.

76. The method of claims 72-75, wherein the sequence of the bridgeRNA was engineered before introduction of the nucleic acid editing system to bind to the donor site sequence and target site sequence.

77. The method of claims 70-76, wherein the DNA of interest of the cell is the genome of the cell.

78. The method of claims 70-76, wherein the DNA of interest of the cell is a plasmid.

79. A method of inverting a DNA sequence of a DNA of interest of a cell, the method comprising introducing into the cell: a nucleic acid editing system according to claims 1-65, wherein a target site sequence and a donor site sequence are present on the same DNA molecule of interest and the LD of the donor site sequence and the RT of the target site sequence are on the same DNA strand.

80. The method of claim 79, wherein the DNA of interest of the cell is the genome of the cell.

81. The method of claims 79-80, wherein the sequence of the bridgeRNA was engineered before introduction of the nucleic acid editing system to bind to the donor site sequence and target site sequence.

82. A method of excising a DNA sequence of a DNA of interest of a cell, the method comprising introducing into the cell: a nucleic acid editing system according to claims 1-65, wherein a target site sequence and a donor site sequence are present on the same DNA molecule of interest and the LD of the donor site sequence and the LT of the target site sequence are on the same DNA strand.

83. The method of claim 82, wherein the DNA of interest of the cell is the genome of the cell.

84. The method of claims 82-83, wherein the sequence of the bridgeRNA was engineered before introduction of the nucleic acid editing system to bind to the donor site sequence and the target site sequence.

85. A method of translocating DNA sequences between two linear DNA molecules of interest, the method comprising introducing into a cell: a nucleic acid editing system according to claims 1-65, wherein a donor site sequence is present on a first linear DNA molecule and a target site sequence is present on a second linear DNA molecule.

86. The method of claim 85, wherein the linear DNA molecules of interest of the cell are chromosomes of the cell.

87. The method of claims 85-86, wherein the sequence of the bridgeRNA was engineered before introduction of the nucleic acid editing system to bind to the donor site sequence and the target site sequence.
